United States Patent Application Publication US 2021/0254056 A1 - sequence listing, part 16

SEQ ID NO: 33572 - DNA, 4294 bp, Homo sapiens
tccagagagctgttgtttttacacagtaatgagtgtgaaagtggtaaaggcaactcgattagggcattaagccagatggcatgtatgtgtgcatctgggacttactatgtatagaagtgagaaggaaatgaacatctattgtgtatactggtttccaggccgttcatcagtgccatatggcctaggaggagcctgagaagtgggtttctgggtcctcccaagctttcactggcacagcttcgcttacatctatttgctgttttggggttttgtacaaacattcatttaaggaaaatgttttgctgctttaaaaaggtggggatggaaaactactgatctagtataatggcagtggcccaaatttggagaggttgctgaaaagtggctttaatctgagttatgagagcagatctgcttttggctttagactttactggcctgaaagctgagggtcacactgacagctggctctggtctggggctgccctggcaagattctgggctaattgggtcatgtttggatcttagcttcccctctcaccagctttgtgaacatgggcaaattaacctcttcaaaatgtggattccttttctgtaaaatggagacaataacaacacctacctctctaggttgttaggaagattaaagaaactaaaagtcagtgaagtgtttccctgacttcctgacacatagaaaggaatcagttaggaattagaatggttttgatcttacagtttgctgtttatttattcatcatccatcaaatttgcattgaatgctcactgcagtcagaccctcactggtgctggtgatgcatgtgatgagcaagaccagagaagtcattgcccacatggaggttacctgtgggggaggcaaacaacaaacatgaaacaaaacgagacgtctgtcagaagctgtgaagaaaccaagtggagtgaggacagagtgactggggaaagccactttgggcaggtggtcggggagtctcccaagagaggccatttgagctgagaggccagtcacagcgagagtggaatgagaagtgcggaggcgcagggctacgaaggcgtggttggtccgggaatggaggggaggccggcatagctaaggcagagtgactgagggagatggtcagagagcgggggtggtagccacagccaggttctacccagtcgctgggccgcagcaagaagctaggagtgtactcggaggagtgggaagccaccgaaaagttgaagtgtgggagtgatgaattctgacttgaattttaaaagatcactttgacgccatgtgtggagtagataatgaatattcttctgcgtgaggcaaatgaatatccttgtgcatgaggcattgctgtaactggagtaacctggagttaaacagtaatcttcaccttttaggaacttgccatctgtgcccaacaactatgatttttgaagtgttgagcaattgctggcattctttgagcattgacatggcaggcactttaccgagcattttacaggtgctgtctcacaaaatttccacagcttaacaggtggggaaaacaagcttaaaatggttctataattggcccaaagatccacagctaacgagtcatgagactaaggtttgaatccagacattctgaccccgggtgctgtgcttctaaccactctgctgtgctgtgctggctcactgcagtggattgtctaccctttggtaaactggaaacatatggaacagggtcccagaagtctcttgttcctggaagtgcactgaagtgtaatgtgcctaccttcagctgtgagcaatagggttggctatactggtgtgtggccaaaagggtagactctgcacaggggcacgtgcgcctgtgtggctcaggacactgctgtcagccttgctctgttgcagggcttccagcaacaacttagacatctggctgcaggaagtgtgagctcagagatttgttgaggccagttaaagggggcctcaaaagtatttttatgaccctattgctactctctccaggcaaagagtgctgcagtttgttttcacagtaagtgcatttgtctcaatcaatgtagatggacaagcgtaagttccctgtttgttttctttttcccagttgtccctcatatcacagatgcaatccaggagtgggtgatgagacaggcgttaatacctgtagatgaagatggcctggaacctcaagtgtgtgttattgaggtttgtatgattcctgcacatgtgaacaagtgtactcatctccttagtcagccatcaataactgataagacagttcccagtggagcccttggccttcctatctctggtgcagtatgttgcaatgtggcaggtaagggcacagttaacagtcatgtggaatggccacgcaagggaaaaccgtagtttgcccagtgttccttttttgtagcatttatggtacaatcacttagtactgattgtccccatgagtagtgtgacacattttcatctgtctcttgagcaagtcagcagatcttttgctttcgtctggcaagagcattcgtctccgaatgagcttcatttggtttcagtatctgtactcctgctgtgctgatcctagctgttggatctcagtgttcctcagataacaggagactcaaaagttccagcagtttgtttataactaatactttttttttgagacagggtctcactctgtcacccaggctggagtccagtgcagcagtcatggctcactgcaaccttgacctcctgggctcaagcagttctcctaccttagcctcccaagtagctgggactacagtgcgcaccaccatgcccggctagtttttgtacttttttgggagaggcagggtttcgtcattttgcccaggatggtctctaactcctgaactcaagccatctgcctgccttggcctcccaaagtgttaggattacagatgtgagccaccgtgcccagccaactgatgctttttcagtacaaaaattatttatggttaactaaggagataagatttaggtttttcttttttttttttttttactttgtcactgtgatagagataacattcctggcacctctctcatctgacctttttcttgaaatgatgtggaaagttccataataacctttgggaaggatgagcctgtccaaaagaataaccttttagtacaaagagttgtctaattcctgttaactgttaactaacattatacagggttagagagtccgtgttacataattactgatactgaatcaggaagacagaacagttgttagaaaactaaactgccagagaagggtttagtgcctaacctctgaaacaactttgttcttctagcttggtggaaccgtgggggacatagaaagcatgccctttattgaggccttccgtcagttccaattcaaggtcaaaagagagaacttttgtaacatccacgtcagtctagttccccaggtaagtaagacattgaaagttttactttgggggagatggagaggagggaggaaaggtaaaccggaatgattttcactcattgtctagtagttttcacttgaggtgcaggaagcagagaataaagaactttgtaagtttaaatttgttacaatcatacttttttgaaaagatcaaatagaaaacatttgaaaaatcagggcagttgcatttgcagatgtagattggccgtgtgcatttgtctttactatatggtggaactagagtaaagaggctgtttttaaagacaaatcttgtggagaggagtcaatagtaacaaaaattgggaagccggaaagcagatggatgcatagaaccgactaagctgaccttgagtgccggatcttaagcccgcagcagtgaaagcagagaagcagccctgtttgccctgcagaaccccaaaagctcaggagtgggatgagggtgggcctcatgtaactactgcttcagaagactcagaccctgacatctttttcctacagtgcacagttgggcgttagcctcctcccaccttggcagaagactggaggcttgttctctggggagggttcctggatgagcagacagtagggacagttgagggcagtaacactggactacaaacatggggttatgtgtaatgttaacgctgttgacagtccttgccttcttccaccatttggttcccagaatcatcatgtttaggcttggccattccacgtaggaggttgtaagattgtcttctggggtatggatagcccaggataaaagacactggctctggcggctccccatgaaataagccagccagattttcaccatgaca

SEQ ID NO: 33573 - DNA, 1005 bp, Homo sapiens
gaaagcttaatgggatatgaaatctccctgagctttgggtgactacctgctatatcggaagtgcatggtcagttgggccaggactctaagtggtagggtagtgtggagacaaggatataggaaagggggagggccagtaagcacccagataacagaggtggtacctatgtatgtctagcagaagcgtgtagccaggcagaagggcaggagtcataaataccagatccaaagggcaaagcaaaagacagctcttgtacagatcgagctctttggcagaggtttaggtaagtaatcagaaaaacacaggaaatgataatatcagaggtggggcaaagggtcagtaaggcaggcaagcaggcaggaaggcaggcaggcaagcaggcagaaaggatacactaagaagcacagaggaattagaagtttaggcaaggctctggcttgtctgggcatagttaaaggctaatttcagggaagcaaatagaaactagagtgagagcagacaagttgctgagcacccacgatgagaaacagcttaagagcagaggaggacacaaaaagtgggctcaatctgtctgaaaatggggaagggagaggtagcagctaatggcagaatgtgataccttggtctttgtttctcttagttggtgaggcaagaagagtctggctaaagtttgcttcctcttatctagtggctgaatcagagagatgtaaattggggcagaattcccaggaaaggtcatgccccggtcccaaaccacttttgggactgcaggcccatgaggtacatccttaccagtctctgaatgctgctaccagtatgtttctctcacttcttaatgatggcattccatttaagaattcggagttcctatttctttgagaaatctctttttaaactagcagctacattcatggatgtgctaacccccattcatgcatccattctttcagaatcccaggtaggcctaactttcacgtctgaaatgtagatcagagttcctgaat

SEQ ID NO: 33574 - DNA, 3032 bp, Homo sapiens
aacaggtatgctaaagtgcagcacctctactagattcccatatttggattagcatgtagacagcagacagatccagtttaacaacatatgaagtcacaagagacgaatgtactaatccagaatagcaatatattaatttataataaaaatataaagtagcttgggtctcatgttgtctcgctgctatcaatccacatagggagctaaggtataatctgaaactggctttcccagcctgaaatcagagcaaggggaagtcaagtggattatcatgatggctaaaggtatgattagcatcatagtcatgccatatgtactgaattcttcattttgctttttacatttaaaaactaaagcatgtatctgtttcagttttattttaagtcacaaaaaataagctaaaagtaaaaagcttctgccttttataaccaagtactctggattagttggacgcttggtagttactacccatcagagttggcttggccacaggagtttagcaactaaaagggatactacttggcttagaaaaggagaaaaagagaggcagcagacagctggcacacaggaattacttcaaaaaggcagagataggtgataggtgagctgatgaacctaaaatcatgtaggagacagaggcacaggagtcacctgctacctattcccaagatcattaaactagatagtattacagaggtaaaagtgcccactagggatcatgtagttcagcctctcacatgtaagaatgacttgctcaatgacgtaaccaagtttgtggcctggctgggactagaacccagttcagtgctctgatactacaccatactttttctttcctattttttatcaggatttggaagccaaaatccagggtctcaaatgaagctttgaagaagggccaaaggagaatgggaagagtatcagggagacaagtgtgaaaacaatatgcctcagtgatatattggtcctgacaggtggctctactaaaagatctccatggtttcactctctagactcagatatcaacagagccaagtcatttaattatctgagcttcagttttctcataaataaaatgtatctgaaaataattataccttgttcagagttaccagaagataaaatgaaaatctgtgtgtaaaggaacattaaataaatattggtttttcctatttgccatgagcaggaaacattatcttactctgaatttttaacatttgcatactaatgaccagaaggtaggaaagaaggaggaaatagtatgattagaaagagaacaggcttacacacagagaacaacttgttttgtgaaatgaattgagtaaccacattttttccacattgcatcacttgctccttagccaggacatggagactgctggccaaacttctgctgttatagaaagcgcttttgtaggacttactgagggtgtaaagtgtgggaggagacagttgttagagggaacaacctaactgctggaatgatgactgaagcacctggtctggaaatgtcacctggaaggtctctctctaccttctgagcctggtcctctgaccatcttctgttgaaaatctaaggactccagagacacagaagagaggaaaacagtcagcaaacttctctggaagcatcagccacagagtgagtcatatttcttatcagcaaggtttgcagccaaaaaggaatgcatatccagcaacctggacacaaagaccgtcagctctgttggctctggagaactgcctaactgctctagatttatcagtcaaaagaacagtgaattccctaggcatgaaaatgagaaaatcaacctattaactgaataaagcccagagcaccaaggcttatcctgttttagcctcaagtaacaaaaatgactctgctatcagttccaaggtacctcgcttcttgctgcttccacagagctattacctcacagtgcttcctcacaatgcatttaccatactgaccccagggtacttgtttcttgcatcacagagaggagtggcactttcctgagccaagaagtgtgtttccctttcattctgcccgaggatctctccacctcagtgcaactatcctaatccaagcaacctcatttcttccttgtccacaattaccactgtacaactcattctccacagaccagctcaagtaattttttttagataatagctttattgacataagttacataccacaaattcaccctacatttgtgttttctaagatattcagagttgtgcaaacatcatccctaattttaaaacattttcattatcctcaaaagaaaccccaatagcagtcatttcccattttccctcccctagtcactggcaaccacgaatctacttctgtctatgtgtatttgccaattctggacatttcatataaatgtaatcatcaatgattatcttttgtgactggcttttcatttagcataatgttattaagatgcatctatactgtagcatgtattagtactttattccttttttattgccaattagtattttgtcctctagctataccacattttatttatccatttatcagatgatgaacatttgggttgttttatctttttggctactataaataatgctgccatgaatgttcattatgtgtttttgtgtgaacatatgtttctattcttttgggtatatatctatgagtggacttactgggtcacatggtaactctttaacattttgagtaacatccaaactgttttctaaagtggttgcagcattttccaatctcaccagcaatgatcgagaattccagtttttccacattctcagcaacatttgttattatctgtcttttgcttatagctgtatccatgggtgtgaagttgtatttcactgtggctttgatttgcatttccctaatgatgaatgatattgagcatcttaagtgcttattggctatctgtgtatgttatctggagaaatatctatccaaatcctttccttatttttaaattgggttgtcttttttattattgagttataggtgttcttttata

SEQ ID NO: 33575 - DNA, 440 bp, Homo sapiens
gtcccagctacgtggaaggctcatgcaggatgactgctgtagcctggggatgtcgaggctgcagtgagctatgattgtgacgctgcattccagcctgagtgacacagcgagactctgcctcaatacatacatacatacatgtggagcagcaggactataatctaatcatagtccatgccctctggtggcaggtaacagaagagcattcacaccaggaattgatcagtgacagaaacatacaaaggattcctttgaagttactgtatatactaaagcatgtgaccaaatttgctgggtaagcagtttacactgagatcgtgactcacttgactaggggcctcattaaaggctagcttctactccagctcagtgactctcaaacttggactggaatcccctagggaacattaaagaatacatcagatccactcccagaaatc

SEQ ID NO: 33576 - DNA, 10694 bp, Homo sapiens
catttcttgaggtgtgagtctgtgagtaatgaattccttcagcttttgtaaatctgaaaatatctttatttcacctttgtgtttgaaagacatttttgctggctgcagtagtccaggttgacaggttttttatttttcttttagtactttcaaggtgttgttcaattttgtgcttgcttatattgtttctgacaagaaatataattcttacattagttatcctatatataaagtgtcttttttctctggctgctgttgagttttctctatcaatggttttgtgcaatttgattatgatatgcctctgagtagttttcttctattatctttgggattccttgaatttcttgattctgtggacctatagttttatttatttatttacttatttattttgagacacagtctcgctctgtcgcccaggctgcagtgcagtggcatgatctcagctcactgcaagctccgcctcccaggttcataaaattctcctgcctcagcctccccagtagctgggactacaggtgcccttcaccatgcccggctaatttttttgtatttttagcagagatggggtttcaccgtgttagccaggatggtcttaatctcctgacttcacgatccgcccacctcagcctcctaaattgctgggattacaggcctgagacaccatgcccagctgttatttttaattttggaaaaattttagccattatttcttcaaatattttttctatcccccatcacttctctcctctgggactccaattacacgtctatttggtcacctgaagttaacccatagttcacaggttctaaattcctttttctctttgtgtttcattttgaatagtttctattgttatgttttcaagtttactaatttcttctggcattaatccaatctagtgtatttttcatttcccacatagtagcccagtgagtctttttaatatcttccatgtctctgcttaatatctgaatataacaaatatattaaaataattattttaatgtgtttgtctgctattctatgatctgtatagagtctgagtcagtttcaatcaattattctctagattattggttgcattttcctgcctctttgcatgcctggtagtctttgattgaaagttagatctggtgaattttacctgatgggtactggatattcttgcattcctataaatcttcttgggctttgttcctcgatgcagttaagttatttgtgaagtagtttgatcttcttgagttttacctttatgatttgtcaggccggactgaagcaatactcaggctaaggttaattattttccaatatgagcaacaccttcctgagtatcatacccagtgcccaatcaattatgagatgttctagtctagctggtgagatcaggaactattctcagccctgtgtgagtgccaggttctattcctttgaatcctttcagatagttttttcctttggccttaggtagttttctcatatgcatttataaaatggtagtcttttcctggaccctctgaagatcactgtggttttctttgtgtgcagctttctcctcctgacactctgtcctaaaaattctagccaccttggtttctctggactcacattttttttttcttccatttcctccaattagggagtctgctgggctcaacatgagttccctttccctgggccatggtctggaaactgttaagacagtaagctagaaaatcatagaggtagctcaactcatttgttttctctctctcagagatcactgtttggctgcttgatttttagtgacttaaaaaccattgttggctaggcccggtggctcacacctgtaatcccaccactttgggaggccaaggtgggtggatcacctgaaatcaggagctggagaccagcctggccaacataatgagaccctgtctctactaaaagtacaaaaattagccaggcatgttggtgtgcacctgtagtcccagctactcgggaggctgaggcaggagaatcacctgaagccgggaggcagaagttgcagtgagccaagatcaagacaccgcactccagcctgggtgacagagcgagactctgtctcaaaacaaaacaaaacaaaacaaaccattattaacatatgttgtctttttaaataaattgtttcaggtggaagtataaattcagtcccttttatttcaaatgagcagaagtcctgaacttgtatttctacttagaaaacagacaaaattctatggccgggcacggtggctcatgcttgtaatcccagcactttgggaggccgaggcgggcagatcatgaggtcaggagatcgagaccatcctggctaacacggtgaaaccccgtctctattaaaaatacaaaaaaattagccgggcatggtggcaggtgcctgtagtcccagctactcgggaggctgaggcaggagaatggtatgtacccaggaggcggagcttgcattaagccgagattgcgccactgcactccagtctgggcgacagagtgagacaccatctcaaaaaaaaaaaaaaaaaaaaagaaaacagacaaaattcaaactcaacctgaaatgttgacagtttgaggaaataacccttgagtactaaaggaaaggattgtaggtaacttcctgacgtttaactttgtttagcaccaaacacttctttgcttatcagccatatcaaacactgacacagtcaataccatctgtgcattgtctgggttacttaatccttctgggaaactctggatgacctctgatgagctcctgagatgcttcacagtgggactcagtgtcaacattcttgtagaaagataagattgtgacaggagtgctgagtacagagaaagaaatactgctccattttcaacaatgtctatggactataactctctttcctgtccgaattaagagctctagtaaaaattagcagttgttttcagtaacacagaatatcctcaaggaggtaaagaaggaggcaagggtgttacttgggatgaaggtggaaagaatgtctgctgccaaaactcacagtgaccaaattttacttcttgagctgtgttcttcccatagaagtttattctggggccctcaggtaagaagcccaagggcttccacctcctgttttgattgtctaaaaaccataaaaaaatgacttatcttccacctactaaagatgttgaaaatcaattacctgcttgaagcaatggacaggcgctgggactgaacatgtttcttttaggtatttgtcccaggtaaaatgacctgtaaaggaaatagaaatctatatcacagtcaacttcctaaaaaaaatgttttcagggtataatctacactaaacagtaagctatttgtagactggttttgagcataaaaaatataatttttttcctgtttgagctcaaaggagtattaaggggaagaatctaagtgacctgagcggatgttttagattcacgttttaaaataatggtctaaagatggcttagggtgttatttatgttcattcctaaagtgatccaaaatgccaaagcaagatatactagtacttcaaagaagtgaccaggaagctaatggaaaacagaatagaagaggcagaaagtgggtggggagattccttttgaacaatctgactcttggaaaggtccctcaccgctgtcaagtggcagcttttaacacccaatatggttggattccagcatctcagctcaggaagaatgaagaaaaggctgtctagagacaaggggcgagatgatttgaggggaggggaagccagatgagtgagattatagttgaatcctcactctaaaaactggctctctctcacctacccccgctgcacccccatcctagccaccgctgtgttgctctggggtgcaaagtgacaaagaactgttaatttagagcaaagtaggacctgggaagcatgtctgatgatagtaaataagaacaagctggggagtctgtagaatcttttagcctcttgaactggccttacagcctctaaaagtttgaagaacactgtcctagataaacaatcttcaaggtgacactgtgctgggggaagggaaaacatcttaaggcaggaacatttgatacagacctcattggatcactaaagattatcaagttctttatttaaaggttaaaccaattaccagtctccccctaatacccacctagaggtgaccccatgatggagcagggaaggtcccagagaatctcacaagctaaaacactgtagcaaaccagcatttcttgaagtttcctctgtagtggagcagcacagagcccctttgggccatgcaaaaagcactagatgctgggaataaaaatgagtcactgaatgaagaaatctaaatcactccaaagatgatgccaagactttacactctatttattttatagcttctgttttataactggttcctttcccactacccttaactaagccaaatagatttggccagaaatcacagtcagttctgaactatttcatgaactagctgatgattaatcaacatgactagacagttagtccatagggcaaatgagatgactattttctgaagtcaaggtttaaaggcgttatcagaatttaatgaagagtttgcttctagttgacagggccctaaagcaaggactgaatacatttcatcattgtttgctgttagaaaaataaaacattacaatttattattccatccttacaaatgaaagattaaatcaaatagtaagttttggatttccctggattgagaatcttcaactctggcatctagagcagcactgtccaataaaactttctgtgctgactaaaatgttctgtatctgtgctagccaataaggtagccactagccacataactattggatacttgaaatgtgggtacgtaagaaactaaattttttaaattttaattaacttaaatttaaatccccacacatagctaatagttactgtattaggaagcacagatcaagagttttggtcagtcctgggtaactgcttatattagcttaagttctgactaaaagcaccaaagagactttggtcttaagaataatggcagcatcaggggtaccacaacaattagggtattaattacagttctccattatacatatcaaccatggtaatcaatccctattctgtaatgtacacaggctagaaacctcagcccttttaccacttaggaaacactctatcactaactggatgaaaaggaacctctgtttaaagtagttcacccactgtgatggctgactggcttgaaccatacctagatggtattttccttttatttgacttcttgggctacctaaggcttagttccttattatcaggtgaattgcaaaataagataatttttatgacttagtaagaatgtttggacacctattgtaatgcccatgatgaagccagacataatattctgccatatctccaagcactaaagtaaccacaaaagaaataggacaggcaccaaggtatagatccagagttagcaagtcttctgttaaggacaatataataaaaattttatgctttctaggccatacagtctatgtcatagctactcagctccaccactccagtgtgaaagcagccacagacagtatgtgtgcctaaattagcatggctgttccactcaaactttatttacacaaacaggcagagggctggatttgacctcccaatagtagtttgccagacctctggtataaatcattgactctcaagtgatacttatagtctcatttctttaaacaaagttctgggcctcaccttcagaagttcttattcagtaggctccaagtgtggcctgagaatatgtattttccaaggctccctaggtaatttggattaacatctgtgactaagaactactactggtgtagtttaaataatgtaatattgggagtctgaagatgttggtaaaagtcttgtttctacagctaactatcttgggtaaattacttaatccttccaagcctaagtttactcatgtgaaagatgaagacaatatctgtcttacaagattgtatatagattcttcattcaataaatatttaaacttctccaagtacaaagaactgtgttaaatgttaggggaacaaggtaagacatgatttctcaattcatggagctttcagtctagagataaacagagacattaataaacataacacaaataatctgttatgataatgataaagtttacgaggtagtacaggttgtcttgagattgcagaacatgaaaatctcattcatccttgggctcagagattattacgaagattaatattattaactaacataggtataatgttttataatttaaacatatataatgtgagtgttttcaattattccaacattataattcaaaatattcaaacagtataatttgaatgttttcaattattcattcaacagatacttattaactatcctctatgtgccaggcaatatgacaggggtccctgccctcatttacatgctggtatatgatgagacacaactaacacataaacaataaataaacaaggcagtaagtgaaaagaacttgaagggaataaaatgaggtgatgtgatagagactgggagctatcttagtaaagtcatggacagatactcttcagaggaaatgtctaagctaagactttacagatgagaaaaagccatctcatttagtaaataatgcttataaaagtgtttttataaactctgatgcataccacgtgatagttacatttattattaaaaaagaaaaaaaggtacctgccctgaagagacttaaaaatggcattaaagtaccttggcccataaaatatgggcataagaggtcacctagttaaatgcatgaatcaccttctctaatattcattcattcagcaaatatttactaaatacctagtatatgttaagcctggttctaggcactggtgatatatagcaaaatacaatacagccaaagtttgcccacatggagcttacaacaaacaaacaaacaatgttttgctccacatggagcaaaaacaaacaaacaaacaaacaaacaatattttgctccacatggagcaaaaacaaacaaacaaacaaacaaacaaatacgtcagctggtccagagggtaacagagacaccagattaattatacaattcctggctattttgaaatttaaaaaaataaaagtaagaggtaaagaaggtgtgctattttagccagggcagtcaaaaaagacatcttgataaggtgatacaaaagttgacatttgggccgggcgcagtagttcactcctgtaatcccagcactttgggaggctgaggcgggcagatcacctgaggtcaggagttcaagaccagcctggccaacatgatgaaacctcgtctctactaaaagaaatacaaaaattagctgggcgtggtggcaggcacctataatcccagctacttgggaggctaaggcaggagaactgcttgaacccgggaggtggaggttgcaatgagctaagatcgcaccactgcactctagcctaggtgacagagtaagactccgtctcaaaaaaaaaaaaaaaaaaaaaaagctgagatttgaatggtccttccagcctctgctgaaatacttccagtcatgggacactcattatttagctatttagctattactcaacagtacaaatggacagaccgctctttatagtcagccaacatctgccttctaacctctactggtcctagatatatctaatctctatgtcccaaatccctcaactgctcctaatttgacaggctggctactcatgtctggctactgttctggccacattcctttacaagaactctactttgttcaacctaaatgtgaacccaaattcttaaaaacaattaagcataatcaacatctttagatcagaaattccactccactattaccgtataaatagtgttccatgtaccaaaatttaaataacaatatatttgttaaacgccactgatggtaatttaagtgtctttattttattttttttgagacggggtcttgctttgagtcagtgtcaggctggagtacagtggtgtgaacacagctaattgcagccttgacctcccgggctcaagcgatcctctcatctcagcctccctagtagctgggactacaggtgtgtgccaccattcctagctaatttttgtattttttgtagagacagggctatgccaaattgcccaggctgttctcgaactcctgagctcaagtgatctaactgcctcggcctcccaaagtgctgggattacaggcatgagacacagatttgggatttgtcctaagggtgggattagtggacaaagagcatgcatagtttagattttgatacaacatatatattgctgaaatatcctctagaaagaacatactgatttttcttcttagaggcagggtttccctatggtgcccaggctagttgcaaactcctaggcttgtcatcttcctgcctcggactcccaaagtgctgggattacaagtataagccaactttttttttttttttttttttgagacaaagcctcactcagatacccaggatggagtgtggtggcacaatcatatctcactgtaaccccgatctggactcaagcaaccctccccgctcagtctccagagtagccgggactacaggtgtgcaccactatgcttggctaatttttttctttgtagtagagacaaggtctcactatattgcccagactcaatttctattcctaccgaaagtacacaggtgtgtttaccacatatttgctaaaactgtgttttaacaatttccataattttgacaaatcttatcagtgaaaaaataaaatactattataattttatttgcaattctttgattactaataaagtcaaagatctctttaggcttatcagccagtctgtattttatttagccatttttctgctgagatattcttttgttttctcatagattctaggagttctttgtagattaaggaaaagtcactagaagaatttttacttaatagaaataaagcatctagagaaagtgttcttttcactataccacagggtccctctgaaaagacacagactttcaggcaacagaaagagagccttagataaggcagagaaatcagaggtgttttcgaaggtccaggcagatatcctgatatgagaaaggtctggatttgggaggcttcacagatgtagaatcacaatattcaagctacaaaggaccttagtgtttcctaaaactcatggctttcttggtcccatatctttgcccatgttactcacactcagtgactaaagctcagcaaaaattttacattttctgtcagaaggctttgcagaaaagggctggacaaattttaccatctccctatctcctataacatcctgttcacatcatatcaccataattatttatgtaagctctttatggatgggggcttatattcatttttaaaatctttactgtttaacacagtgcctgaaatttaatagaggctcaatatgagtttctgagtgaatgaaaagaagcacacaagtaatattcctattctttcttggactaataaaataatacctgggatatagttctgaaaactacactttgagagagagcaaatctgagtttaaatgattacctagtgatggtaaacagacccaaaaccacatcacctgaggaccaggtgaaggaacatgaacaattagcatgagtaaaaaagtgaagtctcagagccattccccatccatccaacaaatatttatagtgtgtgtcaaagcactgtgctgagtgctggacatataactgtaatcaaaatatcatccttaacctcacagagcttcagtctagtgacagacagagaatctagtgagggacagagactaaacagtcaccactaagataatgtgataagtgctacactggagagacagagggtgctacaggagcacccagagtgcttgtggaaacttaccaaagaaagctctaggcttctaagctaaagtgtaaaaggataagcaggagtcaaagaaaaaggaaactctttttgtttgtttcagacagaaagaaaggcattataaaggcccagacatgagaaaaagcagttctaaatgcagatcttttggtatggctgctgggtggagtttacagaaaaagtagtttagaaaaaggttacagataaaggcagtgttcagtcattagcgagccaaatatactgtattactgagaagaggaagtcttcaagcgtttggggtgaagtcattctggctgtagtgtaaagaatgggcaggagggtgatagggctggaggcaaaaaagactagttaggaagctgttttaataatctaggtgtgagattcaactatgaaagcggcagagtggcaatgagaaggcagtccctagagcttctctctaaaaatcagggccagtaagtgaaaaataggctaaccctgtttcatatggccagaaagtcagagggatgactaacagaaattacaaaaagagcaaatttttgaccaataaatatgtctaaatatgaaatgaattacgtgaggaggttctaagtcctcaaaaacttgaggagttcaagataagacattttacaaaaaattcaaaatgttgagttttaaatgctgggcaagggtagattattttatggtcttt

SEQ ID NO: 33577 - DNA, 5568 bp, Homo sapiens
agtttctgaattgatgcctatacattttacagatagtaaactgaggtagagaaagaagacatccaatgtgtggctccctaatgtatccagaatcaactccaaactgcatcacagtttcggatctttaataccaatgccccagcccatctctctagccatatttcctactattagcttttacaaatacaatactcaaacctgtggtagctatttttaacaaagataccataccctatgctttccctattttatatatctacctaaattatttactctattgaaatttgttcatggcccaagtaaaattcattttgaaatgaagcccaaccttgtttccaaatgcttagaaatgacagctccctcctctgaactgctttaccactttgctactacctcccttagagtactcactatgttctattttataacttaggtaagcatgtaaaaggttcatttcagctagcagagcataagccccttaaatgaaggaagaaaggaactaatatttactttgtatctatgaatcaccaatcgcttgtgattttatgtggtatgtgtgtatatattttttcatgtaatatttgtgatatcctatgaagtataaattttttacagataaggacactgaagctcacagaggctaaataatttgtttacagtcataaagctagtaagtgacagagtctagatctgaattttggtgtttctaactccaaagcctaggctctttccactatactctgtctagaaaaccatgggtatatcctcactgctttatctgattgttccctacccacccactaatgatcatcagaggaaaaaacctccactgccctttgtcattaagtattagcagaaaggattcaatatgaggtatgtgccctcccactttccaagactaagaacagactcttcagagcaaacagaatgattaatatgagtcctgaataaagatagagatcagaactctgcttccaggaaggaaaagtaaaaaaactattaccttctcactcttgtgtttaaaaacccctcctccttcaaggtttgcaccatctggctatataactctctaccccacctcctcatctgtcatctaccaccctcctgattaatcccctatctttactgcacctgggtcacatctttctctcttccccacatcccatcatcctcaatcacttcactctctacacagatgactcattcaatacactagcctccaaattccttgtcatactcagctttactgaccttcgcctctgctgtattttagctacccatacacagagacctcgctgtcacctagaacagtcccaatatcagacaacttaactccgatattccactttctgaccacacctcttttttttctcagcttacttccactatatttgctcactgatctaactcaagaaattgaaaatcttcaagtccagaattgaactcatcatcgtttcctgtctcagttaaaattaccaacatatcctccttagtcatccaaggcaaaaacctgagcatcacacgggactcctcaccctctcacctgcacatacaatcaatcattaaagccttatacattttctcagattcatttctttctcttcatccctatgaccacattttaaaaatgttacttcaaccatgtctgatagacaccttccagtgattaaataaaaataaaaaaaaaacacctactgaattgattttaggatacttatgcatacaaggtccaccacgacatggcctctgactgtatttccagccttacaactcatcacttattgttatattcctagcagtcccaaactgtttgtggttctctacgcaagccattccttttctcacattgatgcctttgctcaagctgttttctctgtttgaaggacgctttctgctcatgtttgcctcacttactcctacctaccatttaagatttgggtcagatatcatctcttcccaaagccttcctttaactcctaggctagtctaagtgccctcacctttgggcaacctttactctcaccttgtatatctcagctatgcgtagttctcatcttttattctgagataatctatttaagcatctaatttaccagctccacaagattggaaatctttgtaaacccagctgagcacagtacatagcatagtgcttgacccatagtaggtacataagtgtacagtgaaggttagaacataccaattttcttttcttttttaaaagatggggtctcattctgtcacttgctatggcgtgatcatggctcactgaagcctcaaactccttgactcaaacggtcctcctgcctcagcctcctgagtagctgagactacagacatacaccatcatgcccagctatatttttatttttattttttgtagagacagggtcttgctacgtagcccaggctggtccagaactcctggcctcaaagagttgcctgcctcagcttcccaaagtgctgggattataggcatgagcccctgcatccagccctaagtttaaattttcagtgggatattcacatcaattctttctcatagttaagtatcctctacctttcactccaagtcctttgcaaggaaggaatcagggcctttcctctggatctgtatagttccattgagaatggtgctatgcaaatgtttacccaacttacataaaagggaacaacatttgcacaaacatacctaaaatcaaaacttgacatatgtgctacaaagttcaaaactattgaccaatttaaaaaatgaaggcttaagaacaaaaataaagaaccaattctgactgctggtatgtgcttgtctaagttgtaaaaacactgaaactttgcttagtacttaaacaggatcccagatgtaagagcctggccttttatctacaaggccatctcatctctactgggcttaaaacattactaacctgcagagttgcttaggcaagagtttaggaggttggtaagtaagcaacaaaaagtgttctctttcatagtaattttgggcctcctgctggcagttagaactagagcaaagagttcaatgtaataaagcatttccctctgcaaccaaatattaaaattgcagtttggcactaaactaggtctcaatccttttcagagtttaaaaaaaaaaaaagagctattctatttgcctggcacattacacttcaacaaaacattttgatgtacattagttagcaacatttgataaagtgtttatagacattttttaaaaggaaggaaacccccaaatttccacaaaataagatgtcttttagtttgtttgaacaaacactactaaatgttttcttttttttttttttttaagttcaaaatacagtacagaaatgaggaagggaatctagagtacttttgatttaagcaggtcaatccttggggctgtttcttagagaaacttactacgttttgtctccaggatcacttttaagaaactctcctttaaggggatgggggaaactaaagctcatccagaggacagtttagagaaccacagcagatgagagacaactgaagaaagtggaagtgaagactcaggggacatgattactatcttcagatatcttaacagcttcccataagggaaaagaactaggaaggatgggagccagctgtttctttcaacttataaccaaatgtgtccaggaacagaatgggtttcctttaaagagattcgcttcggatcactggaagaggttccaaacgggctcgtcaaattatcggggggatttggggattttcaaagtcactttggcatgggatgggagaaagcgcccctagatgacttttaaattctcttccagtcaggagatattccggggttcacccatcggctggataccactttcgatgctctcgggctggcacacaactgtgcccacgtgtctggcccccagggccgctgtggctcacttcggtgcggggccgctctccctgcccgtttccggcggggcactggggcaggcggcacacgtgagtcggccagccggggcccagcccccaggacgctgctgacagctccgggccctaggcgccccagctctcggtgggggccacgccgccccgtcgacctctgtctctgccttccccgaaccgggacccggccagccagaatcacaggcattcccacctctggcgccggaggggaccgactgacccgcgcagacggggtcgcgccgccgcccggccctcggcccccagccagcctgccccggcccacccggccccgccggccagacacggcgacctatacggaccgcccccacgccgaccctccaaagggcccccggccttgggtttcccgtgccggggcccccgggcagtcctggcggcgtcagggccgcgaccggaccgtgggccccgcccgcccgaccgcagatgcagagccggcctccgggctcggggccgggctgacacggccgagaaagggcccagccccgcgcggaccacagactggcaggccggccagacagacggacaggctgaccccggcccgggggagcaggcgcagcggctgcgcaggtcccgccaccgccttctggccccaggcggcccctcagggcacgagctcttaggcgggcggaggcggccgcgaggcgcttacctgagggcgcggcgggggcgcggggcggctcactctcttcccgccgccatgtttccgctgcgcagggagggagcggagacgcgggaagggggcgggcgggcggctcgggagagcggcgggcgggcggcggggggctccaccgagctggcggtggcggctgaggcggggggcggggcgggggctcccccggcccctcccccgcgcctcccgctgcgaggtggcgcgcgcctcggccgttgggctcgcgcggggggcggggcggcgcgctggaggagggagggcgcgcgggaacccggcccggccgtaccccgccggcctgccgacccgggtccgggggcccagttggcgcccggaccagctctccggtctgcgtcctgtagatgggaaaactgaggcctgagagggcgcgagggcggggacgaggccgaggactcgggttcgaatctcgaggacgccagtagcccgctctgaggccgcgtggggctggtggaggagccaccggtcgggcccccaagaccggctgacgtgggcctcgcctcgggcgactcccgccgggctagtggctggccgtgtggtgaccttgggcgagttacttcgcacagccacccaggggcctcttctccaacacgatagcactgcacccggagggtaggtgagagatgagttggtgcttggatgccctagggagtgtcagcgtcctcggtcctccctgtggtgatcccttcaacgagtacgcactgagcccgtgatgggccaggtacaatgcacaggctcattcttccaggcccaccagccatgttggctacacaattctatttttgttttgttagagatggagcctcactttgtccccaaggtcggagtgcagtggcgccatcatagctcactgtaacctcaaattactgggctcaagtgatcctcctgcgtcagcctcccaaagcgctggg

SEQ ID NO: 33578 - DNA, 405 bp, Homo sapiens
agagggcggggcagtcctctccggagtagaaggcggggccagtgccctgagccccgccccatcccgttgccccgggaaaccccgggttgtaacaataaccggtgacgcgcttctgggagggatcctgtcgagcccatgggcaggacagtccagccgcggaccaatgggagtgttagggctccgccccctagcccccccgcctccgcgccgagcagggggcggggtcgcgccagccgctccgcccctgctccgtaggcggcgctgttgcttgcaggggctgcggcggggtcgccccgagctgggagctcagcgcccggtctcccagcccgcgggcggggcacctgggctggctgaggattccgcggccgcaggcgaaacgccccgccccctcccgcgtcgggcccg

SEQ ID NO: 33579 - DNA, 1123 bp, Homo sapiens
atcccgttaatgcctcgcaaccccacagggcaagcgccttgaggatcttcactctacagaggtggcagctggagctttggaggaaaggagttgctgctgcggactgaattgtgcccctgctgcccccacattcatatatggaagctctaaccctctatgtgactatatgtgggacgcggtctttaggaggtaatgaaggtaaaatgaggtcataatcccacaggaccgcggccttataacaagaggaagagggaccggaacgctctctccatgtgagtgtacagggcaggccaggaggagggcccgctccagaaatggccccgcgccaggctgcccagccgccaccgctgggagaaatgagtttctgttgcgagctgccaagtctgcagtactgtgttatggccggggctgaccgtcactcacccaaggtcacacagagaggagcaaccaggattcaagctcagtctgttcttgagaactcaggcctgttcatgaccccacagtgggtctcctgtgctagggctgtgcctcagtagccgggtctgtggagtgggtggcttttttctgccctgctccagggtcatgaagcctgagtaacctctgactcacctcaggctcggcaggctccctgctggccatggggccatttctgctgctgcagcgccccctgctggcccagaccacgtctgccttgtgcctgtcccctggagttcgttcccctccctccagatctggctctccaagccctgccccttccgtgccatccctcaggttctgcagggcactggccacttctgcacagccaggccttcccaccctacccccgagattcacacagcagggtccactccctcccaggcttggcttccccaggctgagggctgggcattggcacccttccacagaccacatgagtcagctccctccccacccaacaaggccagtgctggctctgtctgaggtccctttgttcaggtctcttctgaagaaaggcaccagaggctccagctctggccataatgccccagatgaagcttgacaggagaactggacacaacaggccaggtggggatgggacgcctggatactgccttgggcctgagtgggcagggaagaggcaaag

SEQ ID NO: 33580 - DNA, 546 bp, Homo sapiens
agcctgcagcagagagaacctgaagaaggccttggagagcttgaatctcaggcagctgctgactcgtcttctccgagggttagtttctagaaaatgggagtgaaatactgctttcctgcaggtgtcaggtaaggatcaaaagcgataaggcctgtaaacagcctgggtgctgcctgcacgggaggaggttgataaatgatactctgtctgccctcctccggggcaagggccaggctgactcacctggtctgggggcacccaatgacctgctgtttgtaccaaacattgccgtccacagagccctcaccctcccttcttttccttctttatctttcattaaaaaaaatctaatagtgactgctatctaaggcatgccaggctagagtgggctgtggagacccaggagtgccctgagcctgtccttaccctcaagagttcacagtccaattgggaagttagacgagtatgtggccagctggtgacacgggcgtgggctttgacaggtgagtagatgtttatgaggggcaaggaggcagtgaaggcagg

SEQ ID NO: 33581 - DNA, 2217 bp, Homo sapiens
catggtagtattttccagggaggcattttctgaggctgtggtgggggtgaaagaggtggtggcctctgcttcctagagcacccccatgccagatgctcggggcttggtctggtgctcaggcatgcactgccccttcctgcctgccccttccagccgttcccaggacctctccttttactccccaaaagaggctgggaatagctcccttcctatgaagacaggaaccttcacctatgctgtttcctctgcctggaatgctcttctccaccctcttccttgaccgacttcccccgagttggcctagatgtccccatctccaggaagccaccctgggctccccctcctcaggggctccatcacagtgtggacataccctattagagaggtaggatagcacggaagttaagagcctggggtttaaaacccagctaagccacatcctagctatatgattttgagcaagttactaaccgctctgtgcctcagtaacctttcctatcaaatggaaatagtaatgacagaatttgctacataaggttgctgtaaggaaccaaggagttaatatgtggaaagcacttagtaagtgctcagtgaatgtttgctgcgattcttatcttcatatttaactgttgttttcttgaatgactgtcctcttggcctatgaggcaggaactgtgtctgtcttgctcacgagagtcctcccaggggtgattattcataactgttgaattaatggatggccacattccaatagtttgtcaccgtgattaggcaaatgacttttctgaactgaagacttagctacctggactctattttcaatgagagaaagagagagagagagaattccacagggctctttcctgagtgagggctgtggagaggctgcgaagggccccgtctgcagcctcacagccctggacacaggacctaactgctctctgcctcagcttcctcctgtccacataatccgaataaatctgggtcatcctgtgcccccttctggcctgtctctgcctagtgttccagttaaaaggaacacaaatttgactcaaaaagccttgaaaaacgcttgttctatatttatggaaaaggcaggaggaggggagattttgtcccagaaaacccaagtttcctgaagcttagatgccttcttcccagggttcggtttgacctggtagctgctccttgtagctttttctctacttctttccaaactctagcccaccttccccaacatggctgaagtcccaactacctggagtgtgggctggaagcaaggacagacttcggacatatgtggccctgtggccctgcaaactttttgtcccatagagaggtatggctggatgagggccagaacagggcccccctgcagtgcagggccccagccagaggcccctgtttccaaggtgtatgggtctaaaggactgtagtgtcacccttacctgtccctgccttctgggcctcctctactactttaatcatctctgttgctcaatcatctgggtcactgatctctgaaccctggccagggtccccggggcctgtgccaagggcggtgaatgcttccctccaacacaccctccgccaggttttcctcatgctgctgccaggcctctgtcatagctgcggccctaaggctgccttacccagctgcctggcctggccatgggctgttgcatttgagtttttcaggggcagggtcatgttgaatgggagcctgtgatgcactcccagggagcgaggctcccctggcatcaagctcagctgaaacgtgagaggtgcgctctggccctgggctggagtaggcaacaagtgcctgggctgaccccgtgacaccagcctcatcaccaggatgcgcggaggatccctaaggacttatgatgactgcttctctgccactggtctcctcattcactcagctctggccagccctctgtggcatatttccaaagctcagctctgccgaggtcccctgctgctcacagagctttgtggcttcctgtggcccacaaggggaagtcgaggctcctaaccttgaccttcaaggcctctctggctttgtgtcctgctgctgcccccttgccatggtccagacacctgaggcccctcctaaggaagcttctttgttactcccacttccatactttcatcctccccgctccctctgcctggaattccctccctattttctttctatgtattcaagtcatt

SEQ ID NO: 33582 - DNA, 1501 bp, Homo sapiens
gtcttgaactcctgacctcaggtgatccacccgcctcggactcccaaagtgctgggattacaggtgtgagccaccgtgcgcggccggaagcttgggactttgaagccagtttggttttcccaaattctccatgtgggtgagggaaggaacaaagcctcccaccactttacagatgggaaaacttaggctcaggtaagataggagacatggcaaaggctccccagcaactctggggccaccctgggatggtgacatggcttcccaactccagatgccatttcttccccgagcaagctccaaagtccccctgaacctcaggtcggaatccaaagcccagtaggactcgatcagacagactcaggcccaaggcctggccctccttctgacaagctatgcagcctgacgtgtcctgccccctctctgggcctgagctgcctcagctgtcactggcagactctctcctgcccaggagtgaggacatgagtgttcccagaagcccccagagctgggcaccgggaggcccccatgggtgactggttcctgcaagaagggatggtgccatggacccaaagcagcctgtgggcccctgggtcgcttctcacccccaacttgccagttcgctcctctgctagtctcccagacacctgctccccagggcatgcccgggcttgcagctaccctatgcccctgcaggctgggtgcccacctaccagggccttcgaaggcagaaggtggcacaggcggggtccctggcactggagcactgacagcgccttggcagggagcggcgccggcgtcttggcgggtttcccaggccgtaaggagctgtctgtctgtgggcgggcagccagcaaggtagtggtgtggggtggagagaaagagagagagagaaaaaaataaagagagagaggattaaataaaccacaaccattggcaagcagggactgtccacactgcccactgggacagccacccatgccagcagggtgccaatgaaaggtgaccagcccttgacctcaagaagtcacaccactgaagtcacaggctactccacaagggtcctggtagcccttggcaagaccctccccttctctgggcctggcttggctcactgagagctcccagcatgggggcaaggaaatctgtgatcctacctgaagttgggaattgggaacctcctagtctctctcccctctcagacaggctggtccccctgttctcaaagaaggctctcagctagctctggaggaagggcggccactccatctcacagaagtaaacacaggctcatagctaagctgcccccatctggtccccacttgcctggaggggtaacacatgtgccttagaggcttgacttgaaagtggggtgtgtgtgtgtgtgtgtgttcagatgggattaatttcagattcagagtctgatcaagcgggccaggggaatggcaggggccctgtggctggctagaccagcactttcgagtgacagagctaattttagatg

SEQ ID NO: 33583 - DNA, 2183 bp, Homo sapiens
catctgagaacaaggccatctgctggctgcctcattcctgcaaactcagggtcagaggacctctgatgagcccagcaccccacagctccaaagaactccacggtctctgaaaccaggctgcaagggcgaaaggggaaaggctggcagagacatcctgggcagggcccctcccactacctcattttccagctctgacaagtgcttaccctgtgggggacaggcagctcacagctcggaagtcgcctggctgccctaaggaggcccatcccagtatggccctgcccggcggggcttagctcgcccttctctatactttggtgttgcccgtatcaccggagggtgctggggacgcaggtttgttaaaccctttccctcttccttccaccagacagtaatacttggatcctcacttgtgattttcccaacaacccctggggggcccccttctgccggcacctacttgatgggtaagagaatggaggcttagaaagggacgcatcccggagccccacggaccagtctcaaccaccaaagggcagggagcctggaaccctgcgggccacaggctgcgcagctcacttgaggggacacatgtagattctgaaaccttacagcccgggttcaaatccttgctctgcagctgactagcacctcacctcaagcaagtcagtgtccatgtctcattccctgcctggaaccgccttgtgcctcagtttccacatctaaaatggtgatgctaatagcaccttcctcggggtaggtgtgcgacttaggtgagataactcataccaagtccttacagccgtgcctggcaaatgccccctcggcagatggagaaaatgaggctgaaagagaagaggggccccccggcagggattcgccccccgccacgggccccacggccgggcggttcctgcagctgcctctccctctccgacgtgtttgggaaatcctcgggctgggggcccgagcgcgagcagccgcggcggacctgcaggcggcggcgctcggcccgccctcgcctcccgaccaattttgggcaaagcaggggcggcggcgcgctacgtgccggccatgagtcagcgcgcaggaatgcgcaggacgctttgttccctgcgcggcggacgaacgtgctgggaccggggcgcggcggggcctgacacgaccgcacgggcagtacggccacgtgcgcccccaaccccacctccgaaccgcagggccacccgcgcctcgccttcccctggggcccggacccctgcgggggccctgaaagcccagcccggactccagcagtccccggggagctccggcaccctccctaagcctcgggccgggggggtctggtctgagtggtcctggccgcccaagcccctgggtggctcgcaaagaatcagcaactgcggggagggctgcccaggaggagggggggagctgccccagaaagactggtgggaggcacggagacctcgagcggccacagcaagacctgacgctgccctggggaggccgtgtggggcccgtcaccccttctccacatggaggctggtgtgggaaggaagcgggggctgggtcccccaagtcctgcctccagcttgcggggtgtttccctgaagccactcccctctctgggcctgggcctgtccagtgggaaatgggatgaccctggcagtcttgctcttccccagagtcctgggctgtgtaacgaggtctccagcccaaaagtgctttggaaaggagtgtaaccaccttgagaagtcttggcaaactccagatggccacgcagagggccttttgcgggtgccaggctatgtctggatctgaccggtaacgctgagtgctgggcattgctgctgtggaaatgcaggtgcagagggggtgacgtcatctgcccccagccacgggaggactggcagggcagttagagccccagggcagtttgactgggcaccccttctcctggatgggtgaagacccttctcctggggaatggcggggtggctcccacagctgctggacgctgccgaccgtcagccctggcagagggagtggggagtcttgaggctccactgcgggctgctctgagagggtgcggaagctgctggagtcggggtccctcctgccctgtgtggccttgggcaccacttgccttttgggtactcctgtgactgctctatcttcacagg

SEQ ID NO: 33584 - DNA, 920 bp, Homo sapiens
aatctctgtggtcatagattcttctgatttcccagcaaggaagactgctcggtgtggcccctaacatctcgcactgtagcctagagagcggcagagccctgccacatagcatggctggggaggtagaacctggcctctgcccccggtacagaatggtctctgagcccttttgacctccaagtctcagagactctgaggacacagggtgacaggagagactggagcaagcaagtatctgcacgtgccccaccccctgcaactacacaattcctggcactcacgggccccgccttggcctggcacgcctgcttgggtttctgcccgtgtggtttccccttggcctttctatcacgtccgctggcagagcatccccagctgtctgcattcctgtgccatgaggacggccaccttggggccaggcctggctaggacgccccctgagagtggaagcgtgtgtgctggccaggatgtgcagggacatagcttcaggcacctgcttctccatgcttgtgcatggctgtgcccgtgtgtccgtgtgtgcataggtctgtgcatgcattggcaggtatgcacagagtggacacagacagctgtgtggatacacatgagtgccatgcagtggaggcctatgtgggaggaaacatacaagctcctgggggccccacgggcctgtgagtggggacctgcactcatgcatgatggtgaggcacgcatgtttcccatacctgagggcccttgcatatgtgagggtcatgtacccaggtgtggcccttctcaggtcaagctcacagccacaggaggaagttggaggaattgaaagaagggggtcaggatgaaatcaaacgcagagaacccatttgcccagcagagctggaagcttcccacatattcccctatttactctcataccaatccctgga

SEQ ID NO: 33585 - DNA, 489 bp, Homo sapiens
acctcaccaggttttctaggaggactaaaatgaaggcctggcacatattgagggcttaaaaataattatagctaccatattaatacattaatgatgaaatctgttattccaggacagggcagtcacactggctggtccagcagcacagagccatccgtggtcagtgtacacacacatctgccacggtgaccaggctcccggtggctggcacaatggcatctggcaggtggcggactctggcctctgtgggcggcttgactaagctggcctcaggctgcagagcaggtccccatcccagccacgctcttatctgaggagccactgcccttttgaagtccaggctgcctctagcctcggggccctcccattgcctgccagccccagctccaccccatagttttcgacctacatgtggctgaatgcccacttttgtccactttggacatctgactgctgcatgttgagtgacttggaagcaattgttcacaa

SEQ ID NO: 33586 - DNA, 747 bp, Homo sapiens
gctcctaaagatcctctttactaatgtggaagttgagacccagtgggggtaatggcccgtcctgggcactcagtgcatgaatgctggaagccaagagtcccctgcccagctcggggctggccggggcctccacatctgcgttcctgcagggcgctgagggaatgcccctggctgggcggccccgcccctgctgggatccaggccaacgctccacaaatgagagagcttgagcgcgcggcgggcgccgctgggagaggccacacggtggcgctagcgcccagcctggccagcaccatgggcagggccggggcgcctggctccttccaggcagttctcccacgcgccacctcgcgtcccacagacacgaactcctgccgctccccccggcatctgtctcgtcgcgggaagtggaaactccatccttcagtctcttgggccgtaatccttggagtcctccatggctccttttcgttcttccccctctcttctgccccatatggggtcatctgagcctgtgggctctccctccggaacctccccagaatcccgccgcttttccacctcctgagcacacccgtgctccccgcgcccacggcacaggccagaggacgccctgcctctctcctccgctccagggcacccccccatgcccttcagccctcaggctctagctctctctgaaccggctgcccccgcgtccagcgggctccagcacgcgggccaagcgccgtggcccccggggacccc

SEQ ID NO: 33587 - DNA, 440 bp, Homo sapiens
ctgcctgctggttcctaggaaccatcttactagaaaggcgtagtgtaaatattttgctaagcagccaagagaggaaacttacccaggctgagctgccctgtgctgggtgctggccatggacacaatgctcaatgagggccattatctgggaagggagggctgtttgttccgctgcgggatggtgccagagcccggagccaccaggcttgccactctggctgccacacagaagagtctccttgcgctcagcagactctgcggttatgcaatgccgggccaggaggttaactctccccaggccaggagccaagccttgttccttcctgcctaagcatgtccatctgaaaatgctgaaaattgagggcctcagtgtttgcaaaatgtgctcgggccctgaacctgctggtttattccaaagggcgtagtgttgaggagctggt

SEQ ID NO: 33588 - DNA, 491 bp, Homo sapiens
atcttagctctaggaatgtcacagatattcagagcatgctgaactgttaacacacggctgctctgaccatcctgcctggtaaccagcaactacaggaggccagttggcctcaagctcatggaatagttttccccaaatgacaaaagcatcctcttttcctatacttcagactgagacctgggtctggcctaagctctgagactgcctcattctggcttttcaccagcattttgggggactcccacagggctcagcaggccccaggtggggaaggcggggccttcagttccaggaaatcagaagattagtcaagccacactcccctggcagctgtgagaacaggttttccccaagccaagggacttgcaagatcatcaataacaacaaatatttactctgcccatggctttgtgcccaccaagggaggtgcataagtacagcatcaacttccacagcttggattaagatggatgtgggtgcatgtcctggtc

SEQ ID NO: 33589 - DNA, 645 bp, Homo sapiens
gtaatgaaccatggcgccattagaccacaacatttcacgtagtttctgaaatcatcatccatatgaagatattgtgcttggaatcatctcacagtcaccggaaggctgaattccctcggccacccactgctttttgcggaggaaacagaaatgtctgaaaatagaacgtgaatcgatgcccccgacttgctgccgcaaagtgtggcaaagcccaaggagcccgcgccgcctctgcccctgcatggccccagacggctgggggtttccgggcagcctggagtaggatttcaacatctcaagctggaggtcacgtgcacagagcagccggtggcaaacggggaactccaggaagccaggctgtttcagagaagtacttggagctggggggcatttaggcaggagccgagtgaggtcagagggtcggtggcagccgtaggcctaacttgccagagagggaggcccagtctcagtgggtcactccttccaggagcagaggaacagcgtgacagcccagtggcggccaagtgaccgcccacagagcactgggcacccacaactctctttgcagatgggaacaccgagactcagggagggtgagtaatgtgcccccaggagttacccagctcagcagagaaaaaattgggg

SEQ ID NO: 33590 - DNA, 921 bp, Homo sapiens
atcgcttgaacctgggacaggttgcagtgagccgagatagtgccactgcactccaaccggggtgacagagtgagactctgtatcaaaaaaataaataaataaataaaataggacccatttgtgtacttactgtctaccaggcactgttctgaacactgtatgtgcactgcatatgccccacagattgacccattttatggagtttacaggaaacaggttcatggaatcagtaagtggcagggctaggacccaaacaatatgatcaagttcagatgtagattcaggaaacacctactggtcagccagatgctgtgctgggtgcttccctcacaaggccccatttcatctaaatgccagctttggaaggtgtggactatttactgcattccacaggtagagaaactggagcacacaagagtgaagtcacttgccaagtgactggtggaactaagcccagaactcaggtcttgtgattcgcagttcaatattctctctgctgggcaaggctgcctttcctcatctgcaggaatgtgaataaaaacatcacacagggatggcgttcagtagggatgtgctgaaatgactgtactggttgtgaaagtgctgaaatgcctctgtaccacttggtaatcagccaccgctctgagcatcctcaaacgctgccctggctccttcttcccagacaccctcccggaatccagtatctaaagaattttaactgaggcctccaagatgctgttttggtgctctggcacacatccacttcagccaattggtaaatgcttggaatgtcatctctaacaaccatctattcctctggtgcttcattccttcctaagcactcttgtactgttacctcctctgatgtgcacagatgagaaagctgaggcccagagaaagtaaaaactgcccgaggttgcc

SEQ ID NO: 33591 - DNA, 1323 bp, Homo sapiens
tgggattcaagcccacatttgtctgattccagaatcttactccaagtctgggcaaggcgtgggctggccaggcagctgcctgaagggcaattgtctataaccctggggtcagggggatgagaaatgtgaggcctgttaacccaggtctctgggcaagcttccttatataacctgcacattgtcaacgctccactcaggcagctctcccattccttactacataattattagataatgcataagggagaggtttgaatgactagcctgcctgggaggctgcctctctacggtcctgcttccaccacacgggagccctgaaacgagcaggccagctggagaggtggccaacacattcctcacccagaggctccgggctccccagatggccactgccacctgaccacacagagtcactttgccagaaggactgccctgctttaggcctgatctgatctttttccaggaaactcgtctggtgtaagatttatgtgtccaaacttgccagccttcccctttcaccctggactaacagggacaagaattctaatcaatgtgcaggaacacagaaaaaaaacagggaaacagcaggcaggcccaaccccaaaagccccaaacttatttcccaattttgggttgcacatgtatttctactcacataagacagtttgcatccaactggggggaattttgagtttcaattaaactttgctaaaatacaaaactcatttccccttaactgtgcttcctgacaatgaagtggtggtgtcacggggcagaagggctgatggtgtgggttaccacagcaaggtccatgctgcaaagacgggctgcccctcctgctctgggagtcaacgcttcctgggtccaccaggcccagcatttccacaggctgtcatcggtgtgtccccagcacagcacctagctagatctcagcaaatgatttgaatgtgtggggctccctccaggtaagaaaggaacccctgctcacggcactccccagaagtccttggtaactcactttctctttctgttctgaacatccattcgggctggtttaaagcacagctcgctcaagaggcagccctccagaggagatcggggttaattacgtttactgacagctgtcttctttctcctacagtcacttcttcccatgtcctgatttcattgcttgtgaaaagagatggccttccaatgggaaaaggcaaggagtaaaactcacgagagaaagcgtcctggagattttaaggagaaaggcacatcggttctgccagcacaagagctgcctgtttccctatcagatatcaacactcatttagtgca

SEQ ID NO: 33592 - DNA, 1007 bp, Homo sapiens
atccggagcagcagccaaggcagcacaagaaaacgccggtgccacggaacgcgatgcctaagccccccagccgaggctcctatggagccggccgccagtgcgcgggtgcagagcccagcagagcctgctgcaagcagcgctggagcgcacggcgcgcatagggttacagccccgccgccgccgccgccgccgccgcctgtgattgacgcgcgggggtcacttgaggctcgcgccgctccccagcaccaggccgagcagcgcgctcagcccaccgggggcactggccgccacgcgcagcccacccggccggcccctgcgtctcggcagccggacaccttgcctaagaaaggcatacacaaaatggaatcgcagctcgctattctgcttcgcggtgcggcctcaggcaaaaacacaatcacaaggtaaaatacagcgcaaggaatccatccgccgaataaaaacccagagtcccctaccttcggccttgggatggcaaactggtcctgtgttctctgacccacggatccagccccttcttcatgaattattccggccaggcaggattttgtgcatttttttcatgaacacctgtttcaagtaaggggtaaagaccttattgaaagaattgtccttaaaaaataacctgtgcatacgtatgtccatccaggcatgcatgcgtgtttgtatacacacatatgcacacggaatagccatgtacattgaagcaccaaactaggcagctggataatgggagagtcggctggttgtgagcatgctcgcgccgggaacagatccaccctctgttattcctctgaataaatataaatcacgatcagaaacccaaacagaagcatccctcttgaattcgtgctgctgaaaaacacggaataaattcagcctgcagacacagaatctaatcagcagctgttttctgaatccagagccaacccatgcctcgcttgtcttttccactaggagtccagaccttttttgaaagggggtttaac

SEQ ID NO: 33593 - DNA, 690 bp, Homo sapiens
ctcagctaccagctcctggagtctgactcagctttctgtctcaggcgaggatgtagccttgtcaggctgtttgggttcaagaaccaggagagtctgatgttggtaagaattcccttctaggaagtattaagcaaagtgattggagtatttccctgagtcttgtaagcttctagtacaaaaggagtgtggtgtagcacaaatgagtttctctgatctggtgagatcctcctttgggtacccatttgacatctcccaattgggcacccttgggagccacccaatcctgcactgagacaggccacctggctcctggtcagtttgtgtactctggctaaacaaactctgtatgtgtgttttgggggtggggtggagttctcttgtggcaacccatagactacccaaaaatgctgcaagacaaacataccaaagtcatcaaaaagtcattaaagtcatgactagagaatagtgaataaacaccccaaatcacatgtaatttattacattcacctagggtaaaaaacttatgtgccttcagggccaatcaaataacgtaagtgtgcaaagtagcttggcataagcaaaagagaactggagtgttcatgcctctctacatatctaccttttaaaaatgaaaaagctgaaagctgtgtagctaaaaacaattggaatcagaagatggaccaccagttt

SEQ ID NO: 33594 - DNA, 762 bp, Homo sapiens
gctatactcaagtatatttcacctaacctaaacaaacctgtgtaaaataagatagcagactacataggaaagacagtaacaagcaatggcaattgcctgcaagtaaaaaggaagagtgctacaaagaacaaggagaagtagtcaattcagggaaattcagttcaagggtaaatgtaaatcaccctctgtaaccccaagatggagggtcacctgccagaatctctgaactataatacaaagcagtaactaatgcttcccaacctattgcaagtcaagatgcacacagaaaatcaatctattcagatgactcatgtgcgagtcaagatgcacacagaaaatgaatctattcagatgactcagcaagaggcaactgatccaggggcttctgtcacccctcaagcccggcctggcttccctgagaggtggagatggagggatcatatttccacacacctgtaatccattcacaacacaccactgagcttttgtccaccaggtggaaagctctgcaataacttgtgtcaacaagaagtagttccattatgtttggtctactccacttaagaaggtgggaaaatataaaatatcacagagtaatatttccatcaaaagtagttaaatgttaaaacattttgatgcttagagggcaagcttcagttagaaaaattaactcttggaatgcctcatttcctgatgatgcacaaatacaaagtgtgactactctgtcttttattggggttcaaggtatatctatcaaatcat

SEQ ID NO: 33595 - DNA, 624 bp, Homo sapiens
tatcacctattgagcagtggttctcaaagtatggtaaccaaagcagcagcagcagcatcacctgtgaacccattagagctgcaaatcctcaagctccaccctggacctactgacttagaaactctgggggtgaagcctggcagtctgtgtttcaagtcaccattgtgatcttgatgactgctacagcaactcatttagtaagcaaaatagctcctaacagatgtgtttcaaatattagagtttgctgtaaatatgtctgtcgcctagttctaaatcctttgcttcgaacggtcaatatctgtttcagaggggacaggaaatccccacgctggcctccttgctgtcctggacactccaccttagggactttgccctggccattcccgctgatgggagcactgccccctccaccctaccccatacagggcttggcttaaatgtcatcatctcagcaaggctaccctgtatccctgattccccttaccttgctcactgttcccaaagtattttgcccttctaaagatctatataattcacttactaatgtacagggctttctgtatgtctctcaagtggaaagcaagttgctgtcatggcagtctgtaatgcccagcacatagtagg

SEQ ID NO: 33596 - DNA, 1711 bp, Homo sapiens
tagggatgggaaagcaactcaccaatacaaagtgtcaggaaaatgctaagtaaatttgtccaactggtctaaatgtcaatgctaacttaagaaagggggcaagcgcgagagactgagccgtccccagactgctgcaatccagagctcgctaacgtagagacggagagacccgggcgccctgcagcagcagcctcccggcccagagccgggatgccggcaggacttctggaagggaaacctggaccagggccaccccgggcacagggaacgcggctggcaaggcgcatcctcgccgctcagtctccgtctccccgcatctctcagacgtcaacaaacccctgaccacaaagtgaaactttcccggcccccgctgtcgcgccaggtctctgccctctgcctgggagcgcgttgcggggacaggtgtggggcccgggctgaggaggggcccccgccccaggaccggaggttgtgtaatcggcccgggaaggggggctcgggacagctccctgcgccggagctgcggaggccagacgggggaccccagctgagggggccggcgcccggaggcgttggggggatggggagggctctcgtcccgccccccgggaccgcccccgggcgcagtcgggagctgcggcgctgacacggcccggagagggcgcccgcgcgtcagaccgagcccgaggaggggggcgcgatggctcggcagccgcggccagccttacctgcgcgccgggccggggcggcgggaggcggcttgggatgccggggtggcgggcggcgggcggcagcgctggcagccacccgggccacggcatgcgaggagccgtggcgcggcggcgggcgcgggactgacagccccaggccccgcctccagaccccgggccccgcccccttcctggccgcgcggcttgccccgcctcctccgcccaccgccggggtcaaactgggtccatcggcccggagggcggggatgctcgctttcgattggcctcaaaggtgcccgccccgcctactccccgccccttccttggcagggaagaggcgcgtgcgccgtggctggggagggtagcggttacgctgagcgccggcgttgctggtccccgacccctggtacccgggcatcgttttttcatcccgggcagctgggaccccgggatgacctaaggaacaaggattcagacgcagactccacggtgaattggccttattcacgtgtgaacgaacgtccaggagaaaaccaaacccgaatgggccaggctctaaccagaggagaccccaaaactgtgatctgcatcagaaaacgaaccagccagccggttcccggctctgccaggtctaggggtgctttattcaagccctgggttcgctccctggtcagcaagtatgaggtatttgcagagggtctagaagatgtgaagggagattagcccgcatttaggactgtgccaaacagagagtgagtgatgctgaagaaagtggcctcctctgctccagccctccctcctcctccccaacccctggctctaccacctctccctcagcaccggcgccctaccctcagcctgtaaacagtatcaggtctcgcccaacaaaaatcaatggagacccagcaattccactcaagagaactagaaacatgtctgtactaaaacttgtacacaaatgttcatagcggtgtattcagaaggccaaaaaaggaaacaactga

SEQ ID NO: 33597 - DNA, 592 bp, Homo sapiens
ccttcctatgtggggagaatccaaatgggaggggtcctcctttgtaaaccttcgttataggtaggaatcttctctctgtgccctgtcccacacccccacctgccaaccacacttggtctcagacatctaacccagcccagctaacgagatattccttctgggacttggaatcatgacgagtgatgcaaagacacagatgagagcaggtgagagtacacagaacagctgcgccaccaaggatgagagtccactggctgctgtgttgtgcaagatctggggctttggcattgcatgttcaggggcagctgtgcctggcagcatcgttaccagaccaattctgaggggtgaccttggctttggcagccgctccctgacctcttgttgtggttattttctgagcatagttcaccagcctcatttcaattctcaaactacccaatatccttccaataaattccttgactgttcaagttagcctgagcttgtttctgttgctttgaactaggaaccctgttacattaatgtagtcttaaccacctcccttcaaaacagaaaacatggtacatcccagttaaatgcctatgactccttg

SEQ ID NO: 33598 - DNA, 884 bp, Homo sapiens
aggtggcacatccaggaagttttcagaagtggtgatagctgcaggctgggtgggcttgtcctcaggccccttggaggagtgcatagctgccaatcatcatagacggggtggggtaatccccaggcccctgggcagcatacttaggcagtggggttgggtaccaggttgagcgggcctgtcctcaggcccttcagtgatgttcatgggcacacactgtggcaggaaaggtggctatctccaggctcctgggtggcatgctcagggggagggatcagtggcagcagtgggcaggaaagcatttccagagtgtgtgaaagtatacagcatccatgctgctgggtggcagggttgttgtcagtggcagctgtcccagggaggtgactctcagtctctggggaatgtgtactttggcccccggcagggtgttggcagtagcagcagcagcagtagcaggccaggattgttgtccctcagggcatgtgcaagtgtgcagtggtcttgctgctgaagggggtggaatttctgttggtggcagcaggtccaggcaggtgtatctcagtctctgaggaccacacttcgtcccagtggcagtggcagcagtggctacaggtggggagagcctgtccttagggtgcatgcataggcaccctgccctgctgctagaatggatgaggttgctctcagtggcagcaagcagagtgactttcttgtgctggggagtgcatgctttggttccctttgtcccagggataacctctccaatgcactataccatccattccctggggtatagtacactgtgtaagctggagtgctgaggaccctgctgcactgctgggtccaaacaacattgtccacttcagccctctgggtggatgttgggg

SEQ ID NO: 33599 - DNA, 823 bp, Homo sapiens
cctctgcccttggctgcccccaagacccgacttcaatgcaggtcccacttggggcctgaacttcctcctctcctcccctcagccccactgttcacctccgcatctcctctctgcaaaccccaggactcgggcattagcaggagcttttcggtaacgaccctgcacaccacctcccctccccgcacccccaaggcgcatcgctgatgctgactgtcacggtcatgctggtaggacccccaggcgcagacacggggacagggaggctctccgttacccctcaaagcaaagcgcagaaatgactgctcaccccattaactctcaaggtggtgcctcagggaaatggattaggactcattccccgtctgcagtcttccctgccatcaccagggggcagccctgattcacatttgtgttaaatacctgttacccaaccccaggccagaaaggtgttacaccttggaagcattcctgtaaacaaacctgacgggtgtgtgtgcgtgtgtgtgtgtgtgtgtgtgtgtgtccgcgcacatgcttatgtaacaaggtcagtacaatatgggtagactgggaaagtaagtcaaaggggaagacacagattgaatgagctttagtacagtcactgatgttggagcaaagtttggttctgagtttcctggtgaccatagcaaaaatagaaccactcgttagatcacccacctctccggggaaaaaccaaattcatctggagggcttctgggaattctatcacatcttggtttatacaactctccctacagagtcttccagatcaactgttcatgtgttgatccttccttaaatt

SEQ ID NO: 33600 - DNA, 1537 bp, Homo sapiens
atctctaagtcctcagttcctttttctataacaccacaggctgagcaaaggcaagaattccaggtagaaaatctgcttacccctcttgctcccacagtgacaacaaacatggtgcttcattgggcctcaggttactcatctgtaaaatgggaataaccattatgcctatcctttaggattcaatgggattacgactataacatagctttgtgcacagtattcaagaaatgagagctattattcccagatggttgttttcattttacagattagagggcatgtaagattcccttcatttccatagactctaaagagcaaaggctgaagtctggattcaaagcaatacataagaaattccaaagttcacttgagcttcttcttcatttcagtctgagataagaaaaaggaagatggcatttcaggcaggtggaatgagtaggcaaagacatgagatgggattagacctgtgcaaatagggttggtatggggaagcacgatgacatcagattttagccacttttgggagtggcatcttaaatgccaaggtgagctatcagggcttcaatccaacgttcaggctcaatgtcaggggagcctgccacatgccagagtctgtgcctggcagagctgagccctggcacacgcactgtttacagctgcctggtatggcagtggtgatatcacccttagagactttgccctcttctctctgacccaaccttcaaccactggggcagtaggttatgcattgcctagaaggcaactgtaagattcaggggctgctatggatgcattacccaggagataagggcaacctcaggtgggccggggccctcacagcaaccttacgagaggggttgtatcatgcccatttgatggaagagaaaactaagattccattagaattgatgtgacgtatcctaaatcacacagctgcagcaggactaggatttgaatgcgggtcaatctgcctccaacactactgccttttcctccatgctggattaggctattggcttctgaaagcacagacaggtgagatgggtcaaacatggcctgaagcacccaggcacaggtgggagatggcaagcagaggcaggttcaaaacgtggggccaggactggtctgaaagatagtcgttaaatagcactgaggagagggagtgagagagatgtgggtcttgggggagtggggtcttgagaaccctgaaatcagcagtgtctgcccactttgccctggaccagcctctctgtctgtatccttcccccagagaaaggaccatgggctgacctgggccaaggacacctggctggagccccttctctgacattaactagctccgtgacctggggaaagccaccctccctcctgagcctcacttttcctgtctgtaaaatggcctccccgtcatcacacccacacaggtgtcttgaggagtgaatgatggtgtgctccaaggcccccatggagagcccggcacatggcaggcactcggtgttcaagcactgtgttcccatagactctgggctcctgccct

SEQ ID NO: 33601 - DNA, 1838 bp, Homo sapiens
ctgtcttcagaagacatacctaacatgtaaggattcttaaagactcaagataaaggagtgaaaaaagatatttctggcaaatggaagccaaaagcaagcaggagtagctattcatatatcatataaaaaagactgtaaaacaacaacagttaaaaaaaaaaaaaagacacgattatataatgataaaaggaccaattcaacaagaagatataacaaacctaaatatacatgcacctaactccaatgctcccagattcataaaatcactagtactacagctaagaaaagagacatggtacacatacacaatggaatattattcagtctttaaagaacaggaaattctgtctagggggtattatgctaagtgaaataagccagccacagatagaaaatactgtataatttcacttacatgtggattctaaaaaaaaccccaaactcataaaagcagagaatagaatggtggttaccagaagtgggaacaggcaaagaggagacactggtcaatgggtacaaagttctggtgttctattgcacatcccaatgactacagttaataatatattgtatatttcaaaatagctgagaggattttaaatgttcttaccacaaatgatatctgaagtgataaactaattagcctaatttgaacattctacaatgtatacatgtgctgaaacatcacactgtaccccataaatatatacaattattgtcaattaaaaataaaataaaacaaagtaaaaacaaaggaatactcaatggtgactaataagaaaggtgacagctttggtatgaggcactgtactcccacatagcttcaactattacaaaacagtaaattaaacaaacaaaaaaaaagcttttaattattttttcatgaatacttcagtttcaatagagagagtaaaggcactctcttcacatactctgacattcactcaatagcatggtacatatttttatttataggtgcactgattctatattcttaataggcaaaaagtagtctgatcggtaaagccaatagatccaggcatcccaaaatgtatttggataatttattacagcagccatcaaccgaaattctggacaaagaaagtatcgatgaatctaatctggtggcaccagttagctcaagaaaggtcctttctggagttccctaatcatacccatttgagttccacttcctgtttggcagtgtgatacccctatagaccaaccttctgctgataactataaagtattatggtgagaaaaaaaatagctttctgagcattccaaagggtaaatacaataggcaggttgggaaggtaagtcaaaacttgggaagaatgtgggtgaatttcctgttttgctgcagctttgccccaagattaggcaatagatgtggagtgcagacagctaaagctgttcttccgtcaggaggaactagggcaaagacccaaggtaaacacagccagccaccagagagaaaaggcaatcctgtaagagagaaagttgaaagacataatacataatcctgtgtataacacagcacaaatgtgccaggctgaggcctgaaccatgcatatacagatctgcatcaaagtagaggcttaaggatcaaattgaaattggaaccactactcacaaaaggtgaaagagaaagcttacagtgtaacacagttaagccagctaaagtacagatatcaatattctatagattattatagaacccagagtctataaaaacataatattcacaatgtctaggacacaatccaaaattacctggcacacaagtaacagaaaatacagcccattcttggcagaaagggaaatctacagatgcc

SEQ ID NO: 33602 - DNA, 748 bp, Homo sapiens
actttataaacactgtacacacagactacactaaattttttttaattacactacaagattatgatggctttgaggtcactaggcaatagaaatttttcagctccattataaccttatgggaccaccactgtatatatatgccccacagttgaccaaaatgtcattatgtggcacatgactgtataatggctatataataatgtctattatgtatcacacacagtgttaagtatagaggataagagtcaaaaagacactgtctccatcctggaagaatcgatacaatgttgtttgattaagttcccaaagcaaacctgaatgcccaggtcatctacctcagtaacaattgctcattagatgaggaaattccttaaattttcagtattttgcaatcagagaaataactatgaagccatcagcttcccttaaagccatctattcatatccctaaatccattaagttctttgaacaagctactcattctgcctttctagtcgaaaagaagaaaacagaagaaatcacaggatacttccagatgccaaggacatctctgatttttctcccaaactaaaagctgtagtctttgctggcagggaccctgccttagtcgtgtccccagtattcagtactgtgcccaggacacagcaaaagagggaacagatgagcaagcgaatgagtgagagaaatgatgagtccaatgtacctggatgaaaaacactaccttaaagaagcactaacaatttggtt

SEQ ID NO: 33603 - DNA, 2829 bp, Homo sapiens
atgacatcacgctttttcactgggaaacaaaatagaaggaagaaaacacacacaaataaatctcagaaaaagaccaaaaaggtgcccaccaatctctaactccttcaggaattagagtgaatggctctaactcattcaggaatccaaccagggacaacacagacgtggaatgcaccaacacggaatagtaaaacctttgctaaccagacacacaaaaagtaaaacagagaaatgaaaactatacacctgaatgcatcggtagcaagcgcttattctctataattaagcaacagagaaaagaataagagcagctaatggaagaggaaaaaagatgttaatgaaactaagccctgttatgtcccctactggcctcaatttcagagtacaactctcgattcttcatctaaccaacagccggcctcggcaaagcaaactgaccctaacaccttccacgccacccggaggaaatcacagaggaaaaaccatcccgttaacctccctcctcaccagctgcaaaaatggagctgggagggggggcgggagacactctaccacgtgggcaggatgcaacacacacaggacagcaacacgtccgcatggaacggctgcctttgccctaatcccagcaaaggacacagacacaggatgggcgggaacgcaagcaccctcgcatgggcctcctctccccaaagggccactccaaggcgtgaggtacagcccgccctgccggcagaaaagcgcccccaagcttaaagggaagaagccgcagagtgccggggtcgggggctagcccaggccaagggacaggtcatggagggaaggagacggtcgctgccctcggactaggcgcccccgggatccacgtctggttccccggtgccccgcctgggggaggggcgggagacgcgaagccgctgcttcccagctgaggggcagcagcagctgagaagcgccgcgggggagggaaggacccagccctcggcgtccgccaggccccagccggggcccaggccccctgccccacccgccgcccaccccgcaacgcggctgcggctggaagagagagggcgtctcgcggaggacagcccctgcctccgtcccgggagatgccacagccccgcctcctcgcccgccgcccaggcccggccgccctggcggggggcacttacctcaggctgcgcaggccgggacggcccggccgagcccccggccgctccgtgcgtctccgcccccccgggaaaggtcccaacggtgcctactgcgagcggtcgaggccccgagcagccccgagagcggcggcggcagcaagagcagccaacatccggggccgcgcacccggaactacttcccgacccgcatcccccgcccgccctcgccgccaccgcctcctgcggcgtcgctgcgccgccggcccggcgtcagcggcgtcaagtccctgcgcggtcacggtcgcttcgacgcacgcaggatccctccgctgggacaagtagtgccctgagactcccgaggctctgcatcggcgcagccggtgtcatctagcggccggcagttccgagcgacttggggtccttgtgcctcggagtggcgtctgggagcaaaggcggcggaggcaaccccgcagttgaggacagtagggatcggtggctttggaccctgcccacggatacctggggccccatgccccgaaggaatggtgccttctgccctcccccgccccccaacatccgccacctcaccgaagcgcccggcaccttagcctcctctccaggaaagcggacgccttttccgacctggcacaccgcggattccgggacccccaacaaaggcgccttggaccttcaggacacccctcttttcagaacttcatgagtcccaggtgctagactcatgtctgcggaggcctttcccgtgcctggtctttctttctttcttaaaggagttggacctctaaaggcccttctaattctcaaggtagctacccaggttatggtactactatcagtaggtggagcgtttagaagggtagtttggtcgacgagtgaactttggaatttacttctacgtcagtcttcactgattctttctctaaactattagcactgataatctgccctataatttcacacttaattacattccagtgtagtatttgctgttgcttcattcgcgttagtcacatattcccctgcagcgccaaacacgcttttgaactcacaatgggtggctcaatatttggagacttagatatttgttagatgaatactaggctgattggatgagaggaaaaggagaggcatgagtgaattggccctgggtacttttttgacatagtctcaaagggttcagataaagacctccagcagatctgagcacacaattccttcagtaaacattgaacacctgccgtttggtcaagcatttctaggcactggagattcaaagtattcacatattccttttctttataagactagcaagattctgaagattcatgtactcattcactcaacaaatatttgccaatcactactaaggttgccagacactattttagtgcttgggatgtatcagtaaacagaagagagagagaaaacaaatacccttccctgttggagctttcattctaatataaggagaaagatgataaatgtaagagaattatgtaatatgttagaaggcatatggggaaaaaaaaatacaccagggtaaggggtatgaggaaaactggaggaagggggtttgcaatttttttttaagagggaatcctgctctcccgcccaggctggagtgcagtggcgcgatctcagctcactgcaactcccgggttca

SEQ ID NO: 33604 - DNA, 669 bp, Homo sapiens
ttcctgtcctctggtagcttggtgttaacttcagattatatcagtaaaggcaaaatgtgatccttcccaaagactctactacttaatcattattagtagaaaggagtagcttagtttattttttcccagtagaaggcattagcctaaaatacttttttttcctaggctgtcaatgattttgcactagtgcattcataacaatctgccatcccccacctgcaacccatctccatgttccttgtaaccacctggttcaaaccttggcttacctccactcttagaatcagccgagctaattaaaagcacagtgaaagacacaaaggcaccaagacagctgagcaaacattaacaaatgcgtaagtaaataaagtacttgtattatgtgtaagcaatggtgcagatgaaacttgggtggcactaggaagggtgagtcagaggatgttcaaacagagtaggatcaaggaaaatctctctgccagttagttagcaatatcttttgggatgatagaaaggaacctggttagcaggaaaaagtagccaaggtttgcagcccaaaggaacctgaaactctggtacaaactcagtagtaagaaacaattatttaaagttgcaaagataattggcttacttcatgcctaatgagctaaataagaaccatcaagaaacccc

SEQ ID NO: 33605 - DNA, 840 bp, Homo sapiens
aatgaagcctgggctgtttggtgcgaacatgtgagatatttactggagagtctcagcattagaaaggagagtgtgacccacatgaattctgagtctcacgaggctactagttataccaccccacttccccgccacagggcccagccaatcgtaccctgtactcttggccacaatgactagtccagggctagaatgtgacttgagtcaggccaatcaaagttcttcctgggaattttttcatttggagatagaagaaaagttatccagccttccagataaagaacatttagaatgtgaatgagggctatcttccctgccttgtggaggaaggtaattcccatagaaaagaatgggatcaatgaagaataagaaggttgggattgaaaaaaatgagaaaggccaatttggaaaatgcattttagtctctggatctacttgtgactgaagtccattcctagccttccaaggaccgtgagtcagtacactcccttgccgcttatgctaaattggatttctgtcatttgtaaatgaataacttctaactaatacaggcagggaaacttggaagggttctcggtacttgagctgcccaggtgggacctatctgtgactcttccatgaccttttggaattgagaattttcagttcatgacaaattaccaattcattttcagctcatcaagaacactagagttccctgcctcttacttccctggatattactgagttcttttgacaatctgactaaattgctgactttttaaggttaaatctccttgttctgatccacagctttgacacacagaagggcagattatgtggctgcccaaatcatccatc

SEQ ID NO: 33606 - DNA, 575 bp, Homo sapiens
ttacagtgtagtaggggagaaagacaataaagaagacaaataagtaaaacacgacagtatcttaaatgataaatgctaaggaaaaaaataaagcatgaaaggggataggaagcattagaggtagtagtgggggtttgcagttttagacagggagagcagggaacgcttcactgaaaagaaaacagctgagtcaagtgaaggcctgaaggaagtgaggtgccagtcttgatggatagatagatgtgtgccttttgtctaaggtctcttgtagatctaacacaccctggggtaatgacttccttgagtacacagtggaaaattggacattgcaccgtagaaatgaggttttgtccaatgtaaatttgaaagttcagtggaaatattttcctattcctcacccattcctacccctatcccaggtagggttagtgccctgtgcactgtgctcccacagtgctctgggcttcgctgtcacactctattataacctgtgagctcctccaggcctggtatactgcaggtgcttagtaaaagttagctgaagaaagaaaagaaaagagggaggagggaggaaa

SEQ ID NO: 33607 - DNA, 1710 bp, Homo sapiens
ggaaaaagtcagtgctcacaccaagcaaaaggattgaatctttcccaagcctgagtggcaggttttacccacggcggtttactggccatctctctgggggtgacccaaaggcctcttaaactctatgcctacaaccaaatctgatgcccgtcatcttttccccgtgttccttgcccaagttaatgggtttattatccatttagttttattcaacagatgttcattgagtgtctggtatgtgtggccactgggtctagtaaaagacatagacatcagacaagcaaacacaataatataaaagtacagaaaaagcaaagaaaaatggtactgtgagagagaaaagtatgacggggagttgagactgggtttagacctctttgaagaaatgacatttaaactgagaactgaaggatgaaagggagccaggaaggcttgtagttgaaggggaggttcctagcagagagaacagactgggaaaagaaactgagggaagaaagggcttagcaaattagaacttcagttctctataactacagcaaagaaaaaatggggtgagtgtggtgggaagtgaaggtagagaaataaccagggccttgtattttctgttacaaattcttaattatattctaaaggcaaggaagccaccaaagaggagatagcaatgaaaacacagataccatccctgcccttgtggggcatacagcctaatgaaagaaataaataaatgatttcagtccatgtcctaagtgttaggataggggacatactcagtgctttgagagcactgaggaaggacacctaggccagtatgagaaggtactgcaacagcttcttgatctgttatgcagccgtcagtgtctaccttcctctgtatctgccacactgcagcccatcctctttccttaacacaaatgagagcatgtcagctcaaaaccattcatggtttcccaggagataaattccaaacccttgatctcatgtcactgtctagccctaacctttatcttcttggtttaaacttctactacctatcacaatgatgttccaacttttttttttttttttgagacacagtttcactcttgttgcccaagctggagtgcaatggagcgatctcggctcactgcaacctccgcctcccgggttcaaacgattctcctgcttcagcctcccgagtagctaggattacaggtgcacgccaccacatccggctaattttgactcaacctatagtaagaaatacatttttcctgtacacacacacatgtccacataaaacactaagacaaaagttttaagaaacaattcaggtaggattaacctgatactttctactcattctgtgctcttttttgttgttgttgttttctctaaatggtgattgtgacttattcataaactgctaaagggccctggcctgcagtttgaaaatcactgactgctccctccactactacgttctccactcggcccttagcaaactctgttcttttgccatttgccctagcagtcccggatgccgggaatgccctacccttcttcactactcctgtacacagcaggttctgactgccctctcaaaatgcagctcaaatgtttcttccacagggaaagctttccacatactgccccattcactatcgtctcactctcgttgcccaagctggagtgcagtggcgcgatctccgctcactgcgagctccgcctccc

SEQ ID NO: 33608 - DNA, 2133 bp, Homo sapiens
ttcagcctcccgagtagctgggattacaggcgcccagcaccactcccgcctaatttttgtattttttagtagagacagggtttcaccatgttggccaggctggtctcgaactcctgacctcaggcgatccgcccgcctcggcctcccgaagtgctgggattacaggcgtgagccaccgcgcccggcctgtttctttactgatttgtctcccacattggaatgttagatctttgaaggaactgatctaccgagctgccccagtaactttagcacctaaaatagtgcataacacagagtacgccttcagaaaacatgagtgacgaataagtgggagatgagacagacgaggccacgggagtcttaggggcctgtcttaaagccgttttgaggtgtcccttgcagagtcaggggcaacggctaacgcaaggtacccaagccagacccgggaaagggagagagggagggagttatagcgcccaggtgccacgtttcagggcctaccagtaataagtgactgtgcaggccgcgcacacccgctcggctggggcttcgcacacctcacagcagagtctgcgccccttggggactgccagtgggtagatcacattcatggtgcagccagcagtgctggtctctaagacggttgcccagcaaggatacgctgaaccccggcgtcacgtgacgatcgcggggctgcgtacttgccagcatttcaagggcagagggcggcgggacgtgactcgactaacatctgggtgtattgctgaagttggaaaaggggaagaaagaaagaaaaagcagcacaaaacccacaagtcccacgggtcaaatggccgagaaacgactcccaaggagtccaagtccagaaaggcccgtacagtggccggtaagggtcaaacatggccagttcttcacccaggctaggaaacgaacgtgagggaacgtgaccctaccagatgcccacccagccggggatccccctcgttgcagtgtcactttcgctgggctctggggcagaacaactacgcatttccagacttggcgagatcgggacctagtgtcaaaagaagggtagtgaaccgcccactcagtacggcgcggcgcgtacaccaggtaggcgagaaggggcgtggcgcggcggccgcgaaacgtgcgcaggcgccggccgctgcgctgcagatggcggaaatggatccggtagccgagttcccccagcctcccggtgctgcgcgctgggctgaggttatggctcgcttcgcggccaggctgggcgcgcagggccggcgggtggtgttggttacgtcaggcggcaccaaggtcccactggaagcgcggccggtgcgcttcctggacaacttcagcagcgggcggcgcggtgcaacctcggccgaggccttcctagccgccggctacggggtcctgttcttgtatcgcgctcgctctgccttcccctatgcccaccgcttcccaccccagacttggctgtccgctctgcggccttcgggcccagccctttcgggcttgctgagcctggaggccgaggagaatgcacttccgggttttgctgaggctctgaggagctaccaggaggctgcggctgcaggcaccttcctggcagtagagttcaccactttggcggactatttgcatctgttgcaggctgcggcccaggcactcaatccgctaggtgcgtgccctaggagtaccccttttgcctggaagcacagcctttctttccagccacttatccccttacctcctgcttacccacggatctcagctggggaacccgagttgagaaggagctgatcctatatcgtacctcgccgatttgttaacaccttgtgtttctctttgcaggcccttctgcgatgttttacctggctgcggctgtgtcagatttctatgttcctgtctctgaaatgcctgaacacaagatccagtcatctgggggcccactgcaggtgatgggcgcttctcttccagagatctaatcccatataaccaatcttgggttaatttcctcttgatctggagatggcctttctgcatctgtattcgctaggcacaggggatacagagatgaataagacaccgccctccctcatggacctcacaatctagtgagggagc

SEQ ID NO: 33609 - DNA, 1093 bp, Homo sapiens
caggagttcgagaccaacctggccaacatggtgaaaatacaaaaatactaaaaatacaaaaattagctgggcgtggtggcggacgcctgtaatcctagctacttggggggctgaggcaggagaatagcttgaaaccagaagacagaggttgcagtgagctgagatcatgccactgcactccagtctgggtgaaagagcaaaactccatctcaaaataaataaataaataaataaataaatggtctcagttagtaataatcaattagagttaaatgaccttctaaaatcatttcctaaagaaagattttgccttccaagttctctcttaatctttcatgaaggaaaagcctcaagatttcttgatggtgtttggcagccaggtgatggtgatagcaacaagtattaactgaaggatcattttcagcataggaattaagtgaactgagtgctgtagtcagcaggtaaggagtaacagcccattcccattaacttgtttccagaccttgacctagtaatatgctattcctggcatgggttgtttccttcagtcattccttccttatcgctgactacagtagttccctcttattttcagtttcgctttccacagtttcagctacctgcagtcaactgcagactgaaaatattaaatgcaaaattccataaataagcaactcataagttttaagttgtgaaccattctgagtaccatgatgaaatcttacactgtcctgctgggatgggaatcatcccttcgaccagtgcacctacaacatacacactgtatacccattagtcatgggcattagtcagcctgctcctgacatgcaaccatggacatcatcatggctcagtgatccaagatcactcaaagcagatgactctacttttcaagtatcatcagaaggtcagtagtagtctaatgccatgtcataatgcctaagtcattcaccttcacctcattatttaggcattgtgccatctcacatcatctcaagaaggataagtacagtacaataagatatttagagagagaccacattcacataacttttattacagtatatttttattattattgttgctaatctct

SEQ ID NO: 33610 - DNA, 1546 bp, Homo sapiens
gtctaatgttgcctctcaggaggtaacatctggggtgagccctgaactacaaggagcattacttcccacacgcataccccaaccaacccccacaatcccccgccaacccacattaagttctggaaggaatatttcagacagaagtaacagctattacaaagccctaaagagaggagggatctcagtgacctggaggaacagacaggtcagagcacagtaactaagggcaagtggtacaagatgaggtcaggtacgtgatagccagataaatgcactgtagggcttcgtatgcacggaattggattttattctaaatatgggaagccaggagttatttttaaaataaataggaagcacaagagttattttaaaaataaaaaataaaaaactctagttgctttatgggaaatgaattggaaatgacaaaactggtagcttttgtggcagaacaaacattatctattgtcctgacttagaggaagggatatttacttagcaagcctgtacgtgccaagctgttctaaacgctgaggatgaacaaaccagagttcctgccttcacggtgttcacactagcgggcagaagacagacagcacgtgtggcggtgcagagggcttggctgcaagagccgataaggaggaccctggcgactgcctagtccaaaagtcctagctagagcaagatcaacttgtactgcccttagtacagccacgtgagtggggtgaccattgaccttaaccaaaaagatgtcaaggctttcctcctcctcactcccgcgtccccagtgccaggcagagtctctcagctagaccctagcagtctcagcacacaccgcacggggcgacagcttccgggggcggagcctggtctcgctccacgtctaccgcgcctgctccccggacgaaatccgcggaccgggctttaggttcgccggaatcccacgctcccgacttctgcttccgggtcggagccatggcggtggcaaattcaagtcctgttaaccccgtggtgttctttgatgtcagtattggcggtcaggtgagatccaggaggctgcccacacctgcgccgaagggaaactgctcggggctaggcaggcagaactcacccagagagagcggactcgggaagccagccagaaagtgaaattgcacccgaacctaccgacctgccgggcggggggaaaggaggaggaggagtctccccaatcctagcgccccgcttctggaggaactgggcggttagactagggaggcggaggtgggagataccgagcggcagggtggtgggtcagcccatcatgccccctgctccgtgaagccctcatggtcttggactgggccttctgacactctcccgctgattgcaggaagttggccgcatgaagatcgagctctttgcagacgttgtgcctaagacggccgagaactttaggtaaggacgtgctccagctccgctggattagctgaggcagaagtcgggctccagtcagccgcctgaaatagcctgtctacctctgtccgtccgctcactgctcttgagacct

SEQ ID NO: 33611 - DNA, 2925 bp, Homo sapiens
aaaaaggttcctaccccttgctctaagcaattggtgatgatggcctacagtagtgacagtaggaatgaaaagactctgaattgacatttagagggtttaggactgactcaagaacgcctttaggaggtggaactcacaggcctagacggcattggtaggggtaaggaatactgcattagcctcctaactgctttctctacttccattccttgcccctctgcaacccattctccactccgcagccatttttaaaaagatgcccctccctacttatgactctaaaattgctcttctcactcttcccctcaggatatatttccaattaaatatacctaagtgactgcccacctctgcaacccaatgtcacattcgagtcttactgaactacttgactgcatttcccgagatctcacctcttctcgcctgtaccctgtgcgcggaaagtcagccctccaccttctccctgcttccactcccaaaatacttcgtggttttgcagctctggagtatttaccgtgttggctgtttaaatttctgcctccatcagaaggcagaaactgactcgcgaactattccatccccagccgatagtagacgcttaaaaaagaacgaaagaaggtgggtggaggacttcagtaacatcaggtggcagcctcaattttatcgtttgtgaaacgtggatagtaatccctctatcacgtggctgttgcaggaataaagtgaaaaaacaaaacaggctagcttgttcaataaatgtgagttgaattaaatctgatttgtggtcagtagaaaaagatgtgaatacttggaaaggaagacacatttttttaaatatatgcctggtaaaacggatcagaaggcaggtccccatggagcacaccctcgccctaaacatgctgaacccgggctgccatagcctgcgtggtccctccaaggtgactgctccgacaaaagggtacgctcttcaaacgcatacgtttaaggcaattccagaaaccctcggctgtgccgcgactacacggccattaaagaaaagacgactctatgcccgccgtaatgttctcagatcacagggaccgtatttggagctgggagggagggaagccttttcttcacggggggctaaggcgtcttcgagcccccttccaatcccgggtccggccgggtaatccctgcccagcgttcgggcgtgcctttttttcagccgagacacaaccctgaacgtggggcccgccagcccggcggctgcctcgtggaagtcacgttccttctgcccgtcctctcgggtactctatggttttcgtggccgactactctaattctagttccggtctctatggcggccggcggaggcaggaacggttgtaggtcgactgaattagccgccaaaggtccaatgagaatggaggactgataaaatattagccaatagaagctagggattggggtcaggtgggcagattgacagtaccactggccagtgaacaacgcctagggcgggtcgctcgtagggcttatcccgcctgtcccgccattctcgctagttcgatcggtagcgggagcggagagcggaccccagagagccctgagcagccccaccgccgccgccggcctagttaccatcacaccccgggaggagccgcagctgccgcagccggccccagtcaccatcaccgcaaccatgagcagcgaggccgagacccagcagccgcccgccgccccccccgccgcccccgccctcagcgccgccgacaccaagcccggcactacgggcagcggcgcagggagcggtggcccgggcggcctcacatcggcggcgcctgccggcggggacaagaaggtcatcggtgaggaccggacagggacgggggtggggccctcgggcagcccagcagcggaaccgttagccggagctgggcgagccggcgggcgcgcggccggtgggcaccgactccgcggcgcgcggccgcccatcccccccgtccccccctcactccctctcgcggggacccgcccggcaggcgcgcgcgcactgcctcccgcgccccctgtggaccccgcgcggccgcgcgcccctccccctgcggccgcgcgccgccgaccgcgtgtgcgacggggtcccctccccgccgaccggcctcgtgcgctcgggcccgcacgccgttgttcgcgtcacccccacccagctcccttccgcgtgtgctcggagggcgcggcgcaccgcctacgcaggccggagcggcttccccttccctcacgtgctctccgtccgcggcctgcgcacacacccatcctggggcccgcgccccgggcctgccctggagcgccccgcgcttcagactcacccacgtgtgcggcggcggcggcgactgcgtggccccgcacccgggcggtggagagaaagggctgtcaggtggccgcggcggccggcgtgcgagggaccggatgcccaagccgggcggatttggaaaaggatagctggtaatcgtggcttgttttgctttgttttcttttccagcaacgaaggttttgggaacagtaaaatggttcaatgtaaggaacggatatggtttcatcaacaggtgagctgccgggctctgaagcctccatcccaccttcttgcttgcttcctgctctgtcggcttctcggggcttgggaagccccaatccacagctctgttctgaaaggcgtttactacctctggtgtattagtatgattttttgttgttgttgttttccttgattagggattagtggatctagagaatgcctttgttttgcagctaaatattaatttgaagctaacttaaaaggcttcgtcacagtacaaagcaattcaaaaggcaagcggagtgaatgagccattccttaacagggtaaacgggaaactacggtccagtacatttttatccttgtcatctttt

SEQ ID NO: 33612 - DNA, 840 bp, Homo sapiens
ctttggtcatggccaggtgggaggagcagctgggcagggggagcagcgagaaggagggtcagaggcagagaaggagaggtggtgcggcggcagcggctggagcaaaggcagtggctctggactccagaatgcagggggaggcccaggggctggaaaaggccagggcccgcccacagcagccgcctaagccagagcagggtccccagcaaagctcatgcccagccccctgggggcggagggccggcccatggcccaggtggtgtccctgccccgccccgttccgcagggatagggaagggaggggctgagaggaatgacccagctgccctctgggcctttccccacagggaaacccctttaggaacctgattcgggtgtcctaaaattcggataatccctaacccaaacaccagccctgggaggatggactttgctcttgcaaggctgatctaacccttggggttttctgccctttgactttaggacagaagggaaaggaatgccagtttgcagcgggtaaaactagagttagatgtcaaggataactttttggcaggggctctgaagctggatgtggggaggctgagctagcggtggggtgttgggaagaggggtcatgggtacctgggagctgtgtgtgccaaaaatcagggaggccagaccaggaaatatgtactgtggggtctttttgagatctgagggggacagaaaaggggccctatcgaggctgggccagcgctggctgccggccagcaaggggcctggtggggagctggggagacagccccaaccttctggcatcagcctgaaggaaggcggattgctcagccccttaatccc

SEQ ID NO: 33613 - DNA, 2339 bp, Homo sapiens
ttttaaacaacagatataccagatataatgcacaactctttctccccccacccccaatacagtgggactaataacagcatctacctgacaagatattatgaagattagggcaaatgcgttaataaatgcaaactgcttaaaatagtgcctggaagtatgtgctggctatcatcatcatcatcatcgtcaccatcaccaccaccaaacaagcctggaacgctccaagcccaagtgtacacttggacacatggcactctggcattccgaaaaatactcattttctttgtaaacctggcagactagccagagggtcccccccccgcccccacacacacacagaaagggccaggcagcccctgctggcgacgtggcaacctcacatcctgaaagagagctgctgaatcaaacagcaggaaaagcaccactggaaaaccaaccggaagggagatattgtagaccgctactagcttctcactcggacacttacaatgacatcagaatgggagacccaaactgccgctttaattccttccaggagatttcccagggaacaaaatggccatgagttttgcttggcctgtgccctaaccccaggctggacctttggggttagcatctgcccatgcgaactgggcgaggaaggtctcctgccagggagcagctctccccggctccgaggagagctccccagccaggaggccactttcccctccctgcggacacttccccgatcccccaagctcctcaggtcccctgcaacactcctctccccagaaggaccccggccgcctggttccaggcaggtctgcaccttgaagtaggcgacctgcaggtagttgtaggggctccgcttgcggaactccagctccatctcttcgctgagcgagtgggcggccggcggcccgaggcagcggcgcaggcaggcagcgcgacgcagaaggcccccgaagaagctcaggtcgcgcagggcggcggcgcccgaggcctgggccgggctgggggaccagtcggggtccagctcccacgggaagtcggcggcacactgggtgcggcagcgcaggcgaagggcgcggagggctgcccgggagcgcagcgcccgttccatgctcaggaccaccccgggccagtccccgcgcgcgtaggctgcggtcccctcggcgaagagcagatcaggcgtcaccatgccccatcctgcctcggactcgacctcggcttgggaggcagcggccacgacagccagcagtgtggtcagcagcttcaacgcgcgtaccgccatcgctccctcagacctaacggaaccgccagccacccgccaccaaggccggagtcctacccccggcgaaggcccgcccccgggcgaagccccaccttccaagccgggcggcgcatgcccacgaggcttgcaccgcctcttttcctttcagtcagcccggatccccccaccggccctcagcgaatcccggcgcgtcagccggagccccgcctccgagctcaggccttgctcagtcgaactgacgcccagtagacaagaaagacggaagctccgcccacgcgcctttatgcgcaggctcttcctactcgcacagcccagggagtggggaggataaggcgctgtcatggaggacgccgccgcgccggggcggaccgagggggtccttgaaaggcaaggagcgccgccagctgcaggccagggaggtatgcggggcgggagtcagcagggggaagtcagctcccgcgaggcagccggtctcggggctccgcgggaggccgacggcgggagctcacggcttgtgttcctgggtgtgtgtcgcaggagccctggtggagctcaccccgacccccggcggcctggccctggtgagcccctaccacacccaccgggccggggaccccttagacctcgtggcgctcgcagagcaggtgcagaaggtgaggaggcgcggccggggcagcgaataaccatcttcgttcacgttgtactctgcgtctttcggctcagacctcactaccacctatggtgggggtggcatttgctcttgtctccattttacagacgagtaaagccgactgtcattgtgagtcggtggcctgattcgaatgaccttctgggaccaaaggttcctctaactgcaacttgagtgcccataatcttccttcgtgggaaggtttacacaacactttagtgttcattatttcatttgcaccttaggacagccttgtgaggtaggcagtacagagttattcttcccatttgacacaaagaaaagttcttcgggaagtttcaaggtccgcttattttaagctgcttcccataagatctttgttacctgagagtttaa

SEQ ID NO: 33614 - DNA, 1283 bp, Homo sapiens
ttaatctcacctctgctctttgtctctgcttcagctcctgctgggctgatttctgtttggccttctcaactctgctgacagattctttaactttggttttttctttacgtgcaggtggatccatggcttgacttctggatatttcttaggaggctctgatctgggtggtacagaaagaggcagatcttcaaaacaaaacaaaacaaaaaataccctgccagttactcctctaatcctttagctccgccccatcctttgccaggtgaggcagagtggtctggtggcaagggcgctggatgtgggggagtaggaaccgagtcccaaggccacaacctcgctgggtgtccctgggcaagtctcctccccactttgagccttagttttctgtctgcaaaatgggttaagtgttttcctggcctccctccaggagctgctgtgtgcgggtgaaatgcaaagacccctgtgaaagcgttgcccactgtgcggcgtgcggcacccagcgcggaaccgtcctaatgggacgctgagacccagagggcgcccagggttttcccactgcggccggcctaactccgccgcagcagccgctcctggggccagggggccgggccccatagccagccgggcccgccccccaccgcccggccccccgaccccgccccggcccgcccggccccaggggacggcccccgcctcctgccctcttccctctcctggaggaaaatggcggtcgctggagccgccgaccaagaggcttgggagtctgtacctttcccgaccgggccactggaagttggagcctccgccgagtcgcagacaacgcctccgggagggtaatcctcgccttcccccgaccactggacccagcgctgcctgcccaccgcccctcgtcctgggcggggccgcgcgccggggggaggggcgcagggccgagcgccaggaggcttccgcccgcaggagcggccgcgcgtgcgcagagaggatggctggaaacccgcgtagagggcggggcggggcaagccggtgccggggcggggcaggggcggagccacaccggggtgggtggtggttacggctaaccaaagctttttcccgttatattttctgcaacagctactaggttttagagggtgagatccgaatcctggaattggaattgctcagaattcgaattccgaggctcaatttcttaattcgaaaagtggggattgatgattgccaccttcttcattcatgagtttattgggaggatcaagtgagatcccgtttgccacagtgctttg

SEQ ID NO: 33615 - DNA, 1932 bp, Homo sapiens
atatgtatgtatatataatatcctcacagtaattctgccagggattttatgggggagggagttggtactccaaatggctaggtggtagagccagagttttatacttggtttatctagctctgaaggcaatgctccttgttctttgcactgaaacattgtgcagatacgagaagcctgtagtttacgtatttcattagccttttattattttaaaaaataaaacctgaaaaaaaagacctagtcctggatactttggtgatcttgttgtgtctggattgacgaacacgtgtcaggcttaattagggatgcacgcggaacccgggaaaatccctgctcaggggggctggaagacctggaggttgatccttgaacagggtacttttagcttctccgataaggagattgggttattttatctttaaactcccttccagctctaccctcctttgattttaagttataaaccttgagtgaggtgccagactctaggcttcgttggacgtctacaggacggtcaaggattaccaactcaaagtaaagaaggaaatttgagtacttgcccccttggaggttgtgtaggttggctatacagattctacaacttcccagacgagtggccctgagacttggggctgaacgcgcgagcacggaaagaaatcccaccgtaggacggaacccagtctcttcagctccatcctaaacttcgcaagttttctctgagtctacgcgcttccttaggactacaactcccagcatgccacgccagcggtcaaagcttattggtggtcctgccaggtcgcttgcgttgtggcagtcatggtagccaatggaaataaagaattatcccaagaaaccaatcctggagtagtagggcggatccttcctgggttccggctccggctccagctccttccctcgcctacagaggcggcgctgtccctgatcgagcggcgggagcgaggtgggtccgggttgggcccgaggtcgcggggggaggcggacacgacttcgcgggaaactctgtacacggccacttccctctcaccgaggatctggatgctgctgctttgctccctggaccgagtgggaagccaaggggccttgtggtccctccgccgcgaccctcgccctggcccccggcccacgcagccaggtggctgtccccaacccattccccggcccttctgttgggtttgagtatacagccttcctgccgctgaccatacgtttaggatcagcccctcctcctctcccacctctctggccccaagcccgccggcaatctctgaaaccagctcttgtacccttggacctccgccattggcttctccccgccccgcaacacacaactcagctcttgggccctggcctgtgacacttctggcagcctttgcttcctcttccctgaccgtctcctgcgaccctctgacttccttggtcctcctgtatctctgacccgttatctagcttccctgtacaattaccctgttagcaccttgctcttggtctttcatagctcctctctcctcttcctccctgcagcccttgacttggccccaaagacctgtaacttcggacctccataccgcactatggcttggccccttgcctttaacctaggcgcttcaccttcatcatctgtgatcactagccccatcttcttggctcttaacttcttagacctggcccctcctccacttctcagccccttccaccgttgcttctctctgtgcagctgagccaccaggaagacaaagcccaatagaccccttttccccccagatctctgcagtgtgatatgaaagtgcctctgtacttcagctgcactgtcttctcagtaggtagttgcctctttatctctgcaagtcccagtcttacccatcctgcaaaccttaggtcaaatacctactcctccttgaaacttctcagccc

SEQ ID NO: 33616 - DNA, 4567 bp, Homo sapiens
gggaaggaagagctttatagacttcagggtatgaggctgcccaccttacaggtggtgagttccctgtaagtagggagcatgcaagtcaaagtgctccagagccggactggggtaaacattttatgtaaaaggctagctagaatccattaggtagggtctgtgagccacatatggcctctgtcactcattgttctttttttctcaaccttgtaaaaatgtaaaaaccattgttagctcatgggttgcacaaaaacaggctgctggctggatgtggccctcctgccaacccttgatctaggattctagaccactgccaggaggggtatgcgttttggaacctctggctggtctcaccatccttccctctagacattcctttaccccaggaggactaggtcagttaggtcatccccagcagggatccctgggccaggtttaggctcggtctcaactctccctgtgctctacgggatgctattgtggggaagaaggggctaaactgccagccaagctttcagcgccagttacaaggaggaaagggccagcttctccggcttagcctctcagcctggccttcacccctgttccttgcctgcccctgtcttccagttggggctggccccacactgcccttcccacaagctctcagcccagggccttcatctccacagcaactctcagccacaccccagggtgagctgggagattggagccagatgttccaggtggggctggacagataaccctgcccactgggtcccctggggcctcactttggggcctgggggaagaggcccaggttggggctagagctgggccccaacccccctgcagagggctggaccacccaggctgcttccctggaacagccctgacatggctagcctccaaaccaaggccaggccaggccaggcctcccggtagacagaggaatcatcccactgccgtggccacacccgaagcccttctcagctcttgcaataaagtgtctcctctaccccaactatgactcacaaggcacacgcagtgactccctcatacgacctagacacctcacacctttgcttgggcctaatcacctttcagaacatgcacagatactcctctggaaagccttcctcccgagaaccacccctcccactccactgcaactggttctcaaacagagacggctttggtaccccataggacatctgccaatgcccagagacatttttggttgccacactggctactggtatctagagggcagaagccaaggatgctgataaacatcctccaatgcatgggacaggcctctacaacaccagcagaaacatcacagtgccaagctgagaaaccctgctctaagggcgaagcaccctctccctcttccttccctgctcccactgtgcttgctcgcatttccatcatcgcctttagaagactaactgtaaggtaccgtgtgctccctgtacagtaaacctcagcacggagatggtctgtctgatgcatccatgttgctggtgcccagcacggtggtggaggtgcagagttgacactaaatgaccaacaagccatgaatctaactgaagggcttgaggggtgatgtgatatgacagggtgtgatggtgtaagagattgtgcaactgtgtgtgggaaacctgagatgttggtacatgactgagcttgactcagctccaaagtgagaccacacactgccagctaggtggcagttgtaggtgagtgaaagggtgtttaggtgcccatctgggactgtgtccatcttccacaatggtcaagggcacagactagggccagactccccggagttacattgcagccttgccacttactagctgtgtgtccttgctttaattgcttaacattcctgtgccccagtttcttatagagcagggaaaattatggtgtctgcctaatggggttattttgaagaacaactgaattactatttctagagtatgtataacaatgcctgggcaagctataagtaagcagtaagggtttatggtagtggtgacgggtgaaggggagagaggactagaactctttggatataggagagagaaggagaggctgcctagagcacgaagcccagttcagcctgacgggacacagggcttgggttgggaggcgggtgttgcctccagctctttcactcaccaagctgggtcatcctgggcagacctcacctcctctgcagaccaggttcctcctttgtcaaacaaggagtgttgtttgtcaaacaactgaggcctttctggcccaaactctggattctgaggatgccttattctcagacatgcctgacactgtcccttgggccaggacttcatggtttctcagtggccgtcagtcatctctactggcagctcagtcatttggggaggggaaaggcagtgctcggatgagcccagtatgatggtcaggattccctggttcatttagctgctccctctgtggctgggctcacctcttctgctctgtcctcctcctccaggaggggatgcatggcaggaatgtcctgtcacactcacagcagggcaggggcagtgtgcagagctggggaggcacaaggcctggagcccacctctagctcagcctctcactctccagatacctcatctggcttcagttccctcatttagaagaggggaagatgtcagccccgcctgccttgtagagttgctgtgaggtggtaatttatggggtggtgctttgtaaacatataaggtagtatgattaattaaccacttccaggaggaagccctttggggcctgttttatggaagagaacaagcttctggcatcctcaccacttgtggggcaaagtctcttctcaagagtaggcaaactgtggccaacccaatgctgtttcctaagagaggttcttctaaacagacaagggaagtcagtgtgcccactgcaggcagttagcaattccgcatcagcagaacatttcacacccctgcacctctgcagaagcccctctcactgcccagacacctgcccctcctgccctatgaggtcaactaacccttcaaggtcgagcatggctgccaagtccttcgtgaagccctttttttaatctcccctgtcaccccagccccagcattagttgccccgtttgctctcacagcaccttgaagccctctgttagtgacactctggctttctccaaggggtctctcccactgctgtggagacagggcctggctcagactgtgtctcaggcagctccctgagggccagcatgtgcctgctgtgttcacagctatacttctctctccttactgtctaggaccgcatctggcacagcgtggatgctcaggaagtcctggctgaatgaaagggttggccagatggaatctctgtgtcgccctagggcaggccttcagcctacgcgggcacaggagtctctctgccctgttactacacatgggctctgagcctcactttcatttcttcttcttgggtccttctgtcctctcttcacatgttacatgtatcacttctaatctggctcctggttggaaaaactacagccagccttgtgagaagtgtttgtaaagtacaaaagtcaacagaccaagtgtctgggtgcttgcccaagaaacaccgctagatttcagcgttctcagttctggccactcacatctccagcttcggtctgctggggctggttcctgaagtgacctttggacaggtgaccatacatggtcctatgaatgcagtttacaggctcatctgggccctctgtgctgctgaccagccccgtgatgccctggtcagaggttctgcccatattccatgacagttataacctcttgcctatttctgattagatgggaggccccggggatcacagaagttcatctcagatttgtctacatcttcagaagtctctcagtccctggctgggcatggtggctcatacctgtaatcccagcactttgggaggccaaggcaggtggatcgcctgaggtcaggagtttgagaccagcctcaccaacctggtgaaaccccatctctactaaaaacacaaaaattagctgggcgtggtggtacacacctgtaccagtagcccagctacttggaaagctgaggcacgagaaccacttgaacccaggaagcggaggttgcagtgagccaagatcatgccactgtactctggcctgggcagcagagcaagactccgtctcaaaaaaaaaaaaaaaaaaaaaggtatctcagtccctcctggccaaaggcagcccctcccttctgctccgacaccaccctccctcctggaagacctccgccctcacttccttatcttcaccctctcctgctgattccttccaacatgtttaaaaataaccttcattaaaataaataaataaattcctagccataccatcattccaaacctcctcttttctccctctcccaccaactcttttggaagagccgtctccaccctttctcatctgcctctcactcttcacccaatcgtagtgaggcttctatccacgctgtgccacccagtcagcccgagtggccacaaggccaccatcgcctcttctgc

SEQ ID NO: 33617 - DNA, 2568 bp, Homo sapiens
gcttacattatccctctgtcttgggagggtatcctctcctggttttagagataccagctcttgttcttctacttagggtctttttctagcaatgggttgttctctggggccttgatcttttacttttaatttttatttatttaattataaaattgagatgaggtcttgatgtgttgctcaggctggtcttgaactcctgggctcaagtgatccacccacctcagcctcccaaagtgctgggattacagcgtgagccacatgcccggccttaatcttcatttctctttttattccacagtctccctagaagatctttctccactgtgtggataccagtgactaattctcaacttttctccagcctgggtctaagaaacagacccatacatacaggtgcctcctgcacatctccagctgtgtcaccccacgcctccattcctgcacatcccacggccacctctcagctcctggcacacctgctccttcttcaaaccacacatcacccatgccagaaacctagaaaccatttttaaacccttctctgttgccctcgcacggaattgatgaccaaatcctgtccattcttcctctgagggtttgcttttatgtcactagtccaacggcaactttcttgatggtttcccgtctctagtctcacattcttaagtccgcccctccataccagacgcctgagtcatttccctacaatgcaagtctgatcacgtctgccctgggcagtgggtccctattgtcctcatcctgaagtccatgctccctagctgggcccccgtgctggtgcccatccgccccttctgactgtgccgtgccatactcacaaggccctttgtggtctggctcttgcctaccttaccttgttgacctccccaacctttcccctcctcctgttcactctagtgacacactaaactactcacgctttactgaatgccaggctttctgtcttctgggcattttgctttgaaggccccctgctcaccccaaccctgttctgtttctggaaaacacctcctctgtcctggccttagagtcctagttctgtcattaactcactatgagatcacagtcaagacatcattaaatccagtagctgtcaaccttggctgcacattcgaattggttgggaagcttttaattgaatgcccaaacagcatcccagaccaattaaatcagaatctgggggcgttctggaaaccccaatgtgcaaccaagtggagagctcaacctccctctgtttcctcccagcctgtcttacagactttccatctgtaaggattcccaaagggagccagttctgaagcacacactttggcaagagctgtcaagagcacttagcaaatgcagggcttggggctggtccaagcatgggcccacggtctccatgcccagcaaacttggaaaagtcctgtcacctcccctgcagctgagcatgactcagcaggccaagccttcctggtgacttgctcctcagcatcgggcgtggccccatagccactgtctgcctatttggaagaagcccagctaactctagacactacctggttcccccaaacaggaccctgatctttgggagtcactgcactcactttctagccccatccgtctggacaagaaatgtggtcctgacgtgaggactgcccactctcatttggtcctctctgggaaggtacagatttttaaacgggcaaggcagctggttaggaagacaacctgaggccatggaaacaacagagcttggcttctgactccagcattcaatagctttgtgaccttgggcctgtcggccatttcatctgcctgggcctcagtttccgggtctacaaaatggaaatcaccacccaatctcataaacacaagcaaaatgcctggtacagaggaagggctcagtttcctttcctgtccctgcctcctaccccctacccccttttcctcttctctcctccttaatgcaagtaggctgggctggaggagatggtctaggtcccttcccatcctgacattcaagtaaacaagtgaggacagatctaggatgcacggcagggaggaggaagccagcacagaccttcaccccctgtggctccctagggcaagacgccatttctgctttgactgccacagggccttcagggagaggacgcggtttcaacctacaaataaaggaagtgtgctgcctgtggatgggtatgagtgcaggctcaaggaccacctggcaggcaggtgttggataccagctctgtctctgacttagctgggtgatattgggcgggtttcctctctctggccgtttcccacacctgcaggctgggagtggtgcctgctgcctcctgacagtgctgcagtgagcatcaagtgagacaagcccatgaaaaccctctgcagccccagaatgccacggaaatgcagcattattgtattgagctttgctttgagtttattatatcatcaaacatattattaaatgactgagttgggtggggggttggtcaagagggcctatacaagaccccaggattctgtgggacctgagattctagaattctgccaccctga

SEQ ID NO: 33618 - DNA, 2056 bp, Homo sapiens
cgctacaaagatgccctgcaggacaagcccacttacacagaaaaaaagaaatcctatctagggagttgttggtccccagagtccccatccctcattccccaaccccgtggcgtgcgcgcttcccgctagacttcagcctggggctctttcctggcccccagatcccccgcccctccggttgcgctccccgcctggccccgagggtaaacctgcctccgcggaacacatctccgcgagactgggccaaagctttggggcctgcactcctcgcaaaggagagcctccgagaccggaggttcatctcaacccccgcgttcgagcccgggcctggagaaaagtgccctcccctcggcctcggcctcgtcaccgcgggggactggcgggaggagtaggggaggccggtgggacacctcgcaccaggccgcccacctacaggggcgtccgggctaggggagcagacggagagcgggggcggctcctgactcctccgcgcgccggggccggggccgggccgggggctcggcccgctcagccaatgggcgccgcgctcgggccccctcccccgcaccgggaggggccgaggctgggctgctgctgccgaggtcgtgtgcgacgtgccgctcccgggccctgtgtccccagccccagcagggccgcgtggacggcgcggcgcccccggaaggaggccatgtgctcagtgccggcgccaactacgcacgcggcgccctccggcccgctagatccgaagcccatccccactgcggccagcggcccggcggggcgctgcgctcgggacccgcaccgagccaggctcggagaggcgcgcggcccgccccgggcgcacagcgcagcggggcggcgggggaggccctggccggcgtaaggcgggcaggagtctgcgcctttgttcctggcgggagggcccgcgggcgcgcgactcaccttgctgctgggctccatggcagcgctgcgctggtggctctggctgcgccgggtacgcgggtggcgacgggcgtgcgagcggcgctctcccgctcaggctcgtgctccggtccggggactcccactgcgactctgactccgacccccgtcgtttggtctcctgctccctggcgtgctcactcggggacccgcgactagcgaccggcacgctcgctgttgctacctcttgcctcttgccagagagcgcgcggaccgtagcgtttataggaccccggccattggctggcgacgccggtgtgtcaggggtgtgtgggcaggacctcggggcggggcctggggcccagcctgtcctgggcggcgctctgcggggagggggtgaggggagtggccggggccggggccccccctaaccactgcctcgctcaggctgccgatcggctcgttctctctgcgttgggaccgcggagggcattcgctgtgtgactcagggcaagtgtgcgcacctctctgagcctccgcggccttctctagcaaaatggtggagccggtacccggctgtaaggcaagctgggatgcgcggagtagcgggtggaaagctggactggagttctcactcggccgctgggtgacttcggtgcactagggatagtaacagtaccacctcgtagggttgtagaaagaccaagtgagttaatatttgtaaagtgtttagaacagcgtctactgcatggaaagtagtatttatttgttagagagactccaggaggtcttgcccagggattgacttctcccttccctgtctccaccccccacattcccgtttgtgagccaagccttgcttttgcaccggccgggctctcttgcctggaaatgcatacccatctcaaacctgggctttaaaatcacctcctctgggacgccttcctctacttctcacagttcaggtgagtctatggtgacctgtaagtgtggaaaatatgaaaggcaggctaactgactgacatgataggacattaaggacatgatagacctcgggtttgaaccagctcaactgtatactggcccggccgcgatcctgggcgagttcctggccagtgaggctgttttcgttttt

SEQ ID NO: 33619 - DNA, 1868 bp, Homo sapiens
tcttattttggctcctctcctctgagctcgtcttggctgtgactgtggctgagagctcacctaggaggttttctaggcacttccatgctgcaccctggcctccaccccacccaatgcccacctcccttctccacatacccgattcctcttttctacaccatctttatccagagcacacctgtgtcccctgcctcactcctctcatcagccccttggccctctagaccttcatccacatcatcttacctctcctgagccactttcccttctctcttccattcccaactctcatttcacctgactttgttttgctcctttgtattctgctacccatatctcgtggccacgcctcatctgatttttctggtgcctcaggtccctacccttatctcttgtgtcccaagttagccacaacgtcccagagctggcctcactctggtttaataagcgcctcacacccacctccctggatccttcataggctgttcagagagcctgaccccattactgccgcctccacacaggcacgttatcaggactgccagtcgggattcttctgccagatttctgtttgggtatcagtatcatctgaggcaattaatgtgaattagtatcaaaagggaacatcagaatcacatttataaagcacgtacctttttatgttcacatttctttattgccataattaaaatactggaatgggaacaggttgcagttagattgaaacaaaccagttcccagcttggccagttcatacacagctgggcagagcgcactgtgattcaggccagacccaggcagggctggtctcatgtcatcttacgaccagtccctgctgaaaagcagcccagtccatctaccctttgccctactccttggccatgaaagccatcggaggcccagagatagaagtgcctccagctggtggagccctgagacaccagcagccgcacactgagccactgcttagggcctggagtacctagagcatggagagccccctggggctctggagtgcagtgagcagggaagggaaaccaggatgacagcaggagcagttgtcagctgctgacatcacctagcaccctctgtgccctgtcaccagagtacaggcctgaggaactgggtccctctctccatgccaagcagccaaagcaaacatcgatgtaggaggaggaagatcacaggctagccagagggtgtgagcgtcagcatgaggctgctggggcgggcatcctgtcctcttctgcttccctatgccccggagggtgctgggccagggtggggtagaaagcagaggagacccaagcggcctcctgcccagccctgccactccctgatggctggcagagggagccatcaacaaatgaagtcccgggaagaacattttctccagcagcattgtaacctatgtgctagggagtcctgtggatccaaataagtaactccagcaactgcagggagtaagaaggggcccagggtggggggtgtgtggcagggggtgcgggtctccgggtccctaccccttcaaccagaaagagactgcttgctgctaacagtggagctctttttgttggaaaaaagtctggaagatttaaaaaaaagaaaagttttcaaaaccactgtgccgaccctggtttaccctgctccaccactcctctgccaggagaccttgggtaaattccttaactcaaggagccaccttgcctatatgtaaaacagggaagaaaacaccaacctgagagtggggggttcctgcaagattgaatgggacaaccacataaggcactaggcactggcctggtacagaataagtgctaaaaaaaaaaaaaaaaaaaaaaaaaaaggcaatttccagccgggcgcag

SEQ ID NO: 33620 - DNA, 1137 bp, Homo sapiens
ggtgtagatctgtgctttagatgaagcatttctggaggaaaagaatcattgcggtgtctctagcccgacccctgctcccttctgggttccacaggtacctccccacagcagaggaccgtttgtcacagctcagggagaacagtgcttaagaccatcctgttctctgggctctgactccgtagccaccactcgtgagataatgtcccaagtagaagcacagtttgttcctggcacaggtccattttatgtagatttggcctgcaactgccttttctggtatacagaccctcaggtgctttgcaactgaaagtgtggtctggcctgcagaccagcagcagcatctcttggaagcccagtgcaggatttcagggcccattccagacctatgagtcagaggggcatctaacaaggtggtcaggtgatgtatttgtatggtcatacacgaggaactgctgtagacaagctgactactgtggctgtgggctctaagagcaaagtggccagtctctttgggcccttggggatggggctcctccttggggtacttgtgctgggtgtgaaatggaaggcagagatttgaggtgtgggaaaagaggaaagagactgtttggtcccagggtgcagagcctgcaccacctggcccccagcaagcttcgtcctcactcctgtcgactcccctcctttcactctgcattccagtgatgcaggactgttgcaggtctcccccacccccatcagctgtgtcacattctgtgcctttgcttctgctgttctagttgtctgggacaccctttaccctctccttggtgactccttcaagcctcagcccaggggtcaattcctaggaatccaccctagtcattcaggcagaaggaagcatctttcctctaggcccactcctccatcacagcaaggtggccaccatgttaaactgtacccacaccccgcactaaactgtaaactcctcaagagcagaagctaagatttacactctctatactctaggattaacatagtatctccataatattggatgactacattataggtactcaataaacatttattagatgaatggttggttggatggatggatggatggatggatggatatttgtcaaacacaaataagagaag

SEQ ID NO: 33621 - DNA, 2042 bp, Homo sapiens
attatttatttggcgaatgacacaaaaagcacaggcaacgaaataaaaaatagataagttgtttgtgagatttgcagcaatgtaagcaatgcaggcatgtatgtgagatttggctccatactaaatctggcatcatgcttaattgtattaaaaacctgaacatattttgttttcgagtacatacatgacggcccatcagtgataaacagcttgagattaaaaattactagaaagtctcaccttttttattactacttaatccaagtgaatgtcactttaaattagtttgagagaaattctaatcaatataatttccttaaggacaaggccaatgtttcctgaacattaaaactttgtacccatatcacagttcttcttcattaaaggaaaagatctaaaaccaacacaaactattgattcaagtgactcacactagaaacaaacaccactcaaacagttccactttcatccacctctccaaacaacaatatataatgtactatttctgttcagaacttataaaagccttccactagaaactaaagaacatggatgattttatacatatgcatacacaagcaaaacacaaaagagaacaaacagcaaacaaataaaaattagaagcaaaacaaacaggaaaccaaccccaacatttccccactcagtctaccctggagactaccatgttacccagagcccaaaaaaccacatgatgaatattttattcttcatacacaattcaatatccttaagtccaccaatatcaccatacatcctgtgcaatcaagaaattcaccctaggtacatgacctattagtaagtactccagtgccagcactattgatgcaaaacagcaaacatagtgtgaagcaatacaggcatgtatgtgagatttggcttcacactaaatctggcttcatgcttaactgtattaaaaaagaactgccaaaccgccaatgcatttgtttaaaatatttcttattttgccttcatcaagactaagaattttaactatgaaagtgttaattatccaaatttctccaattctttataaggttttaaagaatattttattatctaaactttctaatttctctgtatgtgcaaagaaacaaacaaacgaaaactacatatgacttacacagaccatgcgtgacatgcttaagctttccatccagtcccagattttattcttcttcatttttctttaaagaaccagtcatttggccaggtgcggtggctcatgcctgtaatcccaacactttgggaggccaacgtgggtggatcacgaggtcaggagatcgagaccatcctggctaacatggtgaaaccctgtctctactaaaaatacaaaaaattagccgggcgtggtggcaggcacctgtagtcccagctactcgggaggtagccactcagctactgaagcaggagaatggcgtgaacccaggaggcagagcttgcagtgagccaagattgcactgctgcactccagcctgggtgacagagcaagactctgtctcaaaaaaaaaaaaaaaaaaaaaacagttattttgctccaggacaaaaattcatcatacaaaattctttctcatacaaacttactatcttctctttataaccttccttaccaaaaaatatatcttcatatccataactttcttcacatctctctcccctacattgtttcataaaaaaattttcttttttttttttttttgagacagagtctcgctctgtcgcccaggctggagtgcagtggcgcaatctcggctcactgcaagccctgcctcccgggttgacaccattctcctgcctcagcctccctcgtagctgggactacaggcacgtgccaccagacctggctaatttttttttgtatttttagtagagatggggtttcaccatgttatccaggatggtcttgatctcctgacttcgtaatctgcctgcctcagcctcccaaagtgctgggattacagacatgagccacagtacccggccataaaaaaattttcatgtccataatttgaattaacttttaa

SEQ ID NO: 33622 - DNA, 934 bp, Homo sapiens
cccaaacaaaaatgtatgctgacaatttcattctaccaataattttaaagccggtttgtttagtaaagatttacataagtcacgtgaacttgaaaattgcttggactttttcacctaacgtatgagtgctcttttacttataagccagtttggtagacacaacatgtaacaataagtgtacatacaaatagacacatacaagtagacacacacacaaacgaaaatccaataattttaccttagaactctagccatgaaatgccaatacaagcgtactggttttacatggttatacgttgtttgccccaatagttaatccagtgaagaatgtgaaccaaaattttgggtaaagcagtgtccatggcagtttgatttttaaaggccaaacttccccggactccaaagaacactggggctaaacagcaccgaaggaaaacatcacatattaaccaggcccaactctgcttagaacagcagcacaaaagcctggatccatgcaactccatcccacttttccattcagcagcaaagtccagattccaaacaagattggggccaaatagtattgcaaaagaatatcaagttggctaaattctgatttcccatgactatatcaaacacacacaatcaccaaaacactatccaactgctgcagcaacaaacaagcccctagtgtccaaactgaaacagccagagtgcaccctttctctactggttgggcttgatcgacctgcaaatggaaattccataaagaatttcccaaattgagaggagctgatcccactgtctggtacccaaaagagacactcacttgccgggacacaacacacaattacaaacaagtcctcaagagtgtccatactgaaacagtcagggtgcttccctctcagtcagttggtcttgttccacctacaaatggaaattcctttaaaat

SEQ ID NO: 33623 - DNA, 1732 bp, Homo sapiens
agtggcttggaccaggatgatggcagtggggaggaagacacgtgaactcttcggacttaaggactggtgagggttagccaaaccaaggtgcatggagcaggggcctgggaagaagaaaaatgcactagagactggagctttcctgaagaccagaaggaaattcttaatggctaggacatatcaatattcaagtgatagattttttaactgcaaaatgacttagaatcgagatgtcacattccacgtacaagatggaccttggttctcagacaaggaaatccaaaccaaagaggagtaaagtgactggcacgtagtcacacaggcaggggtggggctgcaggccagtcggcccagtgactccaaaggtgctgctcttacgcactgcactggagagatgcccaaacaaaacactgtaggccaagtgaaggttataggaacttgaaaccctgagagtctaaatcagaagttaaaggagtggaaactcccaggctaagctaacctaagcctaacctaaacctggatgctgtccagctggtgaggaggaagtatgggccaagggagggccccaccctagcagaacctggcaccttggccagcaggtcaacaaggtcttttcttggctgcacaggggtgcacacagcttcttgttagtaaatgtagggccagaggttcaatcttgcttatgtctccatgttctgtcttcagtgcttgctcctaatccacccatcgggaggcattggttctctagcatctgagacctccctctacttttgtctatccagactccgtggggaaactgaaggcattcaccccattggtgcccccttttccttcacgagtctcttcatccagtttactgcttcagccccgacagtgctggagtgggcctagcagtcacctcctcctgtaagcagccttagggcccctgctggtcactcaagtgactaggcattggcacacagactccactcttgctctcccggttgcagtccatcattgagctctaggtactcattcaattctggtgtgatgactggtgcctttggggagtgctgtgcctctttggtataatagcctccagaattcctcactgggccctctcaccttctagagttttggcatcagctgtggccaagcagtgtgggctacctagctgaggctcccctggtgtcctgctatctcaacactgaaaagcctgccctacagaaggttctagcatcactgtcctgcttcttatacaaaatatggccagccattgctggtcccaggaggtacctgagggcctgggaacatctgtgtgcccaggcaggacccccttataatcattcctctgcattcggagtgagaagtgaaagggaagacatcttagggccaggaacgggggttcactctttctgaactcccatggggtgagctctcctagaccactggggttcaagggcctacttaggcttcaagcatgtctaagatgtgcccagactgccctgagctgaggtaggctggggagcagatttccaagaaaataagcctgccctgtgcacctggaagcaggagggactagcatgactaatcacctacgatgaccagtagaatacaagaatttgtatatgttgctcgtctgctatgtgtcacatggtgggatttggcaggggctacaaataggaattagtgctagccacctaatgcatgtattaatatattaagtgtattataagtggaactatgagaatgt

SEQ ID NO: 33624 - DNA, 744 bp, Homo sapiens
agagtgatagtgctgaggagaaacataaggaaataaaacacaagggcaggggataggaagtactgggaggttgcaatttgagatgaggtggccaacaagtctccctgagaagatgccatttgagaacattcctgaaggagggagggagggagggagccatgtgggtcagaagcattccaggcagatggagctgctggtgcagaggctctgaggcaataggaatgaagccagagagggccttatggcggtgggaggactctgttcctctgaggaaggcgggctgctggagggactctgcacctcctaactgaatcactcgggccactgggttgagaacagcctgtggtgggaacatggcagaagctgggagacagccccacagcctctgtgttctccccacagtactcccattcaccaccttcttgtggatctgcgggtggttcgtccgcaccttccgctttgtgcccacggccacctcctcctcctgaccttcaccgtcaccaatctgaattaccccaacaacctctgctttggggacagagttcaacagccctgtgaagagcctgcctttccacttgactccaagttacttgataagacccagaactagaatagagacttgcccaatcaatgtttaaaccaacgaagcttttaggtgttgtttctcccatccaaaaatttcccttcaaacccctaagggaaggggtaaaggaaggaaaatttcatgggtcccctgctgcagct

SEQ ID NO: 33625 - DNA, 1706 bp, Homo sapiens
accctcccagccaaaccccctccatagacaaatccatccatctgccttggatgcgcccgccccactgtgagtggccattagagaaatctgtacagccagacagcctgctgtcactgcgaactcctctatcaagttctcagctgaggccaggcacggtggctcacgcctgtaatccccgcacttttggaagctgaggcgggtggattgcttgagcccaggagctcaagaccagcctgggtaacatggcaaaaaccccgtctctaccaaaaatacaaaaaagaagttctcagctgaatctgcactgcggctcctcagtgacactgccttttcctggttggctcctgctcctaccgtgactctgaagttctctccaccctcttcaccacccccaacccccacatcctcccaccccaaacaccactctcagcaaaagacagcctcctctcttcatgagaaggcgagagcccgtgacaggagcccctcaccacggcccccaccaaatctatcctcacttactcctacttgtccaatggccttggcagcccagcagaggaatttggactttgtcctcaggacactggaaaacatggaaagactttcgccaggggagtagggtactgtggccagaataggatttgggacttgctggctgcggtgtggagccagggattggccttagaagaaaaagaatgagaagaaatggccaaacagcccgtctcggctggccactgagggacgagaagaagttggcccagctagagaggttaggaagagtatcccagaaagaaggaatagcacaaagaagggtccagacctggaaatctaaactggcattggatgaaggaaaaatccaaaacaagggctgatggagagacagcacagccttgtctggacctagaggctcccatcggtggcagtgaggtggagagaggagcttgacacatgtccctcctgggtttaacattcaaactctaggttctcagccatgtcccttcatatctgagactggaagaatatgctctagaaactgccaaatctggtccagtccaggtggtcctcacatcacatccagtcacatctcacaggagaccttgggcctctggacactcaggtctcagaccttggaggagcttcctccaggccccaagggacctgcacatgccccgtcatactcagctcatgcaggagcacaaggacaggggctgccttcctgccttttgcaggggacctgtgagactcccctgggcatagccctggcagccaccccagatacctggagggcaatagaagctgagggccaggcccggccagagatgggacacaccagctctaccctcatgacctgctctcccaaaactggaccttgtaccctgggacttctcagccgctattcactgtagagggtaaaggtgggaggacccagcccaggcaagatgagagtccaacagccgagacagtccttctctgagtctatttcatcgttacttcaaggtgagataatggtgttattgcggagtgggcaaattgcagtgaacttgtttgagcctcatcttctcaatctataacatggattaagcagggctgttgtaagaaaatgctagaacagcctggtgtgatggctcacgcctgtaatcccagcactttgggaggtcgaggtgggcggatcacttgaggtcagaaggtcaagaccagcctggccaacatgg

SEQ ID NO: 33626 - DNA, 759 bp, Homo sapiens
gtgagctggtccttgcccttggtgcccgggccactggtgggcgacggtttcctgctgcgcctgtgggacgggacacgggggcaggagcggcgggagaacgtctcatccccccaggcccgcactgccctcctgacgggactcacgcctggcacccactaccagctggatgtgcagctctaccactgcaccctcctgggcccggcctcgccccctgcacacgtgcttctgccccccagtggtatgtgcaaggcgcaaggatagctgggggttgggggaggacgtgggacacagggacacatgagacctaggagacacgggaggctgtaggagattaatggacatggagaggacacaggacacacatagggtattaggcagacgtgaccccagcggggacatgggacttggggaagatccagggtaccaggaggacacagatcaccaggagcatgtggggagagcatggggaggtcagggttcatggcgagaaccagggtcatgggagggcatgagacttgcggaacacagggcatgggcggatgtggagaggacttgggatacaagaagtacaaggagaagcagaagcttgagggtgaaagtggcctgggggaatggagaggaattcagtctggtggggaggaggaagttggcagggtggcccctgtgcttggacccacagaggagggagcacagctagagcagatgtgtccagccccacagctacatagcccggtcctatctgagccttgccttccccca

SEQ ID NO: 33627 - DNA, 772 bp, Homo sapiens
aaagggttccagcattgttggggcttacattagtagaggggaggggaaaaggagggggagaaaagtaagtaaagaaataaaggaacaaagttataatagagactaaaggggggcgtgtggtgggtggggggtgggtgttgctaatttagactgagtggccaggaaaagcctcaccagggaggtgacagataagccgagatctaaatggcaagaaggaatgagtcacatgaagacctacagtcagagcaatccagggcaaaggcaaagtgcaaagatagcacatttggcatatctatggcacagaaagaaggcctgtgcggatgaagggtgataaactggcatgagaatcataagagatgagaatggcaaggcaaggagaaaccaaatcacagagtcctgtaggcctggtaaggggtttgggttttattccaagtgggatgaagagccactgaaggattttaagcagtaaacaatgacaatttgacttacatttttaaaagatatgtttctctgtgaataaataaataagagtagaagcagaatcaccagtcagaaatttgccttaatccaagcaaggaatgatagtggcttcatctaacatagcagtggtaaagatcaaaatcaatagtttgtgacattatattctggacattatcacatcaacatttttggaaacaaattctggtagctgtgtggagaacaacttgaaggtagtggcaaaaacagaagcagaaaagccagttaggagactattgtcataatctaatagcaa

SEQ ID NO: 33628 - DNA, 1728 bp, Homo sapiens
ccttactcatcaactaagttgatggcaataacgtactaatagtcctcaaattcctaccaggattgccttagactcatctgtgaccatccagccgtgtcatccatgcttttagcacactaaactactctgtggcacaaaaccaagcattaaatgcttctctggacttccgtggtgccttgcactaattaattgttgtgattatttacctgtttggatgtctttctcattagatatgtaagagacggtgttttattgctttctccccagtgcctaacccaatgtttggagtatcacacagttcataaatgtttgctgccttcctgcttgtacacatgatgcttgtaccccagcgcctaacgcaaatctggcatcctctgcagcatgagtattatttgtggcatggtctgtgtggctctgaatatatctgtttctgggggtgtccatcgcccgacctggagttgtgagaacacccggtagggtgtgcgtgtaccgggatccctgccgagggtgtacctgggtgttggtgttaggatacgtagctctctgaggtgaggtctgtgtctcaggaggtgggcctggcacgtttctctcgggcagagcgtgatcccgttagggagaggctctcggttagggcgctctatcctgttgctgggaagcgtgttttctgccggtggggctctttgtgggaatctccgaccgcctggggattcggagctgcaggatttgggtcaaacagacgctgggctatcgaagccccgacgccgggccaccgcacgcttctttgctcaggtgctggagccgcctctcggggcccgaggagggaccctggagctgcgcccgcgatctcgctaccgtttacagctgcgcgccaggctcaacggccccacctaccaaggtccctggagctcgtggtcggacccaactagggtggagaccgccaccgagaccggtgaggcaagccccggccgcaccaaagccgcacagcgcctgcgccagggactgggcgccgggtgcgagtggggcggggctcggagaggggcgaggcgcggggcgcggagaggggcggggccctgaccttgcgggccgacggctgcgcaggtgcccgcagtgcccaggggcggcgaggggcggggccagagtaggggctggctggatgagggcggggctccggcccgggtgggccgaagtctgaccctttttgtctcctagcctggatctccttggtgaccgctctgcatctagtgctgggcctcagcgccgtcctgggcctgctgctgctgaggtggcagtttcctgcacactacaggtaccgcccccgccaggcaggagactggcggtggaccaggtggagccgaaggcctgtaaacaggcattcttggttcgctctgtgaccccagatctccgtccaccgcccgtgcgcacctacggcttcgccacttcctgcacgtcacctctgggactcgccgcggctccttacactctaacacgcccactataccgcccacctcgaacagccccgcctcctgctgctcacctcggcgactaggccaccgtccacccttcagccaaactgcccactccacccccatccaatctgccgtcaggtcccacctcctaaacctagtccaaacaatggccccctttctctagccctacagacacgacctgactcactgaaacagaacctcttgcccctccgatctagcctcacacagccaccagaataat

SEQ ID NO: 33629 - DNA, 1138 bp, Homo sapiens
ctgctccacctctgagcacattcatacaattcactcaagtcattattagagcactagattgagtgcgagtcagacctggattcccacaaacttctttgtatgacctcgggcacatcccttccctgggcctccgtttctccatctgtaaaatatggatttgttgtcggggtggggaggctgcaccacgcacaggttagactaatggatctctaaggtcctcacatctttaaagccccaaggggataagccacagtgcctcctgtagggcagtctaagcttatcttccagataggcaggtttgaataccgatcctttttcttgaccttaaggaattcattcacccttttcaacctcattttccctgtttgtaaaacaacagcaaacgagacaaacacacgttacttcctttctagcagggttcctacccggcgccaagcaaaagtggaatgtaccctaagtagctctggccttcttcctgctcccaagcttcccaattccgtcccctgccccgctgccgcccgcggctctccttccccttctaggaacggctcaagcgccttgggcactccatcgggttctgcaccgagttctgcatcataaatacgactctcgtgtaggatttaagtgtgaacttctgcaggttctcggaccctgaagcacccggggccagacattccgagctcgcggcggtggaaggcacgcaaaagggcgaaccgagacgactccaggacgctgaggcagcgcaggccccacccggccccgccctgccccgccctgtcccggccggctttccagtactagtcctctggcgccggctcccagcccctctcgtacccttcaaatcgcgctccgccgctagactctcgtgatagctgagactttccccggaaggcccgcccccttcgccggagaggccaatgggctagggcaacggttgcgacggttggattttgaaggagccaataggcgctcggagcggagagtttaagaggcgtaagccaggcgtgttaaagccggtcggaactgctccggagggcacggtgagaggtggtggggctgagccgaggtggggccgtggccagggggagggggtgctaggccggaaggggctgcagccgagggtggccctgattttgtg

SEQ ID NO: 33630 - DNA, 3001 bp, Homo sapiens
tagatctggcagcagccccgccctctgcccgcccctgctgtactgtgcagggggtggagggtgggtccgggccacaggtcagtgcctgggggagcaggacccaccaggattgggaaagccaagtaaagccccagactcgccacccacccacccacgtgggaccagcctgatgagctaaggtcctagattctgagccagaaacctcctctgaccccagccccagccccagccctggcccaaagcactgctgaaaatccacacccagcatcctctcctaagccggccataactgctcagtttgtcctacttcagaatgggtacaatcactcttcccttcctgggaagggcagggaagccagtggcatgtgaaggggttggggagtgggggaggtcgcaggaatcttcccctccctcagggaggggccccgttgggctaggccccctccccctcagggcctgaaggaatgtcgggggaaggctcccagggacacaaaagcctctggccagacccaggagagcatggtactgacagtccctgagggacaaggcattcttggaacagagcagggcccagggcagcaggtgccccagactccctgcttccagagaagcacctctgcagatgccaagtgaagaggcgcacctctgacacctccctgccccgcacacccctcacctccaggaggcccggcttctttaggcccaccgtggtcaggccccaagcctgcggtccacacccacctctcacctagctctccacccccaacagcgaaggtgccacgccgagggctggcacacacgtctcctgcctgacacaccacgcaacacctccgtgggctgacacgcatggctcccggccctcacgcagctcggccaccgcccaggcacacgcacgggctcacccgcggggccactcacacacgtgtgcgcgctgcctggccacgctcggatcccctccttacttgctcccccaccatcgggcttgctggccgcccatcgccggcagggcccaggccggggcgagggcgccaacacaggttcctccctgacacatgggagccagccagcctgttatctctcaaccaccagcccccaatatcaacccacacacccggcaggccaggagggaccaaggctcctgggaggacctctccccaagctgcaggaaaatctgggtgtgtctctcgtcggggaactcagcccgtcccttccttcctttaagatggatggaagggaaaaggtgcctggcaaagttagggtagcggggggagggaggggagaggaggagggagagaggtaaatgcaggggtggtggaggaaggcccgggtgtaggcaaatgggggccagagacgggggtgtgggggagggagggtgctggcgaggcccggccccagggagctgggacctcccacccactggccccgggaacaccctcgcccacagcctgggcagggcagggcagggctgggccgggctgggccgggctggccaggcagggggcgccggcacgtggagagtccgtggaaggtccagactcacccgtaggggccaggcgggcaacggcggagcgctcggagggagcagggccagagagaagtccccggggccagcctgcctgcctgccacttcctcatctgctgggccgactttctgtcaccagagggggaggggcgggccgcgcggggggcgcccgctgattgggcggccggcagggccggaggccggcagcgcaggctcggccggggcgggggcaggggcgtgccgccgggtcccagcaggaagcgccgcggcccgggcttcccaccccttccctcgccgcccgggcccgccctggccagttgcagcggcctggccacctcaggagcacgctgtctcttcccgacgtgcagcccggggcccggccctgtccccgggtgactgctccccggcaggactgcacatctgtggcggcaggcccagctcagggctcgggggaggttcggccttgccttcaaagagctccctctcctgcagggcgagcgcagagcggcgggcgagaccacactgcgtgtgctgagggcgcactggtcttagcgggagggaagcctcacgagcctgtacacttggaggagccctaagcgttaggatctgctgcgagggctgcctggaacggaggtgagaggatacaagtggcccggggcaagcatagtgaatcactggctaatctggccttcgaggtagtgaaaggaaaaaagggaaatgaagctgactgtggctgaatgtagtaggtcttgaaggccaaatggggcgatctgatttttattctagaagcagaggagaaactaaagatttttttaggagactatattcaagcttgtatcattagttcatcagacgtttatggaccacccaccgtccgtgcactcacggggcttgcagtctatctggctgaatcactttggcagccagtgtgaggagggcacagaaaggagaccaggtgagaaagccagcctgaccaaagaagatgtggcaactgatgggattggaggaggcggacaatgtcctccagacagctggactggctctctatatatttatttatctcttctacacctccagcccccacctccacactcactaactggactcaactagtgggggcaaaggacagactagattttagtgaaatggaatttctacctccagcggcccctggaacagtagcacacaacgatctaacaactgcttgtatgattggatggtgtaagtgcggacagaattagggaatttgggctactctgggcacactgcttatggggcagccctgctccgcaaggaaaataaacacatttttttaaaaaaaggccgggcgcggtggctcacgcctgtaatcccagcactttgggaggccaaggcaggcggatcacgaggtcaggagatcgagaccatcctggctaacacggtgaaaccccatctctactaaaaatacaaaaaattagccgggcgtggtggcgggcgtct

SEQ ID NO: 33631 - DNA, 2379 bp, Homo sapiens
ctgaggcaggagaaccacttgaaggcaggaggcggaggttgcagtgagctgaggttgtaccactgcactccagcctgggcgacaagagcgagactccatctcaaaaaaaaaaaaaagaaagaaaaaaaaggacactttctaggaagcagggaaaggcattctaagtggagcgaagcatgtatgtgaaggcatagaagcaagagatgtggcgggtttgggaacgctaagtagtttggtatgactccagttcagagggcatatgggagggcaagaaaggtaggcatgagtcagtttatgaagagccttgtatgccacagcaagaagactggattttattctgtatatgtttttcagccctggctgcaactagaatcaactggggagcttttaaaatatcagtgcctggctctcacctccagattgatgctagatggttgttcttaatgggaagaggccaaagcatgtttatatgctgtatggagagtgacaatgggatccagcatacacatgaagagagtagcctctggctaaggagaacggaaatagagtaagttcgtcagtggaatgggaggaaattgagggagttttgtctaaaggagtctattttttccttcagtcagatgttaggtagttgctgaacatgggggatgggtaggtgatgggataaagaattgtagggaagtggttcactctggagtaactgatgatggaatgctgggaaagcttagtgaacagctaagtggaaggccccactgggtgggagaccataaggagtgtaccagtttagaaggctgtgatgttttccgcagagctaagtgagtgggagtcaggagagcagaaataggaccatttgggatctgcagggaagcgagatggaaggccttgcttgggagagggttcagtgaaggctgagtagatgaaactaaaccaagggtacactgataaactggataaactgaagaggtcaaggaactcataggtttgataaggatgaaggccaggtgtagtggggaaagaaaacccagtccaacaactaaaattccatccatttcatggagccttcctgactaatgggaaatgaggtggcaacttcccccaggtcccaccctgtctgactcactcctcactcactgctcttcaaagggcccgtctccatcctctttctcaagaagagaaaccatggatgttgtttctaaaagttcagcctgaaaaccactgtctgtatgaactcaattcccatgattttttgaggctttatatgtttcagcacaaatattaaatggaggtaggatagagaagcagaaatggcaatgaggaaaaaaatggaaaaaggtatgcctgcatgttcatgagtgagtcagcagaagagtggagggaaaagacaataagacacggggtatcagctatgaataggaactgaaggtccagattgaagggcaacagaactggcaggtggagatggaagcagcctcctgggggctgtgtcaagcttctccattctccatcctgtaaaggacaaaggacacttcctacacagtacccacacagaagagctgatgggagggttagcctgtgaggacgagagagtgaagatgagggcaaagggtttgccagttaataattctgcatgtttcttgggccccagccagctagctggtatcctcttccaaagcaggctgggaccttggctgaaggaaccagggctggaaagacatcgggctggcagaggggagagactgcatgcaaacattctttgtatcttctgcaatttgagagttggcctggaaccctgaaagtcagggccaatgtctgatccatcagtgggtaaccagtgcctacatactatgggtatcattcactgttcattgaactgaacaaaagaaacttaggaacggggaaagggatgtgatagaacctgcaggaaaagctccggagagaaaggagaggctttttgttagggggcaaaccaggggatgctatcaagatggaggaaagggagttagcaagatccagaagacacgtgagaaggaccaagaggggaatgagaagcttataattctattagtactttttctggcaaggatgaagccagctgcattccctatgttcgaatgtttccatcctgtcaggtaagttctatgatcacctcttaatagataaaaaaaaaactggaatcagaggttgaaggctttgctcaaggtcacagaccgggtaaggtgaaagcaacacaggtgtttcaggctgaggaaaaagcacagacaaaggaatggatataggaaaacacaggacaggtagagaattgcaagggattctgtttggctaaagcaacagtccccaacctttttggcaccagggaccagtttcgttttgtggaagaca

SEQ ID NO: 33632 - DNA, 1531 bp, Homo sapiens
tctgggaaatctgcctactcatgaagacttctctgaacaccagtcctgctctcccctttccctcccccaaccaacgactccagctttccatctgctctcatcattttgtttcaaccttctccttgctgaattaatatgcaatcatctatctctgtgtcaatattcccgtgcctctttcacaagctcagtcaacccattaacatttattgagactaccagctgcaagaaactaagtgacaaatgaaaaacaaaaaccacacatgcttctaagcactggacaaacaaattaaaatgctgggggtctgcaaagcatttccttcccatcggtggtctcctgttttactccatttcttcacccttaacaactatagggcacaggctgggaagagggatgcaaaactgtcttgcaaacctgcctgacagaaacttgatcccgggttccaccatggcctctgattataagctgcttagctttcagccatcgcggcccacaattccctcactgcttgggcttctttccaattagatcccctgctatatcggcaaccaacagcctccatccagcagcttaggacagggcctgagccaacccaccaccttcttgagccgtcttccttggactgcatctcagcctccccgtattacaacctaatcctttcccacgccaagcaaacaggtgctgcctcctccctccggatttagcccgactgtctcctgtcaggcaagctccacccccacctctaatcgccgccgctcccgctccaattagcctcgccccccagcccacattcccttatcagccgtgggttctgccctctcttctcagtcccaactcttcattctccttagccagcccactctcggtccctgtacccgaagcttgccagccgctagtacgcccaacgcaactctcacctgcattgcggcggccgaggcggctgccacgatttcacttccggttttccagtcagcaaacgcctacgagaaggcttcgtccaccaatcagaaaactggaactcggccctcccaccaacttccggttcctgctgggtgccgaggtagcgaggtcaggggtcaagagtggaacaccctcactggcccgggccggcgcgggagggctgtgtgatggcctcggagcgcccggagccggaggtgaggggcgggcgggcgcagcactgggccccgagatccgagggggagggtccggcgggcaggcgtggcgttggcctcctctaggtctgggggtggccgggctgcgtagcctcggcagggaccagcccagcccggaaggcccgactatggtacccctgcggactgtgtatgggacgcggtccgcagtttcctcggggagctaaaggagtaactgttcgctttgttttgtttactgacatgtcacccgcgtcgtcgtctctaagacttatagcggtgttaacaaaacttgtattttgactttctgttgcagtttcaatgggcaacacggcagtagatttactttgctggtttttgcatttctttaggcattggaatacca

SEQ ID NO: 33633 - DNA, 1608 bp, Homo sapiens
cctacctggactctgagggacttcgacaccaggatgactttgatgtgtctctgcttgtctgtcactgtgctgcaccctttgaggagcaaggagaggctgagcggcacgttctgcggtcagcagatcccctaccttgaacatgcccatttcccagcctgccccaccctgccctgtgtgtctcttgctacaaccaccactctcctgccctgctccccaccccaggctacagttcttcgtggtgctcaccagccagcgagagctcttccccaggctcactgctgacatgcgccgcttccggaagccacccagactgccccctgagccagaggctcctgggagttcagctggcagccctggggaggcctcagggcttattctagcgcctggaccggctcctctgttcccaccactggctgcagaggtgggcatggcacgagcacggctggctcagctggtgcggctggctggagggcactgccgtcgggacaccctttggaagcgcctcttcttgctggagccaccggggcctgatcgactgcggctaggggggcgcctggccctggcagagctggaggaactcctagaagcagtccatgccaaatccattggggacatcgacccccagctggtaaggaactgtgggctcccgaaagagctgggataggtgccaggaattccactggcagccagggcagagggcacaggaatctgaggtgactggcacagaagactcaggcctgtggctcctccctcaggactgcttcctatccatgacggtctcctggtaccagagcctgatcaaagttctcctaagccgcttcccccagagctgtcgccatttccaaagcccagacttgggaactcagtacctggtaagtccccttgagcttcctctgaaaagggaaacacagcagaaatcctcaccaaacagatgtgcccctcagcctgaccaaacaagctctgctctggagggaggcctagacagaacgggactacacagatacatgtaaaacccttccagtaccgggcatcgagctacagcatgtgattctctgagcagctctgccctcaaagactcaccaagaatacaagccttggcttgagatcctgagggccaggctctggaactgacaacccaaggagctgtcagaactttgtcagtaggctggagccccagaaaggaccccttggactttgaagccttgttacttaaagtgtggtccacagaccagcagccgcagcacctgggagcttgctgaaatgcaggctctccggccacatttcagactgttgactcgggatctgcaggttgacagtctccccaggtgatttgtgtgcacactgaggcgtgaaagcactgctgtaaaggacaggtagagagaactgtggtggtggacacgagcacagggcattaaggagcccacagagatgggcccagccagagctgaggttcaagagaggaggcattacaagagaagacttcaagtgagaaagtaggaggtggagccaggtgaggggtcctgcagcacagtgcttgtgcagaggattcatttcagggtgcaggaagggtctcccagagaagccaaggtcagttaggatgaggctgca

SEQ ID NO: 33634 - DNA, 2840 bp, Homo sapiens
tgactgctattcgatcagctccctggggtactcggccagccatcaggtggatcctgtggggaagatggactggaggccttgcctcccttggctctctctgcacctcttccaggattccctgactgtgccagccctcgtccgtctccccaggtctccagtccatggcacctgggtcacgatgcccaggtatcccagcactttcagagacacttcagtgatggctgaggggcaagccctttcccagacatctcagtgtccacccaccgcctcctgcctccagtactttccaaaacctttccttccctcggtccttctccgcaacctgtaacctgctaaattctcacctttaaaaattgtcctgacctttgcttgcccttctcaggtattccatgctgctgtctctacttcctctcctcgcatctacttagccttttcccatctgttttctgcccccaccattgaccagtagtgatcccctcttgccagttccttctgagcctgtttggcctctgcaggatttgacatttgaatcagccccactttgagccgtccacctcctcccatcatcccctgatcttagccacatccagctccaagcagacattccaggcctccccatcccaacaggctacatacatgtccagcctcaggaacgctgccaaatacaccaggcctcctcttgccacagcacccttgcaaggaacactcaacttcctgcccatcaagcaatgcccactccttgaagacagtccaagcatcactacctgtaagcagctttctctgatccagacagggttaggtgcctaccctgctcccacagcttcctggaataggcctgtcctcaaatgcatcactgtatatatttactctcctatctgcctaggcagactgagctcccagcatgggatcccagcatggggtgagcatgaaagagtggcaaacagagtggcataagacagataaaatacaaaaggcaatttacaaaggaccaggaccgcagaggcagagataaaccagtgggctcagacttctgagcgtctcagatctggcgtcctcgactccctgaacctgcatcagggtcatgggtcacaggggtgggggtggggtggagcggggtacctgggacagcccagggctttggcataccgcacggcctgctccagtccctctcggaaggccgcctgtctcccggggacggcccccagccccatttcccccttctcttggtctcctgcagagagaacgggcctcagcccccggctcggacactcccctgcccgcgccccggcaccccccagccctcccagccctcccggcccgcgacgcacccgggggcgtgttgatcagtacaagccgcagccccgcttctcgcgcggcgcgcgccagcgcctcaggcgtctccgcgtacggccaggccacctcgacggcctcgaagcccgagctgcccgcggcccgcacccgcgcggggaggccggagagctcggggaatagccaggacagattggcggagaagcgcagcggcgccatgcctggggaggccgggccgggcggagtccgcgggatccaaaggcggcgggcggcgggcggcgggcggcgggcgggggcggggctctccttgctggccctgcgaacgaacgagcactgttcgtggttagaaaagcgaagtgctgtaaaaacccgggccttcacgaaaagcgcctacggttagcgagagagggatcacggggagaggcgaaggggcggagcgagggcggccggaaaaggagcaggacccgcgcctggagaaggtagggaggccgagctccagggcctgagagccggacgcgaagcaagagagagctggctgcccgagggcccggttgcaatgatgggacgcgcactttaatactgagtctttcctctgattataaaaatgctatctgttcgttaagcaacatttgaaagctgtatgaccaaataaagaagcacttttataccgccagttatcacaccactagcctgttggctttcccgtccaaattttaaaatatgcaatttttttctttggaaattctgatcattcggtatatgctgttttatagctctttttcatggaatattattttgtgagcatttcctcgtgttttccaatagccttcaaagtcagtgccttcgctgctcattgtcgcacacctaagcagcaagtcattattgtactttgtggttggatatcgtgtgtgtgcacgcgcgctgcaagcgcactttcaggcacttcttagtccctatctctgactcttttccgagtctttttctagagatgtccatcacagtgtttgcccgttcacgccgctagtcttttgcaagggaaaccgccccattggagcagctatgggtgagctgtccctttttagccttagcctcagctgattggaccagggaggtcatctgatcccagggcagccaatccatagactggccaaaaacctcttacttgcgtcgtttggaaaggtaatttaaccaatcaagagttcaaacaaggaaatgctgagagtcaacaggtggtgttgccagaaggtgactgggctgtagaaacgaaataagacagtcctatggtaaagaaaagctagagcggaaaggaggggaaccaagtcctgtgaatagaggtagcaccctgagaaacccatgtcatcccaagggtgcccaaacccatagctgcccccaggtctgtgcacttaaggctgggatgcttagactttcctgggtttctgtctctgtatagcctcttaatgtttcttgagataatttgaatgattttactttcatctacaataacccaactgattgggcaggttcttatgggt

SEQ ID NO: 33635 - DNA, 3047 bp, Homo sapiens
acatgaggatctaatggatctattaagtcagggagtgggggggtctcaaattttagtgcaaatcagaatcacctggaagccttattaaaacacagatttctgggtctcacccctacagtttctgattctatagatctgaggttaggcccaagaatttgcgtttctaacaagttctcagatgatgctgatgctgttggtccagggaccacacctagagaagtggctgtctaccatcctcccaatccactccctgacctttcccttgactaccctgactgtccacctaggcggggttttgcacgtctttaagagtacagctagctttttctggagcaggccttctactttgttatgggcctgaaggtaataagaggtaagggaggggacctgaggagagttagcattagcatatggggcaactgccctgggaacaatgattgtaaggcttttatgcagaggagagatagctccttcagccagaataaaaggtttagaggagaacagaggttcaaaagtctcagcccaatcaggcctgcctttcaggcatcctgtatccccttcctgtatctgagagtcctccccgagaaccttgccttggcataaaagacttggccgcgttatgcatttaattgctgctgcaaatctacaactttaacagtcagaccatagacttagttcttagccatatttacccttcaattaccggaaataaggaacccctcagggccaccatggaggcattctggttttccatgcgtctttttaattgtatttccatagccttgattttctctttttccctatataaatttcttaggatagtaaaaagaatccagttgtttctactattttttaatcactgttgttgccatagcaattaagtgccggcgctacttgatctcttaatgccttgcccatcacctgcattccctcccatgctcccaccattgataatgtgggtaatgatgatgtcaccacatgccatggattactcacttcctcattcttccccagcaaggttatcgctgtgttcctcaaatacatgagcaacggaattccagaatcccattttgaggaactattttctgatttcacaatggctatgtcagtctgagttcaaataggaaacagatggcacactgaaattagtataattcaaggaggcttttatgaaggggccatttatgaaggtttggacagggtatcagggactcacaaaggataatgtaatcatccagaactaataacagcagaattactgacatccctaggcctgaagggatgaagacagggaatggtttctggaatccagaaggaaattcctgcagagtgagccatgtggagagcagtagtgacttgtggtcaaaggacacagccagctcaggacgtgtaagggagctctgtggctgggtatctgcattggctgaacccaacacaaagccagaaggcaaggactccactggcatagaccatgagggggctctcctaggaaagcgaagggggaggaagcgtggagagtggatttggcctggtgaatgttcccctaaactttttccgatactgttactgtttatttttcttcacatttaaatctatcgtcttgctctttgttttctatttgtctcatctggtttttgttcctttatttctctgtccttgccttcttcaggactaattacttttattattctatttttttcctctattaccttgttagttttattaatacattctttttttattcttctagtggttactatagagattaaaatatctccttacatcactatgaactcatgtttagtttaatatagacacagataattacatccagaaatatgtttatatatcacacatacatatatacataggcacatacatcatacatacttgtatatgacatgcacgtatatatatacatgtgtgtgtacacaggctagtgtacacacatatcttcccttactctgtcagctgagaaggcctaggagcaaagaacacccctagcatccagttctaatgccattctcataacagaaaccggggctcctcagagaaatggatggctcaaattgaaacagaaaatatacaggaggaccctgaatcatattgtagtaccggaaagtaaaggagtgttaaaaaatgttgagagtatgccaaaaggacacaggagtcaaatcaaagagctcccaatggtcaacgctgaaaatttttaagcaaaaaaaaaaaaaaataagtaaaatagtactggattataactcaaagtataaaataaatatccaagactccagactgatataaatgaatgactaaatatgtaaataaatgggagaggagaaatctcccttgcaccacgattccaaataatttatgtagatactctgcccttgaaaaggagggaaagaataataccccactccttaattatggggtgtacatagtgacttccttccaaagagtacactattgaaaggtgaaataaaataattttacagtggagaaacctgacaaacactacctctgccaggggatcaaggtcaacatcaatggcgataggtcatgtggatagtgtgttcttcttgataggatgtgatgcaaatgacactttaccacttgttcttccttcctccccctaaaaacaggtcaccccaatctaattatgagaaaaacatcagacaaatctcagctgagggacattctatgaaatacccaaccagttctgctcagaactgtgaaaaacaaggacacatgaatgtatatgtgtatgtcatatacatatccatttgagaaactgtcacagccacaaggagcctaagcaggcataacaagtaaatgtaatgtgggatcctagatcaaatcctggacaaaaaaggacagtaggtaaaaattacagaaatgtaaatacagtgtgaattttagctaatgtatcaatattgattcattacttgtgacaaatatgtcataatgtaagatgttaataacgggaaagggaatgtggggcacaggaaagccctctgtactatcttctcaatgtttctgtaaatctaaaa

SEQ ID NO: 33636 - DNA, 2578 bp, Homo sapiens
tatgtatatgaaagatataaaatactcttggccacgcaccgtggctcacgcctgtaatcccagcactttgggagaccaaggtggatggattgcttcagcccaggagttcaagaccagcctaggcagcatggtgagactctctctacaaaaaacactaaaattagtcgggcatggtggtacatgcctgtagtcccagctactctgcaggctgaggtgggagaattgcttgggcccgggaggttgaggctgcagtgagctgtgatcacgccactgcactctagcctgggcaacagagaaagaccctgtctaaaaaataaaaaataaaaaaaattactctccacccttcctcccctttcgctttcctaggagagcccccgcatggtctatgccagtggagtccttgtctcctggcttcgtgttgggttcagccaatgcagatccccagccacagagctcccttacaggtcctgggctggctgtgtcctttgaccacaagccaccactgctctccacgtggcccactctacaggaatttccttctggattccagaaaccattccctgtcttcatctggggatgtcagtaattctgctgttattagttctggatgattacattatcctttgtgagtccctgataccctgtccaaaccttcataaatggccccttcataaaagcccccttgaattatactaatttcagtgtgccatctgtttcctatttgaactcagactgacatagccattgtgaaatcagaaaatagttcctcaaaatgggattctggaattccgttgctcatgtatttgaggaacacagcgataaccttgctggggaagaatgaggaagtgagtaatccatggcatgtggtgacatcatcattacccacattatcagtgatgggagcatgcgaggaattgcaggtgaagggcaagcccttcttttggacttaattacggtttttctctcattgcatttttcctctacaagttttgaaagcatgcattcaaattgtgtgcttttcgtggttactgtaaaccagtttagcattcgtattttatctaaaaatgtctaaagtcaatatctgtatcattgtcccaatcaagccaaggatttggggatagatgaactccagttgccctgcttcagacatacgtgctactgtcatcctgtgtgttagatctacgttgttgcctttaacctcacaaatttgacatcaacaaaattttgtagttttatttttagatttattcacatgcttttcatgtctgttcacaattttttcttgcatttaaggtgctgcttttgaaatttgcgatgctaccttatgcctggtatacaccagtggtgacgagtaaactggctcaggggcagggaagggccctgaattgtagtcaatttctggtgtggaaatgtactcccaccatggcttattccaagccatcagtgtaacatcactgaatgagcaggtgcgaagagatgttcaaattttgtgggctccagcacaccactgaattgtttctttttcttttcttttctctctttctgtttttttttttcacagctttattgaagtataactgatgtgcaattaactatatgtatttaaattagataagttctcacatcatcatcaccaaaatcaagataatgaacatacccatcacctacaaaagtttcctcattttcctcccacccctgtctgaccccacccgtccccagataatcactgatgtttttccatcactaaagattaatttgcatattctagcatttcatatgaatagaatgatacagaatgtcctctttttggtctggcttcttttagcataattattttgaagtgcatccttttgtatgtatcagtattcatttctttttattgccagataatatttacatcatatgtatattcacaatttatttatccagtcacctgtttatagactttgggttgtttctagttttttgcaattacaaataaagcttctataaacactagcatgtctctgtgtagacatatatttgcttctgtcttaggtaagtaccaaggaatgtaatggctgggctatgtggtagatgtagttttaactttttaagaaaatgccaaactgttctccaaagtgattgtaccactttatattttccatcagtggtgtgtgagagtttcagttgctccactttctcaccagcacttgataaggtcagtctttttaaattttagccattccagtgggtatgtagtggtatcactgtggcactaatttgtatttccctaatgatgagtatgtcatgtgattaccctttagcagtttctttagtcaactgaaagtaaatacagtgtatattctggttttgttcccctgaaaaatgcctatattttgtcctcccttttgtttttatttctggtttttagagacagggtctccttatgtcactcaggctggagtgcagtgacacaattatggctcactgcagccttgacttcctgggctcaagtgatcctctcacctcagcctcctgagtagctggattacaggagcatgctaccacacctggaacatttttgtgtgttttgtag

SEQ ID NO: 33637 - DNA, 810 bp, Homo sapiens
gctaattccaacactggattatctgtttctattatcttatttttttcttaactaagagtcatgttttcctgtttctccacatgtctgataatgtattattgcatacaggacgttgcaggtaaaacattgtagagattctggattctattacccgccttcagacagagtggagttttgttctagcagacagttagattactagcatatcacccggaactagtggaggcttggttttcacactttattagaatgcatttattttagttttgtcctcattcctagcgagaatctcttggatctggacatggtccccctgggatgtcaacagaaagcccgaggtgtttaccaagcttgcctaacataatgagactcaaactccaaacactgtttgccctgaagtgcacaagtacagacatctctactcagcaatttcaggcttccagctgttattttcccctaatctctttggaatcttcactcatgtaggttaggggtcagccgcagatttgagaaaaatgtgcacatagattcggtgctctgcttagctccctcctgtctggttctccctcctcaatttcctgctgctccagcagcctccgactctgtcttccgactcctcagtctcctcaggccgcagcttctatttgttctgtgtccccacattccacaagaaccgggaggtgctctccaaagagaagccatagaaatgtggctctcacccagcatggttcctttcttttaagaattaaatcccatcaagtttatgcctgttttttggggggtttgtttgcttgtttgtttgtttgtttg

SEQ ID NO: 33638 - DNA, 1920 bp, Homo sapiens
tatctgggaaaagagctccaggtgccataggaggagcggcgtcagaagggtgagcctaatagaggaaatgagtgaaagagtaactctcccctgcttttcttctttccttcctagtgactgttcgttttttctcctttgtgggctcttctgcctttccttggtctccagatattgaggataacaatagctaacatttactgggtagtgactgggtgccagacattactctagacaccttatatggatttaacatatagctattgagtgaatgacatggatgacaggcatcaatccattaaatgtgtaacaagaagtataaaggaatgctctggcagacagcaacagggccctgtacttattcagactaagggtcagggaaggctgccccaaggcagtgatgcttgaaccaaaagtgaagaatgagttaccatgtgaaggaggtggggtggaaagtcttctagaaagaatggggagagggaagggggaaatgcagtatgtttgaggaattgaaaggaagctggcgccaccgcagaggactgaaccagaagcgttgtgttggatgaggtggggaggtaggcaaagggagggcatttcatccatgtggaggagctggctcctaatccagccccatgtaagccattcgaaggttttcgtggcggagtgacataaccccatttgcggctgcagcgcagagataagatgggggaggggcagagcagatgtagagagatcagtgaggaggcgctgcagaggtccagataagagttaatggtggcttggaccagtgaggcatcagcagagttgaagagaaaggtacagattagagaggtgctctggaggtaaaatgaacaggattctggcttgcctatagatggacagtggggccactgactcagacagagaactcgagaaaggaatcagggagtgaagatctggtgggagatcttgggcatgctggggctgaggtgcccttgggacacaggtggagatgttgactaggcagctggctgggctcctccccatcaagggcttacacaagaggttccctgggtaagagtcataaaggtgtgaatcatcggcagatggacagtactcaatgctgtaggcatggatgagatcaccagggacagagtccacagtaagaaggggaaaggccaaggcatgggcgtcgagggacaggagcacttgatggattgagtggaggaggatgaccccgccaaggagactgagaagaagaccaaggagttaagaggcaaaccaggagagtatggtgtcaagggagccaaagaagttagggtttgaagaatgcagtaatcaagaggtctaagaaaatgaataccgaaaaaaaaactggccttcaaattttaagacatggagatcatagcacagacattgtgttttggggagatgttgggggcagagatagtaaaagccagatttgaccaaatgttggatgaagtgagtaggaatgccataatggcaaacagaacactcttatggaagaagaggctggggccgggcatggtggctcacgcctataatcccagcaactttgggaggccaaggcggacagatcacttgaggccaggagttcaaggccagcctggccaacatggcgaatcccctaagtctactaaagaaaaaaaaaaaaggaaaaaaaaattagccaggcatggtgccatgcacctgtggtcccagctactcgggaggctgaggcacaagaatcacctgaactcaggaggtggaggttgcagtgagccgagatcgcatcaccctgggtgccaaagcgagactctgtcaaaaaaaaaaaaaaaaaaaaaaaaggaagaaagaaagaaagaagagaggccgggaactcaggaatggaaaaccaaataccgtacatcctcacttagaagcaggagctaagctgtgagtacg

SEQ ID NO: 33639 - DNA, 2728 bp, Homo sapiens
agtggagggtgaacatgaggatgaaggggctttgtgtggagtttctgcaaagccagtcttatcttgggttccaagattattattaaagctgggttggtttagggtcctaaatggtctcaagtttgggtggggtttcaggtcagtatctgtgtttgggggtccttttatggtgacccaatcccaactctggaattgagaatcgaattcagagtgcattggtgttgatctgggaatgggagagcagtactggagttttatgtaaggcttggggttcagaagagagataactggggtccatagcaaggtagcttttggactttagggttcatttagggactgggggctgagcattagtacagggttccatttaaggtccagcgttggtgctagcgtcactatcaaggttagggcaagtagaagtaataaagagatttagagtcagaattggtatttgggatcagtatagaggttcacaacaaaattactacttgtgctaatttgggggcagattaagggctttggactcaatattgggtttagggcaaggtgtgggctcagtatcaggttcagatctgtatggggaggaaatggggtcctagagtggtattaggttcatgctagggctgggagccactagaaggatctggatgtagtatcagagtttggtctgtctatgttcattattggggttcgggttcaatattgaggttccggtcggtttcgacttggcgttgggttgtggcctgtctgggcctcagcggctccgcggctctacgagcgagagtgcacgaggggaggggcgccgccgggggcgcgcacggcaggggcaggggcgcgggcgcgagcgcgaggggagcgcgcggctggagctggcgcgggagcggcgggagcggtggcggcggcagaggcggcggctccagcttcggctccggctcgggctcgggctccggctccggctccggctccggctccagctcgggtggcggtggcgggagcgggaccaggtggaggcggcggcggcagaggagtgggagcagcggccctagcggcttgcggggggacatgcggaccgacggcccctggataggcggtgagtgaccccccggccccccaccagccccctccgctcccgtcccttccccgctctccttgccctccccgctagtccacccggcggagctgggggcggtcccgggggggacgagggcgccgctgaggccgggccgcgcccccacctgccgcgcccgcagcctcggcgaagccccccctccacgccccagcctggcggctcctccccgctcaccccgcggcagacgcgcccccagcgctgctggctggctcgctccccgccgcccctcgccgcctccctccctctccaccgcaccttagccgcagcccgccccccccacccagcgcaaagtttcccgtttgcgttcttgctccccctcatcggtcccgcctcgtccccccttctagcgcggacgcgctccgggggcggccctcagaccccccagccccgggctccgggcgggtccaggccgcgcccccgcccccgccgcacaggcgccccctcccagccggcgggggatccgcagccggcgcgcccgggtctcgctcgcggccccggcgcacgtgcggtcccgggctgcgccgggcgcgagtttgaagcccccccacccccttcgttcgcgagcacgggatggggaggggccgaacgggctgtacccgcccccaaccgggtgcaacgccctggaggccctggagcgacctgtcccgtgaggacgtggccactcggaccctctccgaaagttcactcagtggccgccccgcgtcccgtcccgtcccgtcccggctccccatcgccgtgccggcgtctctgtctcggctgctttctgttttcctcggcgtctctgcctccccgtgtcagtgcctcccaatctcacgcccctgcaatcccagggtctctccagctgtctccattctttttccccaggtcactctgttctttctccccaggtctctcgattctgtctccctgggtcgtcttgttccctgtccctgagtctgttctctccgcttgggtctctctatttcctctccctgggtctctgtctccctccttaagtctctgcctcttgtctctcacccatctcttggtgtctctgcactctctgtgctaggcgcccccccatttccctggaatgctgcccctctggttcttccaccccggagggggaggggctagactttctccccatttcaagcccccctgccccccagtgcacggcccctgagttggagcaggttgggggtggggagcgctacctgcctgagctgtgaaatgggagagggaggctgccccagcctgggggttgtctggatctccctgaggggccacagggcagggccgggaggctggattaggttgaggaaggctccacttttgaaggaacaggggcagggatccagagcgatctggtgtcggatctggcctgagaagcagggaagtgcactggggtgagaggcgtagaaaaggatgtggggtggtggttccaggcgggtgctcatggggaggaatctgctgagaagggaagatctggtggggaatcctttgggaggcttcggggatctgagggatccagaagagagttctgacaggctatctaaggaaatttctgtgcttagctccttattaactcttgcttcagggagcatgaaaatccctgtt

SEQ ID NO: 33640 - DNA, 898 bp, Homo sapiens
ctggtggggactcaataatggctctagaaggaaggggctgggctctgtcgctgcatgtgtgccagcggaggaggcatccaggggcacgccttcattttaaaaattatagagtagagaaagtcaaaaataaatattgcttctgaagcttctttgaagactggcatgtatgttggggtgtgttcttccaggctgggctgttttctttgaactcattcatgcgttcatccactcattcagtgtatgctgactgagcacctactatgtgccagctgtcagccaggcgctggggatacggaaatgagctgggcagccacagtccatgctcctatcaagcttatggtagtgactcagtaattgtaaaaatatataaatagtcatgtttgtggtcacggctccaagccaaggtccaggcaggtagtctgggacattgtggaaggcttccctgagaaagtgccactggacttgagatccgagggtaagttggccagaagagcatgggtagcctgtgccaggcagtggcattcagcactggcaaggctgggagacaggaagaaatttggcacatttgaggatcagaagaggaagttcccgttctggcaggaggagagcatgggcaggtagggctgcagaggtgggaggggccgactctgcttggctctggggtcatgctgaggagctgggccacagagtctactgctgaggtcagggacttggtctgtgtggctcacagctatatggctggtgcctggaaggacgcccagcacatagtaggtgcttagggagtatcaaaatgaatgagcgagggagtgaagggaaaagatgggcatttttaccagatggggatggttctacatgaacatttccataacctgcttttttttctgcataaacagcaaat

SEQ ID NO: 33641 - DNA, 1559 bp, Homo sapiens
cagcaggactctgggatggggacagaccggctactaggagagacagggtggccagaaaccctttagaccttctgtcctagagagcccccactgcttggagagcctccttctaaggaatacctgggtacttaggagcatctttaggcaccagagcggggcagtcgaatcgtgaccctgtcttatggggctggggtgagacctgtcctggattcatgtggtcattgtgtgatgtgcgcgtgtgtgtgctgtgtgcactgttgcagatctgtgctgaaggcacagtgtgagctacagccaggggtcggcatgggaatggggggtggcacgcagggcatgcgtatggatgtgtgcccaggacgcgggtgtgtccataggcccaaggagggtcaaaagcgggagccacccatagctcttcccctacgctggaccctcaggatccaagtatgcagatctgagcccctccttctcctttcatggggaccttctaggcaaaggagcatccccccaccccagctcctcagacctggaaatggggggaagattgtgtttggccggcaggaagctgagcaacgcccctctgtgtgtgtttgtgttggagggaggtggaattgtccccatccagatccaactccgaactttggtccctttcctgctgcccttccccctgcctggcactatgagactggcctcagcccgccccatcgccatggttaccactccttggttactggtgggaggcggggcacagggcagatttagccaatctgcaggctgagggggaggggcgaggtcggagccaaggtccctgggggaaggggccgttcccagcctgtccagagcccaggggtgatccagggccaaccctggggtcagcccacgggtcaccaggccatagggctcccccacctgcctccgtatctctgggtacagatctctccccttgccccaccagggctctttctcctaatggctcattaattattcaggaactgattctggagtggggtgggactggtgtggtcccgccctttgtcctcaagtgctgggtcctgggtggagctagaagggaaaggagaaggggcaggcattcccaaggggtggggcaaagggtcatgggagcaccaggtaccaaagagagggctgggcaggtgagagcaaggaaaaaagacaggtggggaatcacatggggaagtggggcaggggatctccaggcctggctggaacctgcaggggcaggttggagtagaaagccttatcaggtgtgacccacatggttggcaggaaggtgaaggcttgtccacgtgtggtcagtagctcttggacattgaagtactgtccttgccctccccgccgacccaaccccaggcactttcagggccttcagacaggagctctagggcaggggaaggatggcccagttgggcttcaacagataacacatcctgggagaagagctgccctcctcctcctgcctcagacccaacgcgccccaacctgtacccctcactctcatcccccagcctgctgtcttcccgtgttctctcccgtgaaaggcatta

SEQ ID NO: 33642 - DNA, 2245 bp, Homo sapiens
agccgcaggagccagggtctgtcttccaggcctgtcttacactgcacacagttttggatctctccctgcactgaggcagggctcaggctgagcttgggcaactactagccaggggcaagtggccatacacagacagggccactgcagaagatagggtaggcaccccagagaattgacagctggggcagtgaagcgcggagtggacaaatgtgtttcaataggcctcttaacgagacaaatgaatgggggccctggcctctgaggggagtggagggaagcgggtggagaagcagctgccaagagttagcccagaggccccagtgtcagtgccgcacgcgcagctccagtggagatttgggcacacattggggtaggatctgctgcagcgcagcttccccagccaggctttgtggcttctcaggaggggaggttgtggggccagaggtgtcctgagccagggcagaggtttttgctgatctcaagtgcgtgtcgcgtgcctgtcttcaggcaagacctgcagtgtggaggcacaggcttgtgagcagtgaccacagggtgtgctgggtaggtggcactgacacaggccatggcagaagcatcttgggagaggagttgggaggcttcctggaagaggggagccctgaagggtgagtggacatttgctaatgggggggtattgcataatgaggtggggttgcggggaagaagcacgaatgtggctgggcttctctgtggaattcatgggagagccacagtgagaacccgacagcatgggacagaggtggggtccgaagaccaggtgggagtgagaccctggttatggcccatttacccagaatcctaggagctcagagcaggatgcgtgctggctggaggggtgggtggcgggtgggttgacagaggtgggcagaggctgaggagctgggagtgtgtctgttgtgtcatttccctcctccccagagcctgtggagcacacagggtctgttgtctgtcgtcatgctctccccctcgttctatgggtggcctgtctagactctgctccctgtgggacttcccgcagattccgttgctttctctctctgggcctgttttcctattgcacaatggggataatcactcctacctggaaaggttaactgaggtcacatggatgaggtgcctggaacctagtatgtattccccttatctgaggccatgacctggggctcttgctctgtccctgggaaccaggcttgtctctgagtgggctccaggggggtaccaggaacagtcacaggagctcactgagtcccagcttaagctgctcagacccagggatatctgtctctccagaagctccctgccctgccttcgccggccctcatggccctgcctccgtgtgtacatgtgtatgtgtattccatgggaaaggcacaaaatagcagtcagtctctccatagaagagccttgatggtggcccagtttgactctccctggggctggacccctacagcctccctgggaggtggttgcagcccccttcctccagccagttccacttactcctttcttaggccacttcctcccaccctgcatgggcttggtggctcgagaatgttgccgtccataccccgggagctgtgctgaaagggctgtgcggcccccgaccactgtgtgtgtcagggagggggcacgctctcgtggggtgtcaggccaggtggcagtgggtaactggcagaaaggccctcctggtgtgctctggtggcaccctgttgacccagtctcagaagttgtgttccgaccctcactgaacaccagctgtgggtcaggcacggggcagagtagttcaagtagcttggtttgctgcctgcctggggacctgacactgtgggatctggtcagtgctgggatgggaagctctgggcacctcaggccatgggacacagagcaggctcctacagcagcttggctgggtgggacatgagagaggggctgggctgggcacactcaaaggcagggaggagtctgagggcctggcctgtcagggtggcctaggtggtgggtccaagctgtgtgctctgcacagtgctaggcctgtactatagtaggtgctcaaaaaatacttgttgaaagagtaaagaagccgggtgtggtggctcatacccgtaatcccaacactttgggaggccaaggcaggtggatcgccagagctcaggagtttgagaccagcctggcaatgtggtgaaaccctgtctttaccaaaaat

SEQ ID NO: 33643 - DNA, 1151 bp, Homo sapiens
agctactcgggaggctgaggtgggaggattgcttgagcctaggaggtggaggcggaggttacagtgagctgagattgtgccacttgtactccaacctgggtgacaaagtgagacccccctctcaaaaaaaaaaaagactaaagaaaagtgagcctgagagcttaggaggagcacatttcagaggggaacggagagaggaacatcaggcccgttggtagctgaggagaggtgcggttagatctgtgctccccaaagatcctctgctgaacataaggggcaacgccttgtctcctgtgctgtgtcctgcgggtggaggtggattggagggaagcggagggcgaggcctggttgaggggcggggcctgcctgtctggtcccccgggctgccttgggccagcttggcctagtctgttgggtgggcgggcagggtgcaggctcctctccagcctccaagggaggggagttgttctgcctcctcgatagccccaggccttgggcacagcccagcctcccacggctcttgggccctcctccttccaggccgccggtgacccacacctggctctcctccccggcgtctcctctccgcttctttgtttggagcggaggccccgccccaccccgcccccaggcgcactcgcccggccattccggttcagccggttccagcccccagtttctgccgctgcaggtcccggcaggagctggaggggcactttctccctgggtttctcttccctggtgcagcaggggccgcggtcctcatcctcctggttcctcagttcggtccttctttcattctccacccctgggtgccaggaactgggtcagacactgggacaggaatccagacaggcatgctatctgccctgcccagggttatgttctaggaggggaagcagccattaatcaaacaccaaaaatgtggaaaagtaataatctcacacgtgtgcataataaactgtgagtgaaagttataagctcggcaggtaggtaataagctaggagcagtgctgtgggaggcaagggagttacccgggagtttcaaactaggaactgagctcataggttgggggcagggggactggagaaggcagtgatacttaaatggagagcagaaggatgaatggaagttagagtgtatggcggag

SEQ ID NO: 33644 - DNA, 868 bp, Homo sapiens
tgcagagtgggtgcttggcaaaggattgtcatcatcgcacacgtttctgtgccagggaccaggctgggcctgggctcctggggaccaaacaggtggtctgaaaggtcatttctcacagcactagccctttttggagctgttcattggtctgattaataggaaatggatcagctgtcaagattaacgagctattgctacaagattgtagcaaatgggttgggcttctctgggttcatgaccctaggtggttgaattcttagggataggggctgtggactggccctggtatgtgtactgaggtgatgagggtgtggcagtgccatgtctgagcccctacctttcttctcctccctctgcctccctgtggacaccttgaggagactgtcagaaggcaataactaagtcgggggggagggatgggagaggcagatttacaggaaagcattcacctgggaagatatccagagagacttaggaactggactgtctaggcctttgggactgctgctggtatgtgggggctgggagagagggaggagtctcggttcctggccggagccccggggtggatggtggtgccatcactgagatggagagcagggggagggacaactctcagggagagctggagctcttcccagcagctctccagcacgcctttttcctggagcttggaattgatgtggggcgggcaacagaagggtgcagtggtagtgtgaactccagacttggaacacctgggttcagatcttagctctaccacttaccagctgtgtcatatgggacaaatcccttaacctctctgggcctctagaaacagatacagttatagcactcacctcatatgcttaacagagttaaaaaatgt

SEQ ID NO: 33645 - DNA, 3107 bp, Homo sapiens
ggtgtggtggcgggcgcctgtaatcccagctactcaggaggctgaggcaggagaatcatttgaacctgggaggcggaggtggcagtgagccgagatcgtgcctgggcaacaagaacgaaactccgtctcaaaaacaaaaaaacaaaaaagcaagcaaacaaacaaaaagtgtgcaaagggaaaggtgagcttaaaaaggaaacaggaaaactggtcagaaaaatgggagcatatcacgagaacttgatttaggctccacctatcacatgcacataccaattggaagctagtgatacacagtagagggcccttggaaatcatctggcagcaccaggaaatacagcaaaatccagtttatggaacacagtaacagtaactagcgactgtatccatgtccaggacagtggagtctgtgaagcaacctgcagtatcttgtgcttagtggcagcaggaaagacagtggtggatgaattctaccgcaggatttgggttttctttatgtgtcctgcaagttggattcttcagactcggcacttttgtgagccactcagtataatctattatctaatactgtcgattaccttactgggtaagggcaaaaacccctattgtgaaagacttgtggctgcgtagccaacggccattctttttgaaacagtcatttctgtttttgaaactattttttttaaagatttttttttcagtaggcatgtacccagcctgaggcataaatcatgattggtccatagcattctatgaaatatgttctttttgccaacattcattaactctcatctttacaaaatttgcaaggcattattttttccattttattgatgtgaactcccaggctcagagaagttactagttttgaacacaggcctgactccatatagctctttccagggcactaccccattattcatccatggtaattctgtatatttttttatgactctggttgtgggtattttactttcctacttgaccttccccactacccttgacaatctgggaattccttaaggcgactcactacccctcaggaaccgctcctaatgacttctaggaagccccctcgccctccagaagtgcctcttctgattcccaggatgcccccctctccgccccaagagctgctcctaatgatcccccaaatccccgctcactgaggaactgcttttttttttttttttttttttttagacggagtttcactcttgttgcccaggttggagtgcaatggcgcgatctcggcccaccgcaacctccgcctcccgggttcaagcgattctcctgcctcaacctccggagtagctgggactacaggcatgcaacaccacgcccggctaattttgtattttttttttgagtagagacggggtttctccatgttggtcaggcggtctcaaactgccgacttcaggtgacccgcccgcctcggcctcccaaagtgctgggattacaggcgtgagggaccacgcccggccaggaattgctttttaatgaccctaaggagagcctccctcatggtctgtcctaatgaccctcagggcagcttcccttccctgttcaggcttgacagcgaatgaggggtttccaaggccacgggattttgttttgaaaaccgagacacccaggacaaaccgggacaagacggtcatcttttcagcactccctgagctcggaagctgcccctaagggccccgacacatttccacgttaggcaaagaggatactcatcccaagaaaactttggcctatcctttcgttagcgacatcctatagtaacctcaccgcccttacccatctaccggaccggcccacttccaggtactagcttctttcaaccctgattagttatgggtgaccaggagcccgcctatgattggccagcttcgcgatccagctagaggctcactggccgcggtccctagtggtacagcgtttcctcccggcaacagcccgagccggcgctcataggctgagcacactgaggtcgggactgggaggtggctgcggcgcgtgctcattggctggtgtatggcttgcagccacccttgaattggttgactctgtacggctgcgcagatgccgactttagaggaggcggagtttcggccttcgcctgctggaaaagcagtaggatcggccagtggcgacagcaggagctgagcctaagccctggcggggctttgggctgtaggtgagaactatagggttttggaattctcgaggatcattgccgctgtagcagtgaccgtgagttttggtgggggaggggcggtgggggtgggtcttccagcggtgagtgatcggcatgtttctcggccaataggagaaggagcttccagaatgggttctgagattggtcctttccaatcttcaaggccaatggacctcgggagaggggggcgggtcatctgggccttattttcttcttcctgcggccgagcttcactcgccaaggcggcggggccgggaggggccgaacctgtgcgcggtgaggttcggggacggtggggagcagggtgcgctgcctttggagtgatgctcgcgggagcggctgcgagggaagggtgcgggagtccgagggggttgttagcaacagctagctttattgagtgggtaagtaccgggcctagtgcttagtgcttcgcttgcatcatctgagctaatcacagcgaccctgcagggcagggggttgggatccccattttacaggtggagaaactgagactcaagtcagctcacacagccaaggtcacatagctaataaacggcagagaccggatctgtattcagagttttgacttcggagccggtgttcttgaatctctaggctttgttactgattgggagggaaggtgtcatgaaacgggagctttccccagggaacagatttgggggaagggaatcctagggttgaagaagggatgaacaattgaggtgagggtgaggaaatcagtttttcaacagttaccgattgcctactctgtgccatgcattgttctaggcatacaaagatgaataggggcagaggctgatgaagcccattagggcccctttgaaggcccggggaagggccccaacattgtattcacatg

SEQ ID NO: 33646 - DNA, 2244 bp, Homo sapiens
gattggtgagagaacactaatccatacatctttggaagagaggaacacttcaccagcctttttacacaggatccctacctttctcgatgaccccactgcctccaggggtgggcgctgggtttaatcccagcagtttttactcaacagctgaccagttttccagaaactgcactttttttttttggtcaacctaataactcttaggaaactgcaactcaggtgatccaaatcacacagaccggcccgttctctcccctactggctgcctatgcagtcgggtcgacctcaagagaactggccccagccaaaagcggcacctcccggcctgccagtcccttcctgccttaggcagctcctcccagaagcctttttgtagggcaaactgccttccctttgtaaggtagggcctttggatccaaggttgcagtttaaagaccaccccgactttgttgaggaattaagttttaaattccgccccaggcggataacaccagggctcagccgcaggaatgaaaaaggagtgggagggctgcaaagtgtacgtggggcttggaggccttgtgccacgcgcggactaaaaatgttctacgagtctcttaacgctcacccccgtgcccccttacccaccagggcccacggaggtccgaagctttcggcctcagtgagcggaatgggtgcgctcacgacctggagggcgagatgagatgtccctcggcgtgaagtggccgtgactaccctagcactttgcgttccccgcgcgggcgacgaaacacgctctcgaggggagagagccgtgcgtcctctgggccgtgaagccaggggaagagggttcctctagacagctcgatgtgcccgggagagacacccacgctgaacctgcaagctggggtgctccaccagcgcgaacctctcgccccgcactcgccgcagcactgctctcgtggtaggcggggtgggcgggacggcaaatccgcggctcctgcgtctattgggctgctcggggcagcgcagctccgcattggccaggccctcgctccgcccggcttccgcgagcccattggtcgcaggcgcccgaccgggtcgcggccgcgcgctccgcccgccgctgcgtccccactatggcggcgcccatgcagcccagcgcgttgtgggctcccgccggggtcccccgcggctgtcgccgccgcctacgccgctgcctccgccttcctgccccgcgtcgggccgggcgccacctcccccctgcctccctctccgctgtggtaagggcctgcccagtgcgcttcggggcgcgatggctgaccgcgaataacggtcgccgctccgccccgcccctcccccgccggccgcgggtcccgggctgggcggggcgcggagcccgcgcgctagtgcccgggaaggcggggtcggggcacggcccagtcgtccttcgggctgggggcccagtacctggatgacctctcctgggtgggggccgccgagcctgggggaaaggccggccggacgcaggccaggaggtctgagatcatctccgtgtgaaaccccgcagcgctgcgcaccttggcgcagagcacggacaccgtcattcgggccctgctgtgggaaaaggaaagaaaagtccagggagcgcctgagcgggaatcggcagcgtttgggtagcggttgtcattgcttactgctctagcgggggccagaactggggtcagtttgatcggcaaagtacgcctctcttgcttcctttccttctggcactttcccccgttgtgtcctcggtgcttttgcttgcaagagaaaatatcttagtgaggagggcaggtttggttaggagagtgtcccatgaacattttggattcctttttacaacaatgtccatttttatgattcctcagtaagcctcatttatgtttccttcacgtatgaggaaggagtgaaacctgataactgaatgtaattaattgagggaaggaccagtgaaggcggctattacctcagaaagtaaaatactcaaacttttcagtggatgtactgtgaattatagatagctggacattaaggtaggaaaaaactcttattaggttactaaaagtaagatagtccccatgacaaattaggttgtttctaaggcagaattatcttgtagagatgatcactgaaatgtttggtgtactttcaagtcaacagaggattaaaaggaagctggcacagaaatttatagccaaatgatactttcaaataatctcttaa

SEQ ID NO: 33647 - DNA, 1724 bp, Homo sapiens
aaaattcatttcatagaagaaatattaatatttaattacaggatgctgccccaaacctcatagggggatgttaaataatatatggtttgtgcagtatgctgctttcctaaaatctgaacactttgggattctaatactatctagtttgagggggctcagataaattttgaactttgtgttactctttttacagatgaggaaattaaggctcagcaagatttaagtaggttgcccaaagttacatagtgggaaaaacagtggagcccggattagcaccatggtggcctggttcaaacgcatgccttgtctgctgtgctgcacaggtccatgccacctgcaggtccctgccctcgacctcttctgggttgctggctttctgccctccctgttctcccagtgctcagccctggctgacttcccttccattcctattcacccaggctggctcctttcagtagcagcctccatgcctttacccccttgtcctcctgaaaatgtcccactgataccaagctctgaccaagtctgcccatcttgtctctgattgggctgtctttcatttgagactcgatagaaaggtgaatcacactcatctcccagtttcagactgtgccctattcagtacttggcaatattgccttttccatttcctttatcagcttcctttcctgtttctagagcagctgtactaaaacttttcccatcccctgagctccaaaccttatataccatcttactctcagtttcagcagcacatgcctagttccatattcattccacctgcttgagtcgtacacacaggggtttgtaagcagtgccacccttacactgcccccaccccccgcagtcttagagggcagcagctggtagaattccagctactcccagacttcctgatgtccctgtgaacgctgttgccctaggggatgtcctgcccctgatctgcacccaggtaccttttgtctcctggcatgacatagcagtttcttcctcaatttcatggtgactcactttttaaaaatagtctttgatgtgtcaaagcctttttatgaaggtctaaatagattgtatggactggttccctttcagtcacatgcatttttacctcctgaaagaaaccctactaaattagttaggtatgattttaccttcctgaaaccacacacccctcactttccatgcttcagtgcctttccatagctgttcccacactaccagtacagcctgtcctataaggtcatctcataccagcttaagtactatctcctccatatcttcccagtttctcccagccaaaaattctccttgcatctaaacgacaggccaggcgtggtggctcgtgcctgtaatcccagcactttgggaggccgaggtgggtggatcatttgaggtcaggagttcgagaccagcctggccaacatggtgaaaccccgtctgtactaaaaatacaaaaattggccgagtgtggtggcacatgcctgtagtcccagctacttgggaggctaaggcaggagaatcgcttgaacctgggaggcagaggttgcagtgagccgagatcgcaccactgtactccagcctgggtgacagagcgagactctgtctcaaaataaataaataagtaagtaaaaataaactcccatagcaacttctctagagacttgtaatatcgttatttgaatctctctattatctctctgatggttcaaaagctctttgatgtcaga

SEQ ID NO: 33648 - DNA, 1087 bp, Homo sapiens
ccaccgcgcctggcctatttttaattttctaaaaaagatttgccatctctccgcaggccccatagctcctctgatctgggaggcaggatttcatccgccgcccccaggcctggagagtagattgcatcaggccagggagtgactcagccaccccttgctgttggacttcagtgactcacactgcctgcccgcagggtgtctataacctaggtgcttcatgacaagaagtggcttgaagtctgtgggaacaaggtccttccgccagcactgaggagggaggttgggaagcttaacggttttcctgggacgaggaaaggggtatgaaggttcttttttccctgtcttgggaagggaggaggatgagctgtggcactcctagagcagggtcatcattaccgtgtagacacaactgattaccagtatctgccttcaggtttccacagtcacggagtattggagagtggtgacgaagaaggcaccgagccctggaaggggcagtaaaggtttgagcaaaggcccaactgatcacttcatctctcctttcagtcctggacgcacaatatccagcgagagaaagagtttctgcggaagctggtgaaagctcgcgtcatcactgatctaagcagtggcatctgagtgggcccagcacatggccatagaggcccaggcaccaccaggagcagcagccagcaccacctacacaggagtcttcagacccagagaaggacggtgccaagggccccaggggcagcaaggccttggtggagcagccagagctgtgcctgctcagcagccagtctcagagaccagcactcagcctcattcagcatgggtccttgatgccagagggccagcaggctcctggctgtgcccagcaggcccagcatgcaggtggtgggacactgggcagcaaggctgctgccggaatcacttctccaatcagtgtttggtgtattatcattttgtgaatttgggtaggggggagggtagggataatttatttttaaataaggttggagatgtcaagttgggttcacttgccatgcaggaagaggcccactagagggcccatcaggcagtgttacct

SEQ ID NO: 33649 - DNA, 2313 bp, Homo sapiens
accgcgcccggcctacttgctattctttattgatgaagacttgctgaatgacttagagtcctactggattttgcttaccagctaaatgggcccctctccttcccaggctctctattcttcaagctcagatcaagtttctcttctcagggaagccttcatggaccttctcaggcctcagcagctgctgccaatgccagcttccaatgccagcttcctccatttgaacaaaactacggagctctttgcacttttaattttttcctcttccctgctagggtagctggcaggagttaataaacaataaaatacaactggaggggtgacaggcaggaactaccggggcctgtggcagaccagatctatggcatggtctgccaccctgtctgtgtgccaggggcaagataagcctaactttccccaagctcgatttcctcatctcatctgaaaatgatgaataaaaatatccacctcagagctattaagaaaactgaacctaaggtaagcaaagtcctgctcctagcacttaaatgtaagctactcttactctagttacacataaagttacttccaaaaaccttacgaaattccccgagcactgtccatggtatgtggtttcccggttgcttattgggtggtcccgagagccttccttttttccttcctgaggcgtgccaagtcccctctcctcttctctgggtggtgctgacgccttcttcccaggctgcacctttgctgggccggaggatgcccccggcagcggagcgccagagtgaccaggcaacctccccagcctccaccctctagcccgggctcccacctccgtcctccggcccctcgagtcacgtcgtcctactaaggagttgggccgcagcgccccgcgccggtctgacccggaatgcctgctcgccgcggtaggccgaggacaggcggggctctgcaggtccccaacccacgtgctcccggcctcctccgcagggcgccgccttccggctaggcgcaacacggactacatttcccagggtgaacagcggcggggcctagactcggccgcggcctggggcggcgagccgctccaccgcctgctcaggggagtgcgagctggcgcgaggacagggctaaggacccggaatgagtttccgcgcagttccgctgggccgtgccggcctgtaccgggccgtgccgagccagaactggcaggagtgggggcctgagttggaggtgccggggacaggcgctcggggcagcccgcgccttgccgaggtccctgccccgtcccggccggcctggcttgtcttgtcagtcactggggcggaggcagcggctgtagcggggctgtagccgggcgttgagcacagcgcgggccaggccgaacggaagggacctgccacagcccctcaactccacggactcttcgccctagactagcggagctgcatctccgcgcttcgttggacgcctccgtaaccacgaagggctctctctctcccgtgaccctccagccccatgacctgttcatagcagccgagagctcacccaggcgggggtgttgtgggtacaggccatcgaccctgtgacccctcaagagccagggactcggtttcccccgcaggcctccctcccctgtgactccctccacacagattctggggacagagctgttacctgccactaggatccccgcctgagagctcctcactgacggctccctcctcggagtccccttcattgggtctcctaagagcaccaattttggtctctggcaagcctcccacccccaaacgaggtggggaggcctcggcagccatgcccgccctgggccccccctcaccccaccactccctgggcacccaagccggggtctagcagggggccagcagccaaggggctggggcaggagacagatcagggcccacctccctgccagggagggagcaaagatggagcggcgggaggagcagccgggggctgcaggggctggagcagcaccagccttggacttcactgtggagaacgtggagaaggtatgagggctctggggtgggcactccagtgacagagcagaagttctggggactgtcactgatggcagagctcaggcctgggctgggtgcccgctggtatggtgcccccagagcacctggcatttgctctctttctgggcaggcagtattgcagtgccctaatgggctatttttgtctttccttacaggcaggtcccctgtggatagatactctagggtcttgggatggtcccttcagggtgctgtgacttagccttccgtccagactggctatgttccagctccatgggaa

SEQ ID NO: 33650 - DNA, 1114 bp, Homo sapiens
acaatgcccacaaggctccgcgccttcctcgatgtacttccggctggcctgggactcaggctgaacattggttctctgtgcggggcggtggcggggattggagggcgggagctgtgctgacttaggattggcaaaatcgctatcagccacgcctctaaaacccggaagtaacctccccggtagtcccacgtgtagcggagaaacagtagttaggatggctgaaggggatactcaccggctgaaggccgactgtgattccccctacccccacaaggcgattttgaccccctgagggctgctctagaggactcaggccccgaagctgtcccagggaggtccccgctgcatcccaccacccaagctgtgcctcatggagtcgatgtttagcagccctgccgaggcggcgctgcagcgagagaccggggtgccaggactgcttactcctcttccggacctggacggagtgtacgagctggagcgagtcgctggatttgtccgcgacctggggtgtgaacgagtgaggacagacttagggaagggtggctcgcctctgtcgggatgggtcgcccagaggatccggatcttgggggattttgtgagggcgagagggtgggggaatcagtctgtccgcagcgcgttgaccatccctcccttccacctactacgtggggcagagtgcccctctgggaccaggggctttgaaggttgagtgggagctcctggaagattgctttaaagaagccctcagtgggagagaggctgtccctgactccatggtttatgcttataggttgccttgcagttccctgaccagctattgggagatgctgtggctgtggctgcacgactggaggagacgacagggtcaaagatgttcattctgggtgacacagcctacggcaggtgtgaacttggccttaggtgggccaggcctggggatccggggctcatggggttttacgtctatgacagtgattgccttcaatggtggtgtttctccttgatgataatggtaatgactccccttctgatgctagctcctttcattgacaatgtcttcctttaatgaaaccattttattcactgaccacatttcccagtgatgacagcaact

SEQ ID NO: 33651 - DNA, 2181 bp, Homo sapiens
aatggtgatcagtaagtaccgtgagaaatgtaaagctgggaagcagaggagcgtttaagtggggtggaatattaaacagaatggtcagagaaggccttttcaagaaggtgagcaaaaactgaaaggaagttacaggatgagccgcatgtatagttaggagaagcagagagagcaagtgcaagggcagtgaggtcgcggtatggttggcacgttcaaagaaatagcaaggagggcagtgcagccagaggagggagttagtgggggaatattagaaggtgaagtcagctgaggggcgtggggagcctagcaggctattgtgagaactttggcttttctcctgaatgaaatgggagccatcagggcatttcgacagggtagtgacatcttactgaagcttaataagcatcaccaggacatcgcgggagcccagcaaacgcgcttccctgccactgggttagggaaggcttgccggaaggacgatttcggaggacagcaggtgttagccaggcagcggagcgagcgccaacaggcgcactggggcggagagacgccgtgagcaaggtgaggcagagggcacgcgcggcgccacccgccacaggctaggacgcacggctgccagagaggacgccttaggggcccgcgagcaggctcgggaataaaacagggctggcagggcgaggtggagagactcgagaaggaccggccagatgtcgaagttcctagagaggagggcgcccaagcctccgccgagacgcgtgactacaactaccacaatccccagcgcctgcggttccagcgtcgccttgctctagacgggcggcggcgctgcgcggggaaccggcgtggggtcacgtggtaccggcgcatcacgtgggcgagttaggtgacgctgcggggcgggcggacagactgcgggacggacggtggacgctgggacgcgtttgtagctccggccccgccgttccgacccccgccgccgtcgccgccatgacggggctagcactgctctactccggggtcttcgtggccttctgggcctgcgcgctggccgtgggtgaggccgggtcctggcgggcgggagcagcatcgcggccgagctggccgggtcggaactcggcggggaagtggcctgcggggaatactggccccccgcgcgctctgcacccgaggctctggggacttgcgcctgcgagggcctctgactccgacaaaggagacccggatttccagctgcttgaggaggggtgcgggcgggtaggggccgcgagggcagcactcccccgtcctgccactatcgctgtctcccctcgctcccacgtctcactgctgtcccccctttcttgctcctgaccggcccgctcggtcacaagccggctgctccggttcctcttttcccagtcgctttgccctcccccacccacagcttgttgggtaaacagcggaacggactgggccggcgggatctggctggagcgcttgctccctcggtcccgcctcggattcgggcttgcgggtggcgaccctgcctgcgcaggtgcttggtctgggaggtggttttagcgagggaatggcagaaaatggaggcctaagcagaggaatctgtctacacagctgtactgtcacctgggggcagcctgaggacgccccttcagggaggtggcccttcagctcggcagctactttaggttgaagaacttctctctaccgagcagcccgtaaccccctttttctccctcactgctgcaggagtctgctacaccatttttgatttgggcttccgctttgatgtggcatggtaagggagggcagggggaggattccccttgaagcttcttccctgcagcctctcttcttttctctggtctgagtccctcccccacaccactgcctgcctgggacatggacctttgggaaatacgcggtcagttgttgcctgtagaactggtggtggggttgaagggggtttgaggggttaagattttgtgctccgcttccctgctagagctgaactgctttcttctctgcttccacaacaggttcctgacggagacttcgcccttcatgtggtccaacctgggcattggcctagctatctccctgtctgtggttggggcagcctggtgagtattggggtggtgggactgggggcaggggctgagtcatggcaggtggtgtcactgg

SEQ ID NO: 33652 - DNA, 2779 bp, Homo sapiens
ccctgcactcccctcttgctgcgtgttgatttggaggcactgcagtccaggccgagtcctcagtgcggggagcaggctgctgctgctgactctgtgcagctgcgcacctgtgtcccccacctccaccctcaacccatcttcctagtgtttgtgaaataaacttggtatttgtctgggtcagtgcagcttctgttgccctcttgcgtcaccgttcacagaggaagggtaaagaggcctgtacgcctcagcctcatgccaatcccttgtcagctttctgactgcacacttctgatctgcacagagcttgctcctaggtggggaggcacgggtgctgggtggactctaacccccaaacagacttgtttggggatgagggagtgtgcagataggggcccctgggtgtgtttgtgcctgtagtccttctaggcccgtttgctcagggctctgactgaccaccatgcccgaattgtctgacagcatctacttacctggttgtacagtcgggcaccatcatctccgtccttgtgaggcctggagcctaggcagtggtctctgcctccagtgatggtcctgtccttctagcagcagcccctcccagaaacctctactctgatccttgttcccagggcccagggcagctcctcccaccccatccaatctcgttttctccttccctgaccctgtttcctgttaccccagaagccccagccacctccagcccacgcctttaagggtcctgccccctctctgctggccgaccttgaatcttggtccaattaaagagttgacaaatccctagccccgcagcctgagtccgcccaacctccaggtccccttcctggggagttcgcgctccaatgcaatccccactccccgctaagggactccacggtctgcacccgctcgccggtccgacctctaagcccaccctttggacgagcctgacccatttcctcccgcgctcccaggtccgtgcctcctgggtgcccgggttcggccgccggcagggcgggctcgcagcggcgcgcggcgggtgcgggcgtgctggaggcgggggccgcgggggcgcgcgcgcgggcgcgcgggccgggcctgcccctccgaggcgccgtagcgcgggagggaggcggcggcgctgtggtccgtgggtccgccggtccgtgggtctgcccggccgcccggccccgccctgccccccggggcggctcggctccatggcccgcggcggcggcggcggcggcggcggcgggaggcgacccgggggccgcggtggccgctgaccgggcggcgggaggcggcggggccgggccatgggggacggaaccgtccgcagccgccggagccgggagccctgcccaagtcggagcggcgtcccctgctgagccccgagcgccgggtgagaggagggcgcgcgcggcccccacccagggccccgagattccagacccagccccgcgaggggcaccccgagcgcggccccgagatcccaacccaggagccggtgagagaggcgccggcggccagaccccggcctggctgcccccaccccgcccccactccggcgcccctcctgggcttctccgcccgcgtccagccggcctccctcattgtcctcgctcgccccggcctcgtggcgcggggaggcgttccatacacgtttccccttggcctttgcctcatccgctgccctccacccactccccctgcccccaggctccacacccacccggtctgtgcggcctgcccgtccgcgggtgccacgtgttcagcctgccagccccgcccaaacgcacccctcagcctggccgccagcctgacccagaacccctgcgccggagggagggtgggaatgtctgcacgtgggtctgggtgtgagctgtctgagagtctggatgtatggctgtggaagtccaggagcagtggccttgtttgtgagtgtgggacttagtgtgttactgtcacccgggtgtgtctgtgactgtagttctctgtgtgtctgagtgtgggtgaccagctgggaccagggtgtccctgtgattctgtgtgcctgtgagactcaccctgctccctgaagcactgccagaagtggctgccgctctcttggaaccacagctggagccatcgcccaggcaagacccccttcctgccatgcccagtgctgtgcccatctccaggcccaagcatcccgttccgggaatcagaaccagctgtgctgggcaggacccagagtcttggtcccagtcccaaggggctggctttgaggtcttaagtgaggggtgtcccctgccttgccccgtattttgacgttttgctccagtgggaagggattctgtaaacatccagtctgtatttgggccccccggatgctgagggcaacttcccagcctggtcccagttggcctggcctgcttgtcgctgggatctgaatgaccaaaccacttcccaccatggctcctggaaggactaaatgaagtcatgagtataaagtgctcctgcatggtaggtgcacagtattccgtctcttccctcttccccaagccatgagttctgggttaaggatgctgccatgtgaggtgtctgttctcaggggcacaggggcacatgggggtctataggtaaacatgtctccatgcttaggtacaaaccagtgtggttagagttcacgtgtctgtgttcctgggaatgcgtgagtgtgtgtgtagagttgtgcaataagggtgagtgcctgagtgtgtgtgtcagtgaggtggaggaaggtaaatgtatgtggcttagtagt

SEQ ID NO: 33653 - DNA, 1573 bp, Homo sapiens
agtggcctgggctaggtcactccacctctctgtgcctcagtttcccccccttgagtcccctagggcctggaagggtgggaggtatgtctagggggcagtgtctcttccagggggaattctcagctcttgggaacccccttgctcccaggggaggggaaacctttttcattcaacattgtagggggcaagctttggtgcgccccctgctgaggagcagccccaggaggggaccagaggggatgctgtgtcgctgcctgggatcttggggttggcctttgcatgggaggcaggtggggcttggatcagtaagtctggttcccgcctccctgtctgagagaggaggcaggagccccagggccggcttgtgtttgtacattgcacagaaacttgtgtgggtgctttagtaaaaaacgtgaatggagcagctcccttgtctgtttgggggtgggggtcgggtccctgaacgtggttaccctgagtgtgttgtggtggaagggcacttggggaacctggcccaacaagtaaacctgacccgggccatcctggttctccaagcgctgccactccctaggctttcactggccttaaggggaagtttgtccttgcactgcttccgggacagtggaggcgacgaagtaataaacccgtggacccagatttctcaggtcttaacacgttccctgaggcctaaaggtgcccagggccgagcccaaagtgcttgggtcagggctcggtggagcgccgaggtgagtctgaactcccagccggcacgcgccgcccgccggaccaaacacgggagggggcggggccctagagtcgcggcgtggtttcccgggtgatggccacgcggaagaggtggggctagggccctggttcccactgcctggtttctgggcccccggcatccgagtcggccaaaagccgggcagaagagagcgccaaggactggcagttccggaacgggcaatcccagccgaggggaccagcggcagagcacgggtggggcttgggagagggcggggcccatagaggggcggggtttggtgagcgttgccggcgggcccgcggtacctcccgcactctgacctgcggcccgtaggtccgagccggggacggcggcgtcggtgggtcatgctccggcactccccctcgctgtgggagctggtggaggagcacgttccgctccgggagcgacgcgaagtgaagaggattctgggggaggcggcggtggacctgagcctggagctgcgggcggaggtggggagagggaaggtgggccacgcccctggcctgccccacgactcgggtgatttcccacctctgcgggtccctggccctgccgggtaactcccgagatcctatcctggtctcccctttgactccgccctctccctcactcccccagcccccaccattccggacactcccctccccagtcgcaaggtatcccagctctccttgcaggtggcgatgttacgggcactgctccaagaggctcgatcctctcaagcccccagctcccgccccatctctgacccctcttctcttctggcaccaccgcctctcctaaagg

SEQ ID NO: 33654 - DNA, 2438 bp, Homo sapiens
gaaacagcccttagttctacctgggagcccaggtcagcagcctgcggccatctgccgccacgtgagactacccagcacttgcagagggctcctgcttcatgcctttgccccggcacccgttccatgttttttgagcacccttgtctccacttccacctgtatgtatcctacccatcctcaaaacctatcccaatgctattatcttcatgaagccttcctaggtcctccccgttgctgtcagccttcctactgtacccccacgcttgccacacgtagcaattgaggcatgcttccttgtgcccaagtctggctccccactagatggagagttctaccagggcagaggcgtgattcttctgtgtccccagagccgggaactgagcaggtacagccgcagtcgccgcataggccaagtaaagggggcgttttctctgcggtccttggaaacacttgggcatgctcagtgtcgcccattagtccctagaaccagtcccctcacccactactctccaaccttctgatgctccctcactttggcagtctttaacctttcaggtttttctctttccccactcctcgccctgcagcctttatttcccaacggccgcaccctcacgctcctttcagcggagaaatagaccgcgctttgtgcggaagctgtcagcgagcaagcgtcccgtctcctttaagagtgatccgcgagggggtgtggcttgcggagagcaggcccgaaagggggtgcggctcctttaagtatccgccggcccgaggcgcggaggcctccggccggcgggcaggggcgcggtcggtctgggagcagcggcaccgcccgcagcgtcccggttcctcgaagtggggcgcgtccgctttaatcggggagagagatgtgggggcacgggcgttacatcagccgccacgtgtgggcctaagctggcgtggaggcggcggccccgcccccggcccctgcggtggaaaagtaccggggcgccgaggtccccgccccacggccccgcccccgggccggcaccggcccctcccggccctccgggcaagccccactctcccgcccggcccggccccgccgcctgctcgagatctgcagtggctgccgggtgcggagcgccggccgggggtgggctctccagggctgctaggcccctgccctcacctgcggccgcccggccccgccctaggtgtgccggtaatgagggttggggtggggagggcacggattcttcccagggtagcaacccccagagaactcccggctcgctcgcagtcccttcccaaagccgcggccagagcgcggacaaagagaggctgagtgcgccaggactctcccgcgcggcttcccgggtcccgcgggcgcacgggcactggaaccggcaccgggagggcagatagggaggcaggccggctggaggggccagataggcagccaggctggcgggcgctgagaggcgatggagcgagcgggagcccgcacgctgggtgcaggcacggccgactgtcgacccctgcaggcccccagagcgcagaaccactggctcctcggacggacagtgccacgctctggctccggcgctacccgcacagcctgcgcccgccgcccccgatcgaaccggcgtctggcgcccccccgccaccccacgcaggagctccccccacttccctctccctcccgcttcagctccttggtgacagcggtgacacccagacgcgcgcacctaccccgatctttgcggcgagacagacatcccggtgcgtgcacccacactcttacccacagatgcccgcatacatgcgcgatcacacacacacacacacacacacacacacacgcacacgctggtcctggggctcagccccgcggagccgccgaacactcagaccgacggcaggacagacggaggcgcgggccccagcgtcccttcccccagcccccttaccatgctgcagcccccggcccaggcgtgctgggtccgcaccgcggtgcgcccaggtggctttcttaaagggaaagttgcatcagcctcccgaggctctgtgccgcgccgagttcgcccgccccgccgcgccgctcgcagctcttccacagcctgttgtgttttggtttcggggaggcgggggctaagagtttggtgaaagtttgaagagtggagaaggcttgggagatctagccaagtccctcccctacccgaacggctcccctggccgtcctcccctctccatcccatcccctcctcccgtgccgacttctcaggctcctcctcccagggaataaaattacaagtctctccagctttcagatgattgatccccacgaacccctgggagtgagcgccacaaaggagtccccttctccgcccctgcctcgctgccctccagctggggcccttgagcaagcagatgtgggccccttcgggctaggctggaat

SEQ ID NO: 33655 - DNA, 1810 bp, Homo sapiens
cgggaatgttcccaggcagcactgacctttcacccccacccgcctcggtgcgatgattggctgtctctgccatccccgcttccgggaccagaagccacctctggagcaactggggcatccccatggcaaccatgccaggccaggttgggagaggtgtggggctccttcacagccttttattgccccaaaacaggttgacactctcgtcctggtaaccctcagggccctgcagatcacagtgtccagagaggaggggctgttgctcctagcaggtctcttgattcaggaaaaagcgtttctctggtctcagccagatccttcctgggctgatctgttgggaaacccaagctctctgtccttgggcccctagcccctaccaacaccctcctagcgcattctagcaggagagcgagagggagtggagacagtctgaactcttccctctgcccacctgggtgtgggcttggtgagatactgaggctggggtgtccacctgagtccgtggagggaggagcgactacggtgcggtgggggcgaggccactcagggctttgtgacctagacagaggatttatgtgggtgattagctgtcacgttgggtctaagctccttaccctcagaacctagctttcctgcctgcccccagggctaatccagaggtgggggaggggctaaagacactgggctctgccaggggccttggtaggtgccagtgacccattctgtgtaaccagctgtggcctgttctctgtgtatttctgcttttgtgggtttctctggctcttcctgcctttgaatatgtgcacctgggtttccttctatccctctctccatgtatgccttctgtgctgtgaacagctctgtgaccctgactctgggaagctgtggttgttggcagaaggcagggacaccactgggtaatgggtcacacaagtctcaatgaccggactgtggttgacagaaagtcttggggacacagatttgtagctggcgtggggttttcgataacacagggtccaggtggcaatgtattgggggtgactcagggtttgagggacatggggttatttgtagttgacacacagattaggtgagcctgaactgtggcaaatgcagagtcatctgggtgactcagtgacagcaattcgaaaagaaccggaaggcagcagaacagtagcagtggctgtccacccaccctggaatgtgtggctgtgtctggaggcatttttacttgtaacacctgaagacaggggtgccaacagcatctaggggggcagaggtcagggatgctgttcactatcccgcaatgcactggaaactccccaagaagaaagaaccatctggcctaatgaactgtggactctgaagccaactacctagggtgaaatctcagctcttgcactctgcagccatgggcaaatttcctcatctctaacatggggtacctgggtaatacccatctaaggttgttgggaatactgagccgatacttgtaaagtgttcaaaatgccagtgctgtttattggttcagagctggagaaaacaagagtagacccagatggagggacacatccaggttttcctttctcatttcggcttctacttcagacaggctttttccattgccaaaggccacttcagtctgatgtcatgtcagtttaatggtatcagaggaaaagagagcagtgtttccctgtttcggtggagcactgcacttataaatcctgaagaatggctctgccttggctgagcttggccatgatcacccgtagtttctcgaggtgccatgattgagattggagccacctgc

SEQ ID NO: 33656 - DNA, 1369 bp, Homo sapiens
aacaatatttcatttaggcatctatatagatgacgttctcaaatagtggttacctctcggaggaggtatgggtagaactaagtgatcgataacatttaactcttgggatgagtgttgagctcattttttattatattatttttaaaaacaaacaatatataatgtctaatcctctaacgctattagaatcttcattgccttcaaactcaactgggtcaagaagtccccttctaggtcagactcccactcccttgagtgatggttgctgcaaccatttctggtgtgaatcattttattgatcaaagttcttggctttgcagacaacaggatctgcaatactctgtttaaacagaaagggatgtatcacaaggtattaggtactagataaagctgaattttgagacaatgtattgtggttgatgtagcatcttgggcgatactggttatgagtgacataaggaaggctcttaggtcaggttcccgagaacagagtctgacatgaatattcttgttccagtgatttatgagaggagtcctctcagaagaagaggtgggagagaaacaggataggacagaggaagaaagctaagcaagtgtgtggatactgtcttcagcctggacccacagggagcactggagcataaattataccacagaatttgtttctgtttgaggctggtgggatgtccctttgtaccccagagagggtgcagaacttcctgaaggagttgactgcatttggttgagaatatgtgattatttagagaaggagcagctcactgtcacagcaactggggcagggtgcactgaccagggcagagcaccaacagtgagccaatgccaccctgacctcatgggggaagggtggggataacctggggccagatcagaattaggtgggggtgggacagagcaggacaggagaggctgggaggagcagaaccgagagggtctgtgtttcctgtgtaccctggaagcacaagcctgggttctctgagcctcaggcagcactgacctttcttccccatctgggcatgagaaggacaggagaagccctttcctcagcactttttttttctttctctttttgagacagagtttgctttgtcacccaggctggagtgcagtggtgtgatctcggctcactataatctccgccccctgggttcaagcaattctcctgcctcagcctcctgagtagctaggattacaggtgcatgtcaccatgcctgggtaatttttgcgtttttggcagagatggggtctcaccatgttgtttaggctgtctcaaactcctgacctcaagtgatatgcccacctctcaaagtgctgggattacaggtgtgagccactgcgcccagcccctttc

SEQ ID NO: 33657 - DNA, 1520 bp, Homo sapiens
tcctcaggacctcctgtctctctctttccaggaagatccccaggtttattcccttgagggatacttctaagctggttcctgcttggggctgtgttttgggcttcttcgtagcccaaagagtgcagctagctcctgtactagtgaagtgccacgaagctggcctccaggaaatccccacgaggccacaacccacagctatctccatcagaggaggtgcaaatgagggcccacaccttactccattttggcagccgccctaggaagctctgcctttatttcttcatcttcaagcttatcacaatttgaagtttatctcttcacctccaagcttagcacagtgcctagtacatattagcacttaatgaagagggggcaattcaaatcattaactcatttaataaaaaaatagtaaatgtcccacgcaccgtgctaatgttttacaaggattcttggtatttcatttacacaggtgccattacaatttccattcggcaaataaagaaaaaggtccagagaaattaagtgacttcccaaagtcacaaagttctggtatctcttcactgcctgagacgcaacggagcatcgtagagggaaaatgccagaaagcaggcagtgcaccaatgaaaacaggctcgcgggagaaccaaagggtggcaagctcagcacggccagtagctttcaccctcggttgccagtcggcttcgtttcctacaacaccgaccggaagtgtttctgtcggccgcgttccgaatgagcaccgccggaagtttctgccgcggctttgcggggacgggggagtggtagtgggggctgcagctgccggacccaggtgcggaagtgcgagggcccaggtggctgaaggggccgttaggaacatccaagcggtggggcacaggcagatccccgacctgacctggaccacccttctcctcttggcccgccccttcaactcgcctccgcttaggtctggattggccccgccccctgacctgagcctggtccttcttcaggcactgacccttgacctccggtggctcccccatctctcaggcgcgatggctacgggcgcggatgtacgggacattctagaactcgggggtccagaaggggatgcagcctctgggaccatcagcaagaaggacattatcaacccggacaaggtagcaggggcacctgaaagcgttgactaggggagggtaggggagtgaagatggggaggagtgacaacgggcaagggatgggtgctacacttacagtgagttgggcgataaaaggggtgacataacaggacagggaatatgtgtcatccttgatgggagggaggagatgggacatcgtgggagatggtgggaccaagagggtatgacacctctaagagctgagaggaccaggcaagtgtgatttttgcaagatattgttggggagagatcaagacattgtaacagtctgagagttggtgggatggggaggggactgctctgatttgggcgtaggatggtgttcctgggagtgggtttctg

SEQ ID NO: 33658 - DNA, 1049 bp, Homo sapiens
ggaaagataggaattaagatgcctcccaggtttctggcttgagcagctgggttgggtgatggtgatattgactgaaatctggactggagaagataatgtttgagagagggccatgagttcagtactgagctaagtttgaggttccttggggcctccagtaggagatgtccaaaaggcgaccagttttggagctggttgtggtctttaactgagaagagagacttccctgatgtagtctagcactgactccttccttgggtctctgacagactcagctcgtggtagtgctatttgtctctgggggaggtctgtggaagaagggaggaaggggcattggcagggctgcgtatgttggtagtaggattcaggcccagcttctgtagagatgcctgaccttggcaaactctgggggagtggcaagtcccactgtgcccactgggtggcagtagtgcttcagatgagttgtatggactaggggttgctgggcctttctccaggtaattagccatctgtcctactccagagttgacctttggactccacagaagcacttacatgtgggcccctcaccttaactatgggggcaggagtgtgtgtcccatgactgaggctctggagctggagacagtgaagttgatcctggaataaatcagaggcaggctacagtcccaaaccctgctaggacctctagtcaagcagacaagttctttcctcactccatgctgcaggggcacaggcccagggtctggcaacaaacaggagcagctgtggtcactggggcctggagcctgctggacatgacatcatgcgggcatgcccctactgtgtccctctgtgctagtagactgtgcaggtgcctgtgtactcggagcaggagtaccagctttatctccacgatgatgcttggactaaggcagaaactgaccacctctttgacctcagccgccgctttgacctgcgttttgttgttatccatgaccggtatgaccaccagcagttcaaggtgagccattgtgtatttgcatgggtgcccagcttctgggtctagc

SEQ ID NO: 33659 - DNA, 1131 bp, Homo sapiens
actctatacccagccctggcctagccactggagacacagagaggaaccagacttcatctctgtgatccagatggccatgtctggaaggaaatacacatggattcagtttcaactgagataagtgatttcccaagtgccaaggaacctcaaggcaagagactgactgctgggcttctcagcagaagtgatacctgaggtgaatcttccagggcagggaatatgtctgatgaagatgactgagggacatttcagacagaaggcaagccatagagcaaggcccaaagccaggggagtgcgtagctttttcagcacaagaggagtagtaagcagcagctgcccagtttcatgggagatcagcaggagagggggtatgagtcaaactgcaaacaaaccaagtgcaaagcacctgtccaccagtggaaagcaaacaacttcacaaatgatgccacaaagcatggaactaagtccaaggtcattgtcagtgtggcacaaatacttataaagctttctcttccactgctcctccacatgtttgcttagctccagcccccacacacaccaaaagcatgctgccctccctgctgagaaagcattctctcctcctcctatccatatcccaccttccttgaatgcccaggtcaagactcaaatcctcgccatacctagcctcaccccccttgacctctctcttctctaagccccctgggagccactaccttgacccccggtgtgttctcctttctctgagcttcctctgactggtagcatgaggttcctgaggctgttccaggactgctgcccttaggtcagaatgatttatgggggtgagtctccctagtggactgggcctcctggagcaaggattcctctagagcagggatactctgctaggaaagtacagttttctaagtgattcattctctgccagggctcactatcgtagccacacatggtccttgccggtccatagcctgagcaccaactccccaggtgcttgattctacataagttccagtctctgccctcatgcccaaagggaattggactctagtttccatggctcttcctcacatgagccaggctctcctggagcaaggcaggaacaaagccaacttaagtgtactctgcctc

SEQ ID NO: 33660 - DNA, 665 bp, Homo sapiens
gactttcccaagaccctacaactagaaagcagtaaagccaggaatcgaaactaggtctcttcattctaaaagccctgttctttccacaatgccacacagcttctttgaggaagggctgatcacctcactgtctcctgtgtgtcctctactctcaggctctgcccttcccctccacttccccctactggtacacacgcacctctggcctggcacgggtcacggctgccatgtaacactgggctgggctccaggccagggtgaacccagccgggcagagaaagccctgggaatgagccaggccatcacctgggagtctccacagctcacaggacatggctgcaggcataagccctcccacgggtgccctctgcacagctctgagcaggagtgtctgatctggcagcgacctgctgtgcagggggcaaatgacatttaatttcctcttggtttccctatagtacagatgaaaggccgtcacctgcgtctgggtctggcggcacagctggaagtgttcccagacatgctactctggagagttcccaacagaaaccagaacacaggcagtgcagagggatgctccatggtccaggctgctggtgccatgttgctcaaatccctagtgccaaagttgctcaaagtctccaaaagacactgtatatgcatat

SEQ ID NO: 33661 - DNA, 1330 bp, Homo sapiens
cagttttacagaactatcaagtctgagttgtgtcaccctttagccagggacactgagaatttatcccacccactcatagttgcccttcccaaagccctacaaagctaagcccccagagtccacaaatcattcaggcatgggccactatgccaggtgaagccttgagttccccagccttcaactcctaagacctctgctccctgactcatcatcttcactggggtgttcacagcctctcatgtgctcttaggaacccgaccaaagaaacctaattcagaccaagcagaagcagccaccctattggcatggctggggaataagaagaatatgatggcagggcatctttgcctcttgaatctgccagccccagttcaggagcatagtggctcaggtgccaacacccctgtagccttcatgtgcctctgcatctgtgaagagacacttatggagctgtctccgcatgtgacctgtctttcccagtgcctggatctgcatagcatctgcactaggagaactggtggtttgctttagcacaaagtaatgtctccattaccctggctgggaattagaggacagattggcaagcgctgacaaaacagaggtcactcaccttacaggcatggaaagttggagattaattctctcctctcacagagggaatcagactccaggatagtggaagggaagcaccaatattgagaaaccctttcactgccaagcagcagcaacagcagctaatgtcacccgtaccaatatcagcagaaaaggaagataaaaggccacaagccctagagaagtcctgccaaggtggcaagggctttgccatctagctcctgcagaatcccaaaggacagaagagcctggacatgactaggattcttcaagcattaggtccaaaaggcagacagctgcaagcactggaatgcaaactccatgaaggcaggatgtctgggaagttttctttctttattcactgctgtatccttaatacctagagcagtgcagagcacatagcaggttgtcaacacatctgctgaaagaataaataaatgagtcaatacagctcaaaggccacttccacaggggccagtctctccctatcacaagacctcagagaagagggaggacagtgtgggttccagaatagacagggaagaccacatggccaaaggactggaattagatttgaaagggtgagggggattgggacaagctgatgggcatagggagattctcatattaaattgaagattcacatattcattcagcaaacatatactaaataactaaatacagtataatagatgttccaacaaaaaaagaataaata

SEQ ID NO: 33662 - DNA, 1570 bp, Homo sapiens
tagaaaagaggctgaaaatagacactgctattctttatttgaggagagtatgggtgcaaagtgaattataatttacccttattgaaatctgaatttttcaaaaacataataccaataaatgaaggagaccaagtcttagaaaccacatcctcacctgaggtgtgcacacctgtgtctccctctgtatgtacatgactcagaaacagccacagttcaaacatttttacatattcaattgtaaataacttcagatattagtggcttctgtgaagctgacccttcaagggcaccaaacaaccaaatgatttgtttgtagctacctgtagacacacatttgtcatgaaattaatttaaacaaatctcaggttatgtgctagagaggtcccctggaggcatcactaaggaagggcctagaaatggaagggtgccaagcccaaaaaaatctctctggatagtactctggttctatcagtatgttgataagagggcctgatctctctgtgtttcccagagaagcagggcctgcctcccagtcacctgctgtatctcaacagcttattaggaggttgtggatcagaataatactagtactagttctactaataagagctaatacctataagccattacatatcaaacactgttttgagcacttaatatgtttaactcagtttatcctcccatcagtcctataagattggtactattattaaccccactttgccaataaggcaactgaggcataaagagtgcaagcaacttgcccaaggtcagactaccagtaggtagtcaagactcaaatccagacagtccagttttggaatctatgcttttaactactatgctctactgattctcatcagaacagcgtctacctcagcttccctcactttgaaggtccagagtccacattctgggacttgggcacatgcagccaaagcctgttccatcagtcacccaacaaagtggaggaaaggcatgtgtcttgctcaggatcacaagatgaatcagaggcttggttagacaaagaccatttttcaaaccaattcaaatattgccttaagatacactagctgggggtgaagaaatggcggtgagtaacaagtgatcaagacaggaccaggcccactcaggcagactgagaattctggtcagactacttggccaggagccagggaagctggctgggctacaggaggccttgctcaataatccccatccatagccccagggactgctgatctcttcacagaatactgcatgcctgtggggtggttcatagattccctgttctctgcccacaaatgatggccagcagccaggaaggtaaacagttgtgctggcatgacaatagatttttaaaaattcactgactagtaagcaagcaatacacaaacggatacccgccccccacccccgcaatgcactgaacacatttctcacacactgtcccatatgatcccacatctccgtaagcaggcaggaatcactcccctgttttgcagatgagaaagctaagagggtcagctgttgtcaaaccagtcccatcacttgagaacttgttagaaat

SEQ ID NO: 33663 - DNA, 1301 bp, Homo sapiens
agctagccaggttaggcccttattcactccttccaccatcactactaccaccgcttcagatttacaaagaggtaaactgctaacctggtgtgtgggcatgtgttggcgagagggtcaagggaatgttctacccacaatctccatgctccatttctagcctctctagtcaaacctttttcttctctagtaatcccagtaagtcaacccccttaataaactcacccatcctgtcttgcaaagctctgccccgctccccctccgccagaacattactcagtagattaagtaagcatccagggtaagcacatgggccagcaccccaggttgcataaattctgcgcaccgcgaccctcaccccgcatgcattaaccagggcccaatcttggcggggccattcagcatcacccaccccggggtgttgcccccaactcgggcccatccaagtccaggggagagtaaggggaggggcggggggccaggagaccagccctccttcccagggccgcccccgccccccgtcagcagcgggagaggctgtcgccatggcaacgccccctcctcggggccagcgcggcaggctccctccaggtgcaggccccgacgtctccctcggcctcagcaagcgctcagggcagttggcggcggcgggcgcggcccgcgccgactgcggcgccggccaggcagaggcagggccagctccgcccgctccccaccgcccgttcccggccgcctgaacagcggcagccagcaccacgagtccacaacacaccgactcacctccgcgcactctgaccccgaccgacgcggcggacgggcgggcgctgtggccaaccgctgagcccgctgccgacccctttgaccaatgggctgcagtcaggcggggcttcttctccccaaacgctcgctctcccgccgacatgcgcgctaaggtatgtcaagatggtgactcccggccgccggccttatgggacttgtagttttgacgttgcacaaactcagaagagaagacggggacggggacatcacttctgatctgtgaaaggaatttttttaaaatgaaactttctatggcctacagcgatctaaccaggatcacagacacacattagtggagccccccatctccgttttcccgccctccaatatacccgtaaggtgaatgtgggctcacaacgtgacagaattctatttacatgactcctcatgattcgttcattcaacaagtaattattgtcatctactttcggatgtgggcctgggggagacctgagacaaggagggattaagctaagaggaaaatg

SEQ ID NO: 33664 - DNA, 2175 bp, Homo sapiens
gaacaactcagggctgacttgcctttgcccagtgccatgctgggctctgggttcacccaaataattcacacacggccccaaccctgaagtggtcagtccactgataaaaacttcacaagcgatgataacggcgcagagatgaatgtactcttacacaaggcaaagctatttttcagttagacctggaaggatgagtaggagatacagaggtggagatgagaaaattagcgacctttcaatgtacactttcaggatctagaaaaggattgagtgtgagggatggagaaagtggggtccaggacgactctcaactttcttctgtgggcacacctgagtagatagtggcttcctcttatgaacagggaacccaagaggaaggcctctgtttggaggatactgagttccatgttggccatgttggccgtgtgggtatgcagtgcctatgggagctccaggggccgtgcagcagacagctgacatgttgggagtcctctgataacagaactggatggcctaggggttgggcggggatcgcccacaggcgatagggaattcggacgccttgtcccctgtaaagcacccaacgcgatgcctctgccctaagggcagccgcgagaaaggcaggcacaggaggcgggagccggggccgggcgatggggcggaaggagccccgcagcgggaggggtcgtggagtggggtggaaggacttcgcagccgctaaagattgggtgggtaggcttcacgggcggtgggagggaccccggggaggcttctgccggttgctacccgagtacaaacggcagcttcctggtctctgtccggccgcccccgccgcattgtgaactttcacccccagcgcgcgacggcggcagatcacgtgattagggccaacatggccgccgccgccgcttggagctgaagtgccgccgccgccgggcagccacggggaatccgcccgcatcgccgccctcgccggccgggcggccgtggggcccagagcgccggaggccagggctggggcggcaccgcgcagcggccacggggtcccgttagagcagcgcccggcggctatgccgagagcccggagcggccggaggagcagaggggccggcgggagggaggaagtaggtttgtttacgggctgtttggggcggagcagctttggtcgggggtccggtgctggggcgggggccaggactgcaggccgcgcctgacgctctcttttcttttcttgcatctgcccgcgatcttctcccagacctttctgcgagtacgagccaaccggcagacccgactgaatggtgagtcctgcccggcccctccctccgccccacccccggcctcctccctccctccctcactgcctgccgctcctggcttgcctgggtctcttcgactctggggcccgttggcttcttcgcagtcacggcgcctgagtatgtgcaaaccaaagctgccgctctcagtttccccgtctgtctaatggaggtatggcgcccagctcttgcccaaacctctctaaaggccctgaagaaccctgggggggcaataagtgccggagaatgaggaacgagctacacaattctactcgggagctcagctttgaatttgcaaactgctgggacctcactatacaaacctgcagggcgctgagaatgtttttcttccagtttttaatcagtgcccagtagtgtgaatacagcccctctgctgagacttgacaatacagtgagatctggagttcccacggcaacaggaactaactcatcccagggctctttgagttatcagtcggcccacatttcacaaaggtgatcagcgtgggctcgacagctcttagaggccttctctgaaagcaggccgtgtatgcactacctagcagccccccttttggattcaaacctctggagcattcctgtttgctgaatacaattgaatgatcctagctttttgtgcttactggggtgtggtatctggggggtggctgtaaggggtttagggtctctgggtcagctggtaagtgagagaggccatggagttcaagatccccagctcttatcacttggtttctgctgccaggctgagccctagtctggaaaagggagaaattcatgatgggctggcgccatgttaagcaccattctcacaacgcctctgagaagagtattacacacc

SEQ ID NO: 33665 - DNA, 881 bp, Homo sapiens
ccctctgtcccagcagagatgccatccaccagcaatggtgaaagcagcaagcaggaggccatgcagaagacctgcaagaacagcgacatcgagaagtaagtgtttggccaggagagagccctgggaccacagttcagtgggaggaggggccctttgctagcaggaaggcctgctgccagggcttctggccctcccaagtgcagctcagtgctgctgccctgggcacacggccggcagtggagcccagctggtgctaagcgtgactctgtgaattgatcactgggccacggccccagaagccttggcggtgggaggagcagtccacccgcctgcctgcctgcctgcccgcctgctgcggcggccttcgcccggggaatgtgatgtatggccgcccagcccagccggcacacttgattcatctccagtttctgtttcttaatcgggagctaaattggtttcatttttcttgtcccgggtggcactcgcagtggattttaggcaggaacattgggtatcatcacttctggtaggaatttttggcctgggttctctggcagaggaaaagggatccattagcactttgcccagggctgagcaacccctggcctggatccctgggaaccacaaagatttggtatcagctgggcatcttcctgccttcccagaagcccaaggaaggccagttctggcctcaggagatggcattgtccagtctaggctgcctggtgctgctgccattggtcattgcttaactccagtacccaccccaccttctgactgcaggctaggttgcctggggttaaaaggcagcctcttcattccagggccagtgttccatctttgcctcctgccaggagagtggattggaggccggtgcaggg

SEQ ID NO: 33666 - DNA, 563 bp, Homo sapiens
gccctcacggcagcccaggggagagggcaccagagtactcacccttttgtggtagatggcactgtacttggcaaggttcttgtccttgcagccaccccagcccaagagaatcaccacaggctgccgagtttctgcctccttcccacctgggctggggctgttctctgaaacacagatgtggactgtcaacaccagagctggggtgggggcgggggtgactgcccaatccagagtcagcagcactccggctgctgcaggcagggaacaacgggtgccaggcccaggcatcctgccagcacgcatgcaccagttcccaccccgtgctgctccagctgcctttctgcaggaggcaccatggggtcaccggacaaaccaacacaagggcacctttctttagagactcgaagacagcccaagtgaggaaagtaaataccttgtccacgccctttcctcttctgatccagggctcagcgaactacaaccccggggccaaactgagcccactgcctatttttgtatggcctgcgagctaaactaattttcacatttttaaatggttaaaa

SEQ ID NO: 33667 - DNA, 1824 bp, Homo sapiens
aggaggtaagttttatggagagcagagtataagatcaaacctttgcattagaaagatcactgtggtagcagtttaagaggctgggctgcaggcagtgagacaggaggcgtgaaggcgatgctggactaatgcaagtgagggacacgctggcctcaggctgatcatacttcaaggcccttctgccagaattcccagagagaccaaactttccactctctggaccccgatctactcacactgtcatggatgcgggcctgctgtcaatcctaattttgtggagaatcctacatgtctttctttaatgtaaggagagaaacaatgctgatcgtaaatgccaattactgaactcactccatgccaggccctttacacaatctccagatggccccaacagccctatgaggaaggttactatccttatcccggttttgcagaggaggaaactgaagttcagagaaggtagcttaccaaaggtaatccagctcctaaaggaaggagtcaggatttcagtcgagttctacccgacggcagagactgcactgttaaccactgccgagaagagtggagagggacggctaagggttctgagtcccgggcttctgcgaggatcggtgaccccgcgagcctccccctccacgccttcgggaaaataataagtgataggctagatgtgggaagcccaatcccaaacaaaggaatcaggagggatccagctttcggcagccttcagctatgagaagtgattaaagggcatggacctgagcaccccggacaggaaagacagaaaaagaggtcccaagcgagcagctgactcgggcagaggcggggctcgccagggaggaacactctggggcgggacttacgaggggcggggctctctgagcctctctaagtctaggacctgccagaccctatgagggggcggcccgagggagggcggggccgcatgaggggcggggctacagctgcgctcgcaacccacaggttcatgaggtcacctccccgcgcctggacccaaccctcattccatactctggctccagcagggctgatccgggatctcgatggtgtagtccagctctgccgaggccatggtgaaggcgccggcccagagcacgggtctccagccggaactcccgcttgcgcacccgtgcctcacccgggcgcctcctgggcgccgcccaatcaccacacacctcccccaacacggcccaatccctgcgccgcgctctgtgacctcccgccttagcaaccaccgagtctcttccagagcctctcgcctcaccccactagctcggccctagcaaccatgccccgcccctattactgacccgcagccattggctaattcgcttgatctggatcaggtattggtcagccggggcgccggtcaggaagagtccccaccctctcatgtaggtgagaggcggctgaagagttgctgtattctgggaatgggcagggtcactcgtccgaacagagtcctatcctacgcggcggaagagtgtgccctttgacttgcatcgtctacctacctctgccatcctctaccagccgcaactgcgagggctggaggtataaaaccgtacaaaacggcctagggggcgcgtgccgacccaacctccacccagtggggttgaggcatattctggatggatggatggatggatggatggatgggtggatgggaagcagtcttcagttgatgactttagagaatgccctgttgatagggcccaccgaggagctgggagtgcaactttcttgcatttatctatatttacatactatgtgccagcatatttacatactatgtgccagaga

SEQ ID NO: 33668 - DNA, 1134 bp, Homo sapiens
ggcaaaggaggacgaacctgcaaaggtaatcaagatgaagtgtccaaaatggtaagaagatcagtagtagtatgtggtgtttcagaagccaaggaaggaaagtgttgaaggcttatgactaatcaagtaaaataaggcctgaaagaatccactggatttagaaacaaggaagttgttggtgacctttacaagtgcagtttcagtggagtgatgggagcagaggtcaaattacagtggtttgagaagcagatgggattgaggaagtgaagattcatgtaagatacattttcagaaagcttggctatttaggagaagaaaaaagaaggcaatatccagcaggaaacacaggtttttattcggatggaagaaatgttgatgtggatccagcaaaggggaaaaagataaaactataagggaaagaagataactgagaatggtgcccttgaaaaaaagacttcaccaaagtgttggtgaagaaattcacttagaagggtggaggaacatttgttttgtggcagaagggaagcattacgttgaggttaattggtgggtttggtgacaggaagctgagggaattcttcgatggtttccattttctctgtcaaataagaacattatatcagccagtgagagtgggattggagatggtgtgcgagattgaaaagagcagagaaagattaaaatagcagcactggagagtggcagtgagatgactaaggtagcaaacagatttctgggcagttatcatggccctgtcgaggttagtgaccattaattttcggaagcagcagtctgcaaggttgtgtaatatgcatttttccctcaacaacattcagccacctagtggtgggtacacagaggttagtttaattgatctaggtttgggttttaccaggcggatacaatggaaggacaaaggacaaggaagttgaagattgtggcaaaacagtgattgaaatgaagggccttagtatctaaactggataggagagtgaaaaaaaatgtatggactagaggtcccagtgaagtcagagaatccacatctgagatcattgaatgagggagttgtgatcagaaagtggaagaatgaagtttgagtagtttccggtgatgacaaggtccactgtgtggccg

SEQ ID NO: 33669 - DNA, 828 bp, Homo sapiens
agatgaaggcagaggatttcataggaaggagatgggggaaaggagttcttgtggggagaggatggagaaaatggacagatgtgaggaaaaggtgggggcagatggagtctaccaggaagtgatgagtagcaggggtaggggtatctgccagggtatgactggggagcagaagagggtccatgagaaggaagtgacaaattggagtgcatatgcccctgggagagaaataaggacaccttgtttggaagtttgaggagataatgtttctctctccctatctctgaatggagaactgagagttaggagtcagggacgggagcccaaggagaaggcctgtctcattctacatgtgaaacctacaggaataggaggcagtgacttgcttgttgtctccgaggccatgtggggacagtgagccaggctggcaacccatgccttggaggcctctttgctttcagaaggtgtcttttgatttgccgggggggtggggaagccctctgggaaattttatttagaaacaagacctattgacctcttgatttttaatacctccccttcgcttgttgccaaggacctttggcttagcatgagagctgaggcttttgagattgtgtgattttagtttccctgcatgaagaagaaccatttggccactatagaaatgatttatggatgagtccagatttattaatcacctctgaagatggagaggaaattaaaaacaaagagtccactctgggctgaagacaaagtaggtctgttatccttgcagaagactttgccaaggttagaaggccacaaacaaaccaatttggaccgaggttctta

SEQ ID NO: 33670 - DNA, 1561 bp, Homo sapiens
gtcctagctactcaggaggctgaggcaggaggatcgcttgagcccgggagttcaagactgcattgagctatgacggtgctgtgcactccagcctgagtgacaagagtgagcccctatctcgaataaatacactgataaataaataataataaagataggtaaaaatcaaggctaacaagaaaaatgcctaaatagaggggttaaggatacaagggaggcaggagtaatgagtagaatgagggccctgagaaggcggggtggatggaggcagagctctggtagatggctagagaaggagaggagaaggatggatgtggatagagatgaagaaagaagaggagtatgacgacattcttacctaatggcctataactttctttgttaaacccaaaagtaggccttctgagaatagatggaagaggtgggaaggtaaggagcttggaattgtagacttcataggtgggatggtgctagccagtcacagatttggggtgtgggttttgggtatgaaagctgtgttggttggaggtgaaagcgggaggtcgctggagtctgcattccatgtctcttctctgtgcgccaacagaacctgggatatatcccatcagagcgctctccactgttcattaaaatcacctttttgcttgtctctctgccctgccagtctgtaagcacccgagggcaaggtctatgtttgtcacgttaaccaatcccaagcccagtgctcggctcagagttggcacctgggaatctgtttaattaactaatgtgcagagctaaggaaattaaagtgcacattctgagcacagtgtgttggatgtcagtttaaataacacttattgagtgcctgtgttttaccagagaccctgctagccacccaaattacaaagatggagcacactgatgttgaaattgcctagtggctcttgagtaaacaggaaggcttacgtgtcaaagtcattgatcggcactgcggcaaggtagagagggaaagacagatggcctgacctcagaggaggaggaagggttcaggaacagtagtagggatttagagaatggtgtttgaggtgtaggatagtgggcagcccccttcctgatttagaagcagcagcagcatgggttgaggcaaggggtggggtggggtgtcaggtttcacctggggccgaatttagatggaaattctttggcctgaaatgtttgaagctttatcctcaggtagtaaggaaccactgaagagtttgaagcagtgaaatctgtcagatttgtacttttaaaaatctcacatcaaagcctggcctggtggctcacacctgtaatcccagtactttgggaggccgaggcaggaggattgcttgagcccaggagtttgacaccagcctgggcaacgaagcaagaccccacctctacaaaaaataaacaaatataaaaataaaaattaggtgggcatggtggcatgcacctgtagtcccagctactcaggaggctgaggtgggaggatcactcgagcccaggcgattgaggctgcggtaagttatgattgtgccactgcactccagcctgg

SEQ ID NO: 33671 - DNA, 1522 bp, Homo sapiens
gggattacaggcgcctgccgccatgcccacgcccagctaatttttgtgtttttagtaaagacgggatatcatcatgttggccaggctagtcttgaactcctaacctcaagtgatccacccgccttggcctcccaaagtgctgggattacaggtgtgagccaccgcgtccaccgcgtcaggctgagagatcaagtcatttttagtttttagtcttttttttctttttatttttggtcattgtttggttttagtttttagtcttgaaatgttttcttttgtataatggtaaaaaaatagtaccccagaactttttcggaaattttaataattgggaaatccaaaaatctaggaaccactgggctaaagtgatcataatttaaaaaaaaaaaaaaccctttaaaaactaaactggccaagcgggaagcggtggctcacgggaggttgaggtgggtggatcacttgaggccaggagtttaaggccgcagtgagctataatcgtgccactgcactccagactgagtgacacagtgagaccgtttctagaataaattaattaaaaacaaaacaaaacaaaaccacaaaacaaaaccaaattttcgcacggtggctcatgcttgtaatcccagcactttgggaggccaaggcgggcagatcagcctggccaatgtgggaaatccccatctctattaaaatacaaaaactaacagggaatggtgttgccacctgtagccccagctacttgagagactgaagcaggaaaatcccttgaagccggcaggcaaagattgctcactacagtctagtctaaaaccccacttccaaaaaaataaaaaacgcacactcacaccattacaacagcccaaaataaatgttcaaacaaaatgttgtctcacacctcgcaacaaacacacaactttctatctgatttttaaacaccgttgatgaaccccaccaacatagggcttcaaaaaatttgcttgaaactcaaaacggtttctctccacggaaatctttagtaaaaggcgaaagatttatacgatttgaagagaaaccagagcatgtgttggaatggttgcacacagtcctcgggggacggtcactactagattagcaatggttactattaacccaaaagagtgacttctgtttttgtctcagacgattgtgtgaaaggagcttcgttattatggtaaaggaaaagagggggaaaaaagggagaatctccttttaaagtaggacgtggtctgtgtgcagtgcattgtgggtatgtaaatgacgctgagtcaccaccccctcggtttccagaaataccttaaatagttcgttactttttctaggcgttaggccaccaccagggggcagagcggaagccagatttacagaactgtagatgcctggtccaactagacagtgactttattttataattggcacttaaagtaaaaaaaaaaaaaattaaaagctttaaaataattgtattcataggcctggcgcggtggctcacgcctgtaatcccagcact

SEQ ID NO: 33672 - DNA, 746 bp, Homo sapiens
agttcattatctccatttcctggtaccatgcctagcaggtggtagacttcactcaataaatatctggtgaatcagtgtctttctggaaatttatacataactccttgaatgaggcaacatgcttctgcactatttaataagaaaaactaagtcaagtttctaatctgtggttttgttttgctttgagaacagggtcttggctatgttgccctgtctggtctcgaacttctgatctcgagcgatcactcccacctctcccttcctaagtgttgggattaacaggagtgagccaccgcgcccggccaagtctccaacttgctcgaggtcactgaacttgcaattgaagaagctacgattcgaacccatgtctgtaggatcccagagccctcattgtcaaatacatactgaagtttcccagttttcgggaaccccgcagtacaaggtgaccgaggacaataccagaaatgggagccccagaccccacgtagcggcgaagttcccagaaggcacagcgctcgggggtgtggccagacgcatgggcggtgccaagcgtaggaagatggttgggaactgcgtctcccccaaggctccgcagggcgccgctgactggcggaagcgagggcggggacagcggaatgacgttttaaggacgcttgcgcgcgggatttaaactgcggcggtttacgcggcgttaagacttcgtagggttagcgaaattgaggtttcttggtattgcgcgtttctct

SEQ ID NO: 33673 - DNA, 2257 bp, Homo sapiens
cagtggtgcgatctcggctcactgcaacctccagctccctggttcaagcgattctcctgcctcagcctccctgagtagctgggattacaggtgtgcgtcaccatgctcaactaaattttgtatttttttagtagacacgcggtttcaccatgttggccaggctggtctcgaactcctgacctcgtgatccgcccgcctccgcctcccaaaagtgctgagattacaggcgtgagccaccgcgccaggcctaaaaattttttttaattaaaaaatagatatccttctagctcagaaaagttagctgatccctcctttatactctcttcctaagttccgttcattctggtggctttaattaccatttataagccaacgattcccaaaataacatcttcggtgcagatcccttataaggatgaccagtcattaatattcagcttcctatctgttagtcccactcaacatgacttagcaagatctcaaaatgaacgtgtccagaacagctcctaccttagcctaccccatctcagtaaatggccccaatatttatccgattgatcaagtgacaatcttaggaatccttgacaccgccctctccctcaatccccatgtccaatctaccaccaaacccttcaaaacaaaacccaagtccacactcgtttccaattccattgccttccactctttttcaacgcagccgcacccacatctcatcctaaacgaccgcagcagcctctgaaactagtctaaacacgcccagatctgccgacgccgcagacccccttcccccagcccagggtcggaggcgagtcgccgggggtcggcagaggtcagcagcctgcgagaccctcctaggctcgtggccctaggcgcggcagctgacacgtaagtctcgtcgcccgacgttgtttcggcgctcagaaacaacgtaaagtaaaggggcggggcagcgttttacaaaccgaaccgtgaatctttgcggtttctctttccagccagcgccgagcgatgggtgagtgtcgctctgcattgaggcgggtgaagggaggttgagctcaatcaggccccatcctgcttcacagcctactgaggagtccagacgccccgacccccggccagggacagccacgaggagtggtggccctcgggtttcggccgcccagcccgtctctgggggctgcgaaggctctgggctccgggttccgggccgcgggctgcgggctccgagcggcgccaacatggctgccgcgaggaggaggccccggcctggccgcacgtgtatgatgacaactcggtaatgctgcatactcccgagtgcgcggtggggaagccaaccttggagagctgagcgtgcgaccggcccggcgcgggggtctccgggagctggcgagtcgctagcaccgagtcacagtggctcaagcttccttccccgcttccacatgcaggcatctctcgggacaactggcacaagcgccgcaaaaccgggggcaagagaaagccctaccacaagaagcggaagtatgagttggggcgcccagctgccaacaccaaggtgggtgcgagcgtgggcctgtccgcctgggaggtcgccttcccccgctctccagcgtgctcgggtctttccgtgtgacagttgtgcgttctttcttgggctctgatttctctgtagtagggcctgggtgtcctgtccccctttagctgttggataagtaagtaccaaagagggaatgctccctcaggcccccaaacctggagcttaggatttcagagagaaggatactgtgtggggacttgagcttctggagagggtggcgcctcgcgtcatagtcagaagcctagtcttgttttttttacagaggcttaattttcagcatttggggtcaggctttcctcttggaggcaagtagggtgatgaaaaagaatccttaggcgtggttgtggccgtcttggtcacctgtgtgccacttgccaatgcaaggacttgtcatagttacactgactgttgcctcctcccggcccaggttcctctccctcacttgccttgctctccttggtaacctagttcctgtaaccttgtgttttccagattggcccccgccgcatccacacagtccgtgtgcggggaggtaacaagaaataccgtgccctgaggttggacgtggggaatttctcctggggctcagagtgtgagtgaggccctttgggagtgggtgggaaaacgcacctaaacggtcttaagattcaccaagtgggcctg

SEQ ID NO: 33674 - DNA, 1957 bp, Homo sapiens
taatcccagcactttgggacgccgaagcgggtagatcacctgaggttgggagttccagaccagtctgaccaacatggagaaaccccgtctctacttaaaaaaaaaaaaatacaaaattagccgggtgtgatggcgcatgcctgtaatcccagctgctcgggaggctgaggcaggagaatcgcttgaacctgggaggcagagtttgcgatgagccaagatcgcgccattgcactccagcctaggcaacaagagcgaaactctgtctcaaaaaaaaaaaaaagaaagaaagaaagaaaaaagaaaatccaattcccattcactttctggcctctggctgctgacccaggcccgggggtattttcagaggaagggaattgcggaccccggaggaacccgaaatttgcccctcaagagtgtagaagtgggtagcggaagatgtggcctggagcatggtaaaagccttgaaattccagactctgcttgactcctaaacctggcaaggcagccctcgggccaggcaagccaggcgcgagactgtgccttccttccaggccctaaagagggcagcactgggccgggccccgggcgagggcgagggacacacgcggtccggcacactgaaaggggagtgtcgggtaacatgcccgggcaaaagcgagcgccgcccctgcctctccgctgctggctggaacgctgatctatctagttgctggggagacgcccccagatgcccgggccccactcggacttcagcacacatcccgaaggatggggaaagaaagaggcccccacgagcgggactcgcagtggccaaggaggggtgagaggcggacagggatcagctggcccctgcggcctggttgcacctgcatggtgactagctgccgggctgcgccccggggcgcggcgaggaggcggggtctggcagtgcgttgggtgggggaggagcttctgggtgatgtaaggccgggaatgggagtggcctctcctcgactcgctgctaggaagggggcgggactctcggtgaccagacgccggggagggggcaggcgttcattgataaaacgctgggctcccctgggcgccagcgcagcgtagcaaatccaggcagcgccacgcgcggccggggccgggcggaaccgagaagccgggaccgcgctgcgacgcgccggccgcatggagcctgccgccggtttcctgtctccgcgccccttccagcgtgcggccgccgcgcccgctcccccggccgggcccgggccgcctccgagtgccttgcgcggacctgagctggagatgctggccgggctaccgacgtcagaccccgggcgcctcatcacggacccgcgcagcggccgcacctacctcaaaggccgcttgttgggcaaggtgggccgagggacgtccgcggggtggtgatggtggaggtgggggtcccggccggcctcttttctggcgccgagcagggcgtgggcacttgacccccaacgcggggacgcccgcgggccagactcggcccccctggaacaaccagcctgatgccccctcttcacaggggggcttcgcccgctgctacgaggccactgacacagagactggcagcgcctacgctgtcaaagtcatcccgcagagccgcgtcgccaagccgcatcagcgcgagaaggtgggtccaggctcagcgggcgaggggtggggtggggacggtggcatgggaaccatggaaggatgacgactccgcgccctcatcgcagatcctaaatgagattgagctgcaccgagacctgcagcaccgccacatcgtgcgtttttcgcaccactttgaggacgctgacaacatctacattttcttggagctctgcagccgaaaggtgaaagatggtgattcccgcagggatgagagtgagggagagaagacagtcttttttttttttttttttttttttgagatggagtcttgctc

SEQ ID NO: 33675 - DNA, 3773 bp, Homo sapiens
accagcttgtagcgtggcgggctgagctcgcgcaggcgaacgtgcacctgctcgcagagctcccgcaccagccgcgcggcctcgtcgctggagtagcacgcgtcgtgcagccctgcggccagcgccgcctccagggcacgctgtgcacgcgcagcctcccagcgctccccgggcactggctccgtgcggtaggagggcgccacccaacgggcgggcgccaggggcaaccctgagaagctgacccttgagcccagagggggcaccgggcccagggatggccgctgacccccaggacccgcgcctggcccgaccagcgagttgcggcgggagaaggacgcggccaggcccagcatggagccccggcgcgaggccggggctggacctggacctgccggtcgggcctcatcaatgctgggcaggcagcctcggggccgcaccggtgagggtttccgcccggagtctttggcattctcctcctcctggcgtcccgggggcagaggcctgctggccatggacctgctggctggaggaaccacactcagggtggccttcaccaggcatctgtctacccaccccagcctcttgctcagtgatgtcaagggtttttaccttctacccccttcttacctgtgttttagaacaagtggatcagatagtcccaggctgcctgggttcctaggtgctgagaaggttaaaggctgttagacacatgagcaggggacaggaggctgctaggactgggatcctcggctagtccttgccgactgagctccttctctgggcactatggaagttagccaggtacgctcggagtcttagagactgccatttctcccttccacccgacttctctggaaggagaggcaggcctctgcctcagcctggactgtggaggcagagcctccaacccctaaccaggaaggactgacagactcagctccttcaaccccacagatccttccagccctgggggtgttgaatccagtcatcttccacccagatctactctagggtggctggcacaaagatctcccctacacctggcccaggctgagggcagatgactcatgaagcccccttccaccttctgcctttggcctctgatcccacttcctccagaatcagttctgagatggctgccctctgctcccgaaactccctcaggcacctgagtcacccgcaggctttggcttctgagttctgtcctggctgcacagccctggccccgctggcctgaagggcaagtgggaggggaaagacctgtgttgtggagttgccatgggttgctagagcaaacactcctccctcccaggatccctccctccagtctggctctggcttaacctgagagcattgttgctgtgagcatgtgctgagcatggggtgcccctgagtcatcagggagagcggccgacagggtcttgcagcttagaggcaaacttcctaagcgcaggcaacagaggggcagatgtagagcaaggctgtggtcagaaaggctttgtcctaccccaggactcttgagccagggcccattttctccccttgtggaatggccagatgactggccattcgtgaacaagtcacagaggcctaggttagggggagatcttgaggctgcgggggtggtggctcaggaatccagagtctgggcccacaggaaggaacacgtcatggctctgttgtctccccatcggcctcgacaaggacaaacatttccgctcccggcgcagagttagggtggggcttggatgacttcctcagttcagggctatgtgcgggggaggggaggcccactggctcagctggtaggcaccaggccttataaagtggcagtgactcggcagtgaaccccgagtccagcctcgtgacctttgctgacccaagtgtcctggggcttgtccctagctggctacacctctagtacctaggtttccccaaagttacatttcagagatggcagaggctgtgacacctctgccagggctgacaactcatgtgactcctcctctggcagggatgggactgtcccctcccaaacaagccaggtcggggccctgacccatctatgggggcgaggattttccctgttgagtgggggtttccccggcctggctaaccggatcctgaccctgtgtgcctgtggaggagggaagggttaggagggcaaggagtttgaactctgaacctagggcaggctcagcttcgggggctaagaccctcgtatggcgcttaatgcccctctaagggctgaagttttccctgggcctgcccgggagatgggtggagtctcttctcaggccagctccagtttccatggaaacccacaggcttcccaccccgtcggctgcctgggcagactcccagccagggcctctttcgccgccgccgccgccgccagccagccagcttcttcccaggaccataggccactccagcctcagcttctcctggccccctccctgtgtctgttcctgtccccgagcctctggcctctgatgccttcaggagcttgggcctctcctgctccactcctaaacttcagcttctcagcaaacaggcctcccaagtccctgcttctccctctcaggccttgctaacctcaccagctctagggcctggccaggcctcccaggctccctcctccaccccaaccccttctcactcatggagcccttgggactggtcgtgcatgggaaagctgaacctttttccgcagcactccgaagccttgtcaacaacccgcgatacaggtgaggggtgggccctgcctgcgggtttttcttagctggctctgtgggccccaggactctaaggaggccctggtgagaagaggctgggaattagaacttggccatcctccctggtgaacttaggctatggggaggtcaaatgtggaacatggctactggtcactcagtgtctgtgagaccctgagggccagaggcaaggctggcggggtggagctgctgtgtgagctcaggcaaagcccttccttctttggactttggcccctggcagaagaaaatgattctcagcccctgggatccttagagatggtgggtcatgattcccctcctccctccactcactcagcttggtattgaggcctcactgctagaagaagaggaacagatgacctgttctgggaactgaggcttcacaagaagaacaaagctccagagattgagccatagtccctgacaggaagcctcgggggtgctggctgctccctgctggccgggatgccagtggtgtctgaaaccaggggtagagtttacaggaggccgggctgctcaggagagctagaatgaagttctctgtcctcatggtctcagatctgagctcttccccaaagggtggtgacttccatcaccctgcttctttggggtcacagtctggtctgggtaatgtgaaccccccaggctttggacctgggactaagaggctctaggaggctccagcctcatctgcctcctatcccctgccttgttcagaggcccagagctggggccggaagtgatcatgaagatggaaactgtggtctggctcatgatggtgcatcactgctgtgtctgtttgcagtcgttgtgcactctgtgccccacacccccacaccctcctgtctggaggagggctgaaaaaaagctgagtttgcagctggtggaggaggagccaaaagaagcttccctgcccccaagactcaggctggggaggagaggggaaggtgggatcaaccttgcttctattagcccagatgcccctcagtaatcaag

SEQ ID NO: 33676 - DNA, 1702 bp, Homo sapiens
cagtgagccgagattgcgccactgcacactccagcctgggcaacagagtgagactctgcctcaaaaaaaatcaagcctaggtcccaggtggggtttgaaggccatggcgtggtctcctgtagggaagagcaggttgtagagtgagtccacgtgtgtgtgtgtgtgtgtgtgtgtgtgtgtgtgtgtgtgtgtgtgtgtgtgtagcaggctttcattgggtctagtttcctggagggctgagggccctgtcagcctccccagctagggctagggtcaggcttgcagtggtgggtcccagtgagcaggctgggctacggcctctccagtctccaacctgatctccctcattctgctcgcaggtggccgtaacctttggcctggggcagctgcaggagcgctgcgtggctttcatagaggcccacagccaggtactgctcccttcatactcctcaccctacgcaccgcattctgctcctccctgacccatttgccggctcgcaggaggccctccggacccgaggcttcctggagctgtcggcggccgcgctgctgcccctgctccgcagcgacaagctctgcgtggacgaggctgaactggtccgcgcggcccgaagctgggcgcgcgtgggcgcggtgagtggggctgggggagcgcaagggcacggaaggaggtgctggccacgagactggtgagcgggcggcaggacaggtgcccgactcagggctggcgtttgcaggcggtgctggagcggccggtggctgaggtggcggccccggtggtgaaagagctgagactagccttgctggccccggcggagctgagcgccctggaagagcagaaccggcaggaaccactcatcccggtggggacgcggggaaccggcccagctccactcagcagggggtacagggcgctgggagggggcaggagcagcccggcccacggtcctcggggcgaggggccaccgcgggactgcgcactaactggccttgctctgcaggtggagcagattgtggaggcgtggaaatgccatgccctgcggagaggggatgaggcccggggcgccccgtgtcgccgccggagaggcaccctgccccgggagcatcaccgctttctggacctgtccttcaaatgatccaacgccgggactcgcagggagccctcgacccgcccagctgagcctgccccaaactacagctcccgaagtgctcggcgttcggagcgggcttccgttcccagcgtgcccagtgagccgggcgccggaagaaccgttgtctgccacgcgcagccccttgtgcgggatcaagcccgtgtgggcgaggtggggtcgggccgggcagggcttgggctgggcctccctgagggggtgaaactcgaaaacgaggatttccttcgttccacaccctgactctacgccctgcccctgggcattgtcgtctactagtctattctgatgactcccacatatctatctgttcagctcagctccctctttcttttctttttctttctctttctttctttctttctttctttctttctttctttctttctttctttctttctttctttctttttctttctttctctttccttccttccttccttccttccttctttctttctctttctctatctctttctttctttctttctttctctcctctctcttttttttgagacggagtctcgcactctcgc

SEQ ID NO: 33677 - DNA, 1726 bp, Homo sapiens
tgtagtcccaggtactccgcaggctgaggcaggagaatcgcttgaacccgggaggcggaggttgtagtgagccgagattgagccactgcactccagcctgggtgacaaagtgagactccatctcaaaagaaaaaagctccataggagaaggaaccttgtctcttcaccacataaactgtgtttggattcgcaatcgagttgggaaaaaaaaatcagtctggaagagccacaccaaaccgctaacagctactgtctctgggaatagaacaaggagtttggttggcgcgatataccgcccctgaacctctagccacaataaggcttaattaatgaccggacgacttgaaagcgccttccactgtttatctcttaaatctgcaacgaaatgcaacaaaaacgcaagaaataaacaatagaagccagtcttactgcacactgcagaagccaataaaccccaaatgtagctcaaaacaaggtgtcacgcaaacttctgatttttttttgttttacactgaatctctgtcactctgactagagggcagtggcgcgatctcggatcactacaacctccgtcttctagagtcaagagactctcccgccccaggagtctctgccactctgactagagggcagtggcgcgatctcggatcactacaacctccgtcttctagagtcaagagactctcccgccccagcttctccaataggtgggattgcaaacaggcaccaccacgcccgaataagtttgtgaacatttggtacaaataacaaatgaccaagttccttggttgtagttgcctaacttttaatacttaaaaatgtagcctcaggaaataagaggcctcaaaaaattgaataaaaactcacaactttctctccacggaaatctttagtaaaaggcgaaagatttatgcgctttgaagagaaacccgagtatattcgtgacttccgcttcgaacctcgcagggagaactaacacttaacacacttatggttgttggatgcctgcgtggtacgcactccctatatgtagtttatgcacacagatgcgtgtaagaggcatcatgctctaaaacagtgcagaaatgcgcgcacagagggagtgcaagcatcttgagggtatcttttcgtggtgcaccatgggtatgcaaatcacaggcggctccgggctgttccgcgccaccggggaagccatgggtcactgatctcctttgctctcctatgctcctctctgctggtcctcctgggacccgcaccccgtgggcggcgccgggtgcggagtcctttgcggagctggtgttcgtcccaggggttaaggtcctgtcccgccgtccttacccgcagtaagcctccgggcttagagagagggacggggaaacagacgggcacagacactcaggggcactgggacctcacaggaggcacgaccccacccctcctggaggagatggcatccgatccaattcacctcgaagggtgatatggggtcacatcaaggggaggtgagaaagtgttctaggcagagggaatggcgtatgagaaattagggacccgaagaccaattcagcctgtccagacagtggcgctccgtgtgtctgatgagggggtgctggggtgggaggcagaggctagatctcctcgggcctggaaagatgaagatgaggaggcttagtgaggctggctaacttgcccagggttactccgctggtaagtggcactgagggct

SEQ ID NO: 33678 - DNA, 893 bp, Homo sapiens
actatgttgccagggctggtctcaaactcttaggctcaagtgatcttcctgtctcagcctcccaaagtgctggaattacaggcataagccactgagcctggcctgattttataaacgctgtaacagaaagaaatgatcattgtttttatttttattctaaaatgtaaagcccattctaggaatgcaaatggctttctagtaactggagcccagagagagaaagtagaaaaactgataagacccagagaagtatttttgatcatgtgtgaccacaagccatgaataaacatggactgtttggactgtgaagcaactgtgtgtcagaaatgcagttaattttaaagttccctgaacatgccaacactcagctgcctttgtttcatggacccacttcttttctaatgccaacagtatgcctcttctgcagagaccaactggcctctccaaagatctccctactcactattccaacagtcattggtatgcctcatcccaagcctgctcctctagagaagccagggcaatgtcaagggcagaaagcacaactcagaaggaaagcagatgtgtgcactcttgacaatatagaaacatgcaaggtttcaagggaaggcagcactttagtgtttaaagtgtccaaaacacccaggaattcaaaatccaaactgctgccagttagtcttgactaaagtaaacaaattaagctcagaaaacccaattaccaagccatggcaaagcccagaaatctctcattacaagaacattttcgatcaagccaaaaccactgagtaaaattagaggggaaaaaaggttaaatcagaaaaccggatgtgtgtgtgtgtggctgtagtggtggggcgggaggtgaggagagctactgggaatagcctcttttc

SEQ ID NO: 33679 - DNA, 1799 bp, Homo sapiens
ctggtctctgcactgctactgttgcttcctagtctgcctttctcttgtgtctagtaatcacctattaaactttgaagacagctcaagaatcctcttgcctacaaagccattcctaaccgttcccacccctccagaagtgactccttttcccgaagtgcttccattctgccatgtgcagattctcttagcctttacgggtttcattgcacgtatgtgtttaaatgtctacttaagtgtaacattaatgtctcttaaatgtctacataagagtgtaagagtgactttcttggactgtgtgtgcatcatcactgtattcccagtcagatgccagaaatcaaagtggaatgaggacctgtgaacttcacaactgtataagagtcaaactcaaacatgtgcataagggcattagaacccaggtcactaggaactgaggttccagctctcaaggaggccctgggtgaagaaaggcaacctaggaagcatgaatagtaatcatgaacataactaatcatgctaccaggcagactgtcaaatgctcatgtcactgccacgactatggctgacgggaatcatggcaacgagtctcgctgcctcccaagctttggagagggtgttcaccgcatctcagacttgcctgcatcatagcactcatgccttttccagttgtaaatagataagaaaactgtatcagaattggtctgtcattccacgtgtgctgcctgaaggcagagacctcactgctcctccctatatttcactgccctgcatccaaacaactaaaggcaggctgaacaaatgaatgaagggctgaggctgaaagagtgcaggcacagtgctaaaggcgtctggtaccggtctggtgctcgctcactcgctgtgactttaagcagaaccctccccgaaacttcgtttctttcttttcttttctttttttttttttttttgaaacggagagtctcactatgttgcccaggctggagtgcagtggcgcgaattaggctcactgcaacctccacctcctgggttcaaacgattctcctgcctcagactctcgagtagctgagattagaaacttagttcctccatctgttgcataaggtggttggctcggattctcatccccaacctcccttctacttcggacacagctacaccgggtcgagcagggagtcgagctgacaacttcggggctcagcaccctctcctaccccttcgggtccacctcggcccagttcgacatgcccgcctccctcagatgagtggccccaccgcactgctcacccgggtcagccagcttgtgtgcggcctggcagggcagaagtcacagctataactcagctcccggcacgccgcaaccgctcccagcgatctccacgccgcctctgactgacagcccaatggcgcaggcgcgcgatggccgagaaactcgatggaacgcgcagagcagacccatggagaagagaagaccgccgagcgatggatgacggaggggaagcacactcagcggagaggagggaaggcgggccggagggggcggggccaccgaggagcattcgacacgtgtgtccctctgtccattaacacattaccaacgccttttgagtattcctcccagtgcagggtgccgggaacccagacggaacaactcagcctctttcctcagggagtaagtctaagacctggcttcgagtacattcggtgaaagaaagctcattgggagccgcaattttggctagctagtgaaaaaaatcaccgaatgcccctgcaggggttgccaggacttcctatttgtttttgtt

SEQ ID NO: 33680 - DNA, 3090 bp, Homo sapiens
cagccccgctccttcaagtgcagtacctgagcaccggccgataatccacgccaaagagctgctgctgccgctggaggtggttgggagtgtcgatgggtaccaggcgggctccgccctccgccgggcggcacaccagcagccagccttcctgcagcccgcagtcgcccaggtgctctgccagctgctcctgccgggacgcgtaggatggggacagccgtcagggaactgcccagccgcctgtcgtgcccagcccagggcaaagggcgccgaacgcaatgccaactcaatacaggggagaaaaggcaaacagccagaggtttctctggccccaggggtcttttaccgggtcctgggcagggaagagcgcacctttgtcagcttcacccagagcccgtggccattgcacagctcctcgcccgtggtgcgcacgcaggcgccgcgccggagctcaatgctgtcgcgggcggcgcggaggggcccggagccggtaccgggggctgggcctgcggcgcccacacgcagccccaggccctctgcctcccacaccggcagaagcacgcgcgacggtcccgctgggtccttgtaaagcttgtagagcacctctcgcggcacgaaagccagcgctgctggcagcggccgcccggcgcggaggctccgcgctgcctctgccaagaagcgcacgcggcccagcagctgccggggggactccagcaccgcgcccgggccaggacccgccatggcgaagtggcggaggtgagcacctagaggcgaccctgcccggggaacagctggcgcgaccgcggacagagcttcccaccacgcccttccccgcctttggccagcctttgccgtatgttctggactaagcgcaccccagctctcactgtattggactgtgtactcccacactcaaccatattacttatctctgtgccaccctaacccagccgaccaaacccaagattggtgattgctacctgatcaatctccctctctccatttccttgtgactaccattttatctctactgctactaccctcattcaagtcaccattctagctagcctgggtcattgccaacagtcatttttctggttcttcggcctgctgtttttcctcccactcccagcgaatctgctggactccctatcctatgggtggtgtgattaaagtgtttgagacaatggccccttcccctgccactgacaggagtcttgagtcattagggttgattctgtttgtcactcctaatcccaaggacactggagatcattattcattttaatgtgattgctgatttctgtttccccagtcttgtagctccttaaaggctggggctgtcttgagcagagctaacctctgcacctactataggtccaggctatagtatggacctggctggataagactgttggtatcatgagtgggacttgcgccaagcctccggatacccagactgtcagatgagaacaaattcctcatgtcaccgtaagatacatttacagcggagttttcttttgggcctttgttgttgcgtcgctacagcaaactttacggtgaaaaaaggtaggggtcctacgggcagcagccagggcagccctggagctgtcgctggagtccgatcatgtgatcttcaacatggcgacgctcttggttccctacagaaaggggcggagcctggactggggggcaggctcagattcaggttaaattgtggattgagctcgcagttacagacagctgaccatggaagcgaatgggttggggtgagttctccagagcacgcggtgtggctagccgggcttctaatttgagtcttccaactcaggactctatccctctactcccctttccccaccctggagacctcccaacctgaactccgttagctgggatcctgaatcctaaaaccatggatttttgagatgttcatcccagggccttaattcaagggatgcctcaggatttccaaccaggatctctattctgggaccatcaactctgatccctctttatcccccagcctgggtatttctcagcccctgaaccagcccagtgacattcccgtttctgaggctcactagttcgaagacccccaaactatccttagtgggccttcattccctccccccagtccctctggttgcttcgagcttggaagagtagagactaagtggagggaagaggccccagggcgggcccttctggagtttgtgcaccacctgataggcagagaggaggcggaacgggcggaaagccagggtttgggagctggcctggaggaggtagatagcggtcctggactgaatcggccttatgaacccgcgctttccccagcctccagcgtagcatactgacacctacccccacccccacctgatcgccagacctcagggttttccggagctgaagaatgacacattcctgcgagcagcctggggagaggaaacagactacactcccgtttggtgcatgcgccaggcaggccgttacttaccaggtaagagtcagggtctggaaatctagataaaactccggagggagaaaagttttcgaggggcaggggagggctctggagggcctcaaggctgagccctgtcttccctctgtatgcagagtttagggaaacccgggctgcccaggactttttcagcacgtgtcgctctcctgaggcctgctgtgaactgactctgcaggtgaggggtccacaaaagagggaaagatttatgccttcagtctgccacctagcaacctgtctcctgtttcctacagccactgcgtcgcttccctctggatgctgccatcattttctccgacatccttgttgtaccccaggtacccactcaaacctgatcctagaatataatccaaggacgccttgaaaatccttctatcagtccagtcaaggtttacaataagcacttatcctaactggatcgagggaaaaactaaggttgaaagaaatggagtttggcagagttttattctccttttccttcctcctggaatgagctgaacagaacctttcctcctggattccattttgggaacccagatgttttctccccctccaggcactgggcatggagg

SEQ ID NO: 33681 - DNA, 330 bp, Homo sapiens
atgttagactcaggcttggaaagggctgtaggtcttgaagagaaaagttaatgaataatcttttgtgtctgatgccagttagtttttataacagtttcaaggcttcaaaggacaggaagctgtagagcagagttcaagagaaaatttccatccagactggaaaaagcagcagagggtaatcccaggaaaacagtgcatatgtaaacagaatcatttccttctttttggtttagattggaaaaaagcatgatgctgaaagatactggaaggcaagcaaaacctgagctgggaagaaaaacagaacagaaatagtctctagcggtcaggtgc

SEQ ID NO: 33682 - DNA, 710 bp, Homo sapiens
taacaaaatttgagatttgaatgagactattcaagttatacttcatatttattcagtctctgctttaaagaatcataagttcattatatgaatttttcagtcccaaatttttttctaaaatcttctcaaattcaccgtccaaaatgcagaggaaaatctaataatattgtaagaatgctcagaggtgtgaactcagatgtaatgttcaaaaaaaaaggaaagataatccatttagtgttagaaccaaaatgtgactcacggttgcgaaactaaacaaacatgattctggttggcggcttccctatactttgttttgaccgtatttgctgagcaaatattaatagttgtactcgtctctcaaaaagttaacttgtccaaaaaggaagataaaatatcaacttcaattggtaataaacagcaaatatattggttaaaggcaatattataataactgaagaacgcagaaccaaattagcagtgcagatatattcttagtgaagtgaactgaaaagaacaaaatatttttaaaaatattttactacgtaaaaaagctgaaaaagtgctaatttatatttttgaactgttttattttgcaacatgataatgaatggctgttgtaattggtagttctgcagcaaacaagctacataagaccttagacaagacaataacatcaacaatacagagctttatattttaataggtgcctc

SEQ ID NO: 33683 - DNA, 2113 bp, Homo sapiens
aggccaaggcaggcagatcacctgaggccacgagttccagaccagcctggccaacatggcagaaacccccatctctactaaaaagacaaaaattagcccagcgtggtggcgcatgcctgtaatcccagctacatgggtggctgagacacgagaatcgcttgaacccagtggtgtgccactgcactccagtctgggcaacagaaccagactccatttaaaaaaaaaaaaaaagtacatatggtaaatattatgtgtattttaccaaaacaagtttttatttttaaggcacaatcttgccctgtcgtccaggctggagtgcagtggcgcgatcacagctcactgcagccttaacctcccccagctcgggcgatcctcccacctcaacctcccgagtagctgggaccacaggcctgcgccactacgcccggctaatttttgtatttttgtagagacggggtttcaccatgttggccaggcggatctcgaactcgtgatttcaagtgatccgcccgcctcggcctcccaaagcgctgggattacaggcgtgagtcaccgcacctagccgaaaaagaattttttaaagtcaccatctctacgaggtttttctgggccaccccccggtaaaatgtcaagccctcgacgagccgggagagagtcggaatcctgtgggggaggcaggggcgtgtccagaaaggcgggagcttccggaaccgcttagagctaagggagctcggagcgggggccggggccgagggcggagcagggtggggaaggggcgggtccagaaagacgggagcttccgaggccgcctccacaggaagggaaaggggcgggagcttggagggggcgggtccagaatggcgggagcttccggggccgccgcctctggaaggaaaaggggagggaacgtagagggggagggaacgtagagggggcgggaccaggaacgagagcgcgtgggtttctggggtgtccgccggcgccccctgggattggggagagagggaagggctgaggctcacggtttcggagtaaggggagcggcccggcgagccgccgcgcctgggttaagagctgcaggaggaacgtggcttcacgagttcggctcctcggccatccacagcccgggcctccgcctctgctgacctggcggctgtagaaggcagaagaggcctgaaacctgcagcaggagcaccaccctgccccgcggccccgcgcgccctccagtggcgtcatcccatccgctttgatctcgactggcgcgcctaccctcggcagcggcaccccttgggagcgcaatcgcgggcagactccgaggacccatcttgcgaaagttctgcgaggtcctgactttaagggaacaggggtcgtacttgggccatggccggaagggagatccaacatccatgacgacgtctaccccccagcctgccccttcagagcccagtctgtgccttgcgtcaaagtcaagcaagggctcttgtagggcaccgagccccagccaaaatcacccttttctttcagatagcccccacttacccccagaaaccttactctctccctcgggagcaggtgggaagtgaaaggccgggggggctgtttctgctctgcttgtctgtacctgtggcccttgagtggaaaaccccgccgctggaccaaagacctggaggctccaggattgcccacttgggaccctgactatgaagggtcaagatagcccattctgccccagcactcagagccctattaccaaggcccctactccaagaatccaccatcaaaaccggggccctgccagtgccttcccagtgttcaggcctagggaagaatagccccattatgcctgttactcctgatccttctgcagtctctctctttgtgaccccatggcctttgctgctatgtctgccctggccccacagagtgccaggtcagagccaccctggcctacatagcagggccccggttcacaggctaaaacctgggcctcctgccaggctgcaactcccagctgcacaccgcaacctgagacatctcagcatattctaggaactagtaatggggacgcttccgactcgctggggaagggagatgagggcctctagctctccat

SEQ ID NO: 33684 - DNA, 715 bp, Homo sapiens
aaattagccagacgtgctcgcttgaacccaggaggcagagcttgcagtgagctgagatcatgccactgcacagcctgggcaacaaagacagagcaagactctgtctcaaaaaaaaagaaaagaaaagaaaccaataccccaaaatatggccctctgacatgctgaactcaagaagccgcaaggtctctctgatccttccaccccagactctcccaaagccaggataaagttgttctctggaactctttatctgcctaaagtccaaactcactaaaaagaatacttgttttttcttcccctcccaataagactaacatgtaaccacacctgaacaaaccctttcacaggtattgtgtacctcaggatcactcaaattccaaagagaactattaacaagtcaacctctgtccccattccattctctctagtaatcctttattgcccttcaacagaatctccttctggccaaagttcggtttatttaaaaacaaatagagctggacatgctggctcaggcctgtaatcccagcactttgggaggccaaggcaggaggattacttgagcccaggagttcgagattaggcttgcaacatagcaagaccccgtctctacaaaaacagaaaaacagaatttctcttctaccccttgtcaggcctctgagcccaagctaagccatcatatcctcagtaacctgcacttatacatccagatggc

SEQ ID NO: 33685 - DNA, 2247 bp, Homo sapiens
agaagctgaagattaactataaacaatgagtaacaaaggagcactggaaggcagaggtggatgggaatcgtagtgtttacggagggactagtctccaataggaattttttttttttttttttttttgagacggagtttcgctcttgttgcctaggctgaagtgcaaaatggcgtgatctcggctcaccgcaacctctgcctcccaggttcaagcgattctcctgcctcagcctcccaagtagtgggattacaggcgcccgcaccatacccagctaattttttttgtacttttagtagagacggggtttcaccatgttggccaggctggttttgaactccggacctcaggtaatccgcccgcctcggcctcccaaagtgctgggattacaggcgtgagccaccgcgcccggcctaggaacctctttcaaattcaatcaccctctaggtcgactataccgcctagctgcttcacaatttgtcccttcctcgccatccatactgccagccttaattcaagttcacattatcacttgattggattattacaaaagcttccctaccaatcggtcgctcttacaccctgggcagcctcctccgatggcccactccccgcctctttcactttctggagatcactgagctctccatcctctctgggaatttaccgatgcccagaacgcccttctttcccccacacgaccctctcctagtctaactcctgggcgtgctttaagctcagctcaggcagcgtcaccttctctggaaagcccaaacccagccaccccactacccgctacccgcggcccacgctgatgaagacagcagaacacggaggccccgcgttcccgccgcgagagcaggagagaaagattacctcccgcgagctctagcgcgcccggctttccggcgcactccagggggcgtggctcgggtccacccgggctgcgagccggcagcacaggccaataggcaattagcgcgcgccaggctgccttccccgcgccggacccgggacgtctgaacggaagttcgacccatcggcgacccgacggcgagaccccgccccatccccgactgcctgaaccgcgccaggagacggaccgcaagtccagcgtacccacagacgactcaggcgggagacgagcggtgtcatggccgccgacagtgacgatggcgcagtttcagctcccgcagcttccgacggtgagcggcttcccagaggtagccttcaaagcctctgcgctctgggagaggggaaggcctcgggctcatagttctagaggctcctcaagcttcagaggactgctccttccgcctgaactagccacgaggagactacaagttccgttgtacaccgcggctccggctgcaaaagcctggagcgttgggagcatggggctgatggaggcatggcgggagatgtagtctggagctcataacggttagtagtaatagttgtgattcagttcagtggagtggattgagcgttgtgatccaaaggaaggtaggacgtattgggagctctggtgtggggcactgccaggctctggggcttactgggagctgttgcttgtggcgctggggcaccatgagaacagtagtatggatccctgtgggatattaagggagctgagatcctcaagccctacaaaatgtttcctgcaggacatgggaaaaaagaatcaaaggtcgtctagtccaactttctcctctacagattgtgaaagcgaggtgggaagtaatttacccaggctcatacaagccagtagaagactcaggcttcctctccccaaattcagggcattctccactccaaggcctgtgtgtagaacacgtgggttacaaaggcttgtgggaaaagctaccaatggaaactaccccccttaccaccatcaccgtggcctagcttggtgtctgttcccctgggctctttccttaagcatgaacatccatcaccctcctaacccccaggtggtgtcagcaaaagcacaacatctggggaggagctagtagtccaggttcccgtagtggatgtgcaaagcaacaacttcaaggagatgtggccatccctcctgctagccataaagacagctaatttcgtggctgtggacacggtgagagttgggaaacaaggagggcaggtggttgtgaaggggctggtgctagaggcctgtcacaactctccctttacctacccacaggagctgagtgggcttggggacaggaagagtttgctgaaccagtaag

SEQ ID NO: 33686 - DNA, 1607 bp, Homo sapiens
cccttagcttcagccccctgtcccttggaccccagcatccagtagggctacacacctgacatcggggatcttctcagccaggccaaagtcagctaccactgcagagtaaccattctcatccctctttatcaggcagttctagggttcccaggaaggaagagaaaataatgtggctcagaagcggggatcagccatagagttaccacccattccccccttcctatcacagggcaccttgtcctctgctccttggtgaaccgcactcaagctgaccccactggtcaggtcaggggctctaagacagccaggtgagatgagttagtcctgggtcttgggtggctgtcctaggatacacttcacattccaaacacaattactcatctttgctttctaagtgctaggcataattttaagtgctagaaatagctagatgaaaacaaccaaaacccttgtcctcttggagcttgcaatataggggagaacaacagactatcaggcccctggcctcccttcctccttcctcagaaacacagacccaaagcccaggcctgaccttgccaacttgatataagcacaagacaagtgtctaagccttcactaaccttcactgtccacaagatcacaaccaacctcttctctggcattaaaagtctatgatctggctttatccaactggcctagccgctgtccccctgttcctggtgcccctatgcacatatcctcatccaaacttgtcacagacaagcttgacttaccaaacctgaacaggtccttcaagcctttgcctttgcttacattgttccctttcatttgaaatattctcccaattatccttttcacctaagaaaattttgtattttaaggcaagctacctttttagccatgacctcatctttctccctctcatctcaactcttagctcctcctctatgccactcctcttacagtctagcagaaaagctatgaacccctcaggagcaagttctggtttgccttccttcctcacagctttcaattcatgagacaggctgagaacatgctcactgaaaaaatgctgtcttcaggtcaacccaagtgacctgtaaataaacaaaaagcggcaaccagctctccccaaatagctgctttcaaaatagccctacactgctctggctcaagaggcacctcaccccacccgcttccttcagaatagcagagagcagggatccttggctcacagaaacacttctggagccagcaaggccccatctgacccaaaccagccctccctcttccttgccagccttggtatctagttgctaagacatgccaagtcacctcctgcttactcctgtcaggtacaaatcaatcccttactctggccttgacatgattacactatttcccttccccaagctggaaggagccgtgatttcatcacttctaccctggatcacaggtagacatgcctcatctctggcttccaggaaggacagttcttgtgcttgtcctggctttggctctctaatcagtcctgctggctcagcactcgcagctccctgactttgactgtctgtgagaagatgggccctaggccagcctgcctattagccaaagccccagctata

SEQ ID NO: 33687 - DNA, 597 bp, Homo sapiens
tgagccgtgatgggaaaaaaaaaaaaaaagaaagaaagaaaaagatgaagaagaagaaagaagaagagaaggcaatggctgagatctcaagtcccagaagaactatgaatctaaacccgtaaaaaggcagtaatatcctcgggtaagtgcagttcaaacatgttttagaggtattacatcatggaaaactggttgtgctaggtcttagataggagaattcataaggaaaactcagctgaacagacattaaccaccagagtctcacatcaggtgacactaagcagagctggttcagtctcgctttctcctttttgtctttggtttttaacagtccaattttaagacagccaaaggcagaacaaacattgcttagcaatcagatcatgtcaatagcactacacataataacaagaggcccaatcaagttcatggtccaattttacttttttggggtaaagcaatacaaagatctaaaaagttaaagtcagatctgcttgcttacaaatattagaacagtttaataaatagaaaacagccaagatttctgggaggaaaatatataccctctatcttgaataacaaactgaaattaaacaa

SEQ ID NO: 33688 - DNA, 1854 bp, Homo sapiens
tccctatttcagatgagatcaggagcgttgagggtggtataaccagagactatgttccctatttcaattaacactaccgattcacaccatcagccaagtcagaaactttctactattcttctcaactttattttgaaacctcttggaatttcgggccattccctcccgcctggatgagcacactcgttttctgcctacctggcctttccgcctccacggtcttcactttcaatccttcctctatattttcaccaaagataatgcaatcataccaagctcctgcttacaaaaccttcaacggctccccatgcatgcagcatgaagtccaaattcctcagcaagttcttctcagaggtatacaatttaaagacttttaaattacgcaaacctggatttcgcttgtagcgaaatctgaacactggcttagtccactcttcacagcgaagagtaaaaagcagagaggggaaaggaagggagacgatgacaagcgaggaaagaagagggggaaggcagtagggtctgaggggagggaattgttttcctgggtagaggtgaacgttttcgagggaagagtgtatcggagggaagtcaagtgaaggaacccagatctctgaggcaggagcgggtatgcgagcagggaggcgctcagtggggagctggaagtctctgaaacaagagttttccgagaaaacgaaagatccctaatgcgagcgaggtaacttctaatgggttcccaggttctaagggggagcagacgtggcggggagcctgagggaagtgagaaggaaaggggaaagcggccaggaagggagcgtccgccgccgctgagagggggacctctgggaagccgaggggtcccgtcgggtgcggagggacgcaggcgcctctgctccggggcagaggaggtggagcggcagcgcgcgcgggccaggcaggatgcccgggtttgtgacccccgtcctcttttcacgttacctgaggcaggactgagcagccagaggggtgcctgcgcgggcaagaggaggagacggcggcaaagagggagcatagtaaccctcacagctcgttggtggcagcggctccttagcctgcggaggcggtgggagcccctagcgcagaagccggcgactcagctaggctagcggcggcggcgaacgaggagactactgccatggccccacagtcggggccgctccccccgcctgtttggcggggccaggaggacgatccgaccagcgaagccaacagggcagctggtagctctgctgagctcccgggccgcgaaagactgaaacgcctacccggcccagcaggggggttgggggcggggtctcggctggccacgcccctccctcaagccctccctcagagtagccagtcaaccgtcaactcctgataaacgaggtagtggaattgcccaattagcgctaggaatgccacgtggtatgagggtgggcacaatgggcgtccagaaaagccaatcaacagccgtaggtgccaactccggaggacgaagggaaccaataggaaggaagtcgaggtaaaaacagaagaagcagtgtgtgggaaaggcggaaccgaggaggagggaatacacctgggggaaacccaagtccaggagcctcttagagggcggggcagtaaacacaagatggaccaataaaaatgttaaacacagaaatgattggtaattgataaagccaatagaaaatggactagactggcgcggctttcgggttggtcaaggtatagctgagtaaggaaaagcggtaagaatgctgcgtcctgcaggatttcagtatagtgaggaggaaaaaatatatcaataataccgacttgaaatagtaagagcaa

SEQ ID NO: 33689 - DNA, 1681 bp, Homo sapiens
ggcaggggtctggctccctggtgtcttgtgcttgctctcctagcgggggatacccaaggtatccccaggaaaggccaccacgttagatggaaagagggaagtggggatgcaacactggggtaggtggatgcactatcagaccaaaactgcgatcctgtgactagggaaaggaaggacgctcttggggaactgggggaaaagcgggataccgtgatgatacgcagatatcaggtggggattgaaggtgccagaacctggttgagacctccccagaagtagtacactggcgccaccacgccaaacctgtgccagtgacaactgccgccgccgggttcaaaacttcgggttggttttgaaagtccgactttggactggctgccgcagcgccacctgggaaactgaggtcgcctcttgcgaacacaaccggcgatggaggcggtggaactacctttctctagaagagacacgtacatgcacacccccaccgtgtagcttgccgggaaactgagtcttcctgatttcgtgtggctgtctccaaggaggaaacgaactacgcatcccaagatgcatcgcgcataggcaatatggtcccgctactggacccatttcctacctgggaaatggagtcgaagctgactcaaaacgtaacggcccaattgtccttgagacttcattccccagcaagctcagcgtgtaacgtgcgctatggagccgaaagtcgcagagctgaagcagaagatcgaggacacgctatgtccttttggcttcgaggtttaccccttccaggttagtttatccctcctgctgttctagggcgaaatatatgattggcttcgttgcaactggcgtgaggcctcgggagcctctgatcctcctgggttcctgcagcccagtgtccatgtgacaacagggacagagtttcagtgggggcttgggttaaaaaggtagtggtcgaggccgggcatggtggctcacgcctgtaatcccagcactttgggaggccgaggcgggcggatcacctgaggtgaggagttcgagaccagcctggccaacatggtgaaaccccatctctactaaaaatataaaattagccgggcgtggtggtgcatgcctgtaatcccagctactcgggaggctgaggcaggacaattgcttgaacccatgagacggaggttgcagtgagccgagattgcgccattgcagtccagcctgagcaacaaagagcgaaactccgtgtcaaaaaaaaaaaaaaaaaaaaaagttgtcgcatgtttaaccttttgccaccatataatgccggattcgttaacgggagacaccatatgacctgtagcgtgtgtggctcagattgtcacctatataatttacaagaagaaagggacctgtgaggcaaagtcaccttggaacttcctaaaggatttaggagagggcaaagcctagaaggtttgcatagctatcatttaggtcagctgaggaaggaagggcattcctggtgatgaacaggcaaacaattggctggtttgttccctctaccaacagaaggataattcatgatatttccagtcatcagtgctgggctgggtaatgaaactttgtacacttgcctggcacagcagtctcagcaccgcaccccgacccccatttacacggttacatttccccacatcagtgccctgtgcac

SEQ ID NO: 33690 - DNA, 845 bp, Homo sapiens
tgaacaaagccaactgcagccctgccagtcaccctaggctcctacctctcacctccctacccccacatccaatcagccaccaagacctataagactgtctactgaatctcccaaatccattcccttgtattccacccatctatgctgtggtccaggccaccatttctcacttggattactgtaataacctccttgctgtaattttacctccagtccctcctccacactgcagccagtgtgatctaaaaatgatcatgctagtttactccttaaatcttcagtggctcttcactgtcaccaaattaaatccatattccttaaattggtattcaaagccaatcaaaatctcactcctattgatctctccagccttctctccctctgattccctctacagacccttcacttccaccaaactagacaattctcaaatatacccaggaattttctgccagtgtgtttgcttatgctgtgacttgtttattttattctttatttatttagagacaaagtctcactctgtcctcccggccggagtgcagtggtgcaatcatagctcactgcagcctcaaactcctgggctcaagtgatcctcccactttagtctcccaagtagctgactccaggcatgcaccaacactcagggtctcactttgttgccctggctggtcttgaactcctggcctcaagtgatcctcctgcttcggccagccacccaaagcactgggattacaggcatgagtcaccgcactcagtctgtgacctctttttaaaatacacaccagtgagtttatgtgttttttggtgaaatataaataataaataaatgcacaccagattctcct

SEQ ID NO: 33691 - DNA, 2546 bp, Homo sapiens
ctgcactccagcctgggcgacagagcgagactccgtctcaaaaaaaaaaaaaaaaaaaaaatacaaaaattagccggggcttggtggcacaagcctgtaatcccagctactcctaaggctgaggcagaagaattgcttgaattcgggagacaggggttgcagtaagccgagaccgcgccactgcactccagcctggccgacagagcgagactctagctcaaaaaacagagatttaacccactaagccgcggtctgaaagcttttccaagtcccaaagttcttagttcacaataccacaagcaaaagaaattttgtaagcatggatcttagcaaacttttaactgttttttaaaaagtccttaacacctttaacgacaaaaaacaaaaaccaaaaactaaggcatgctgcaacttggtgcccccaaatggccttctcgtccaatccttctttcccaagtggcccccaagtacaaaacccaaccaattcggggtaaaggctgctgggattcaggccgccaccgggccccttcaggggatctgcccagcgtagagggccacatccctaaaccccacttcaggtgccccctgtccctccccagcactggagaaagcaccagcagagagagtgcttcagcggggacatttgggctcatcgctaactccattccacgtacaggaaaataaagacggggaaagggtacccgaagctccgcagctagtcaaggctcaggacccggaacagccaaatacatagaggctgtcttctacagccacgagtctggatacaggtccattccagaagcttcccgaacccaccccgtccggcaggaggctagtctcggagacccccaccaccagcccgcccagacgccgcgccacgtgctcgagttgccgggggaagactcgactcgagtccacgcttgccttggggttcaaccaggttcccgcacctacgtggggggcccacgagaggggtgtgcgcagcgctcaagcagtctcggactccgggcctcccccggctgcctcacgcatcacagcacccccacccgagcgcgggcgggccccggacaggaggaggaagaggcaacaggcaagaagggcgcgccgcgcctcactccgcaggggccgcactgcccacactcaccagtcccaacacaagtcgcagaaactaaccaccgacaccaggcaagaacaagacgcgcaagagctctccggggcgctgcctttatagccagtagggatctcgcgagagtcggaacggacgggggtgccggaggaggagagagaggagggggatgtggcccgagccccgcccggcgcgccccgccggaatgactcggcgctttccctcgttggggcgggtgcggaaaaatactaataccccaccctgttgcggatggctgaggttggagtgaggcgcccttgtggccgctcccgaacccgaacgcttaggttaatcctagatctctgcggaaaaccaggattctctttacttccaggaccactacgcactgtgccctcaatgcccaaactggagtaagcgtcttagctgctgcccacggaggaccacgtctaaccacaccaagccatgagaactgtctatccaaatatttcttaagttcgcagccttaaccccagcgcagatcctcagtaaccctcatggcttagatagcttccttcattgttctctttaattacagggttgctgctttctgttgtaaaggaaaataaaatatcaggactcctaaacttacgccagagggaaagttcatcttgggaggctgattcagttacacgaccatcctctccccggatgaataatttgactttacaatcttgagtcaaaacattacacattagccagacccacacggtaaggcaaaaggcctcagacatttcctgatgactaccccccacaaacacacatacacaaaatcataattaattatttgctcccctggaaacctttaaagtatgtagcctcccataaaacaaggacgtgtcaattgcaactagatctacaatataaagtctagttcctaaaactaaagtttgttctattccacatttttttgagacggagtctcactcaccctgtcgcccaggctgtagtgcagtggcacggtgttggcttactgcaacctccacctcccgggctcaagcgattctcccgcctcacctccggagtgtctgggactacaagcacgcaccaccacgcccagctaattttttgtatttttagtagagacgaggtttcatcatgttggctaggctggtctccaacgcctgacctcaggtgatccgcccgccttggcctcccaaagtgctaggaatgtaagcgcgagccaccgcacctggcctctattccacaaattccataaatgttcactactagattacctttctactagactactttctacctttctagtagtaccttactactagattaccctgagtccaccacataattgttttcttcctccattccctttttcttcaaacattcaccttatcttatgtaaaaatgtagatttaggccacct

SEQ ID NO: 33692 - DNA, 1078 bp, Homo sapiens
gcagagtttgcagtgagccaagatcgcgccattgcactctgggtgtgcaaaggagagtctctggagcaagactccggagcaagactccatgttaaaaaaaaaaaaaaaaaaaagaataaacctttaaagaaaaaaaagaaaaatcatacagtggcttatcatctcccagcccagaatcctaccagagttggccctttggtctttgttctactctaaattatgtatcacctggaattaaaccaactgatttaaaaaaagaagaagaaaaaaagaaaggaaatcaggttcttaaagcccagcactagtagagctcagacaagttacctttttatcctaatgaagtaggaagggcaccactatgtacctagcacccaggaatgtttaacctttactcacgttctgcctggagaaggaagccaggctgcaatgcagggatctggctcctgaactctgtcaaggctgaggcagggctggataagaaatctctacccccatgtcaggcttgtgaccagcctcctccctcatcttgcacaaccttgatccaggggcaggaactgatacactggcctttggaagccgtaggactttgaacttcgttgaacttcggagctgaagggctgaacagagctggtgccaaacccacttttagtaaccccatagtttttttttccccccacttaacaacatatcaaagacattttttccacaacaatacttacatatttactttatccttgttgtgtctgtatttatcacatggatgcacaacaatttattttggatattcccttcctacaaatatttacgtaatatgttttaatttttttatattaaaaatatattttaaaaatagagacagggtctcgctatgttgcccgggctggtctcaaactgctggccccaagcaatcctccaatcttggcctcccaaagtgctgggattacaggcgtgagccaccacgctcagctgatttgggtaatctaaacaacacagtaaacagccttgtcccttttctattatttcctaaaactaagttccttacaattgctgaatcagaagggatggacatttaacattt

SEQ ID NO: 33693 - DNA, 737 bp, Homo sapiens
cctccattgtagctaggactacaggtgcacaacacctctatttttgtagagacagggtctcagtatgctgccctggcctcatgtgatcctcccacccagcctatgctcccttcttatcaaaccacatgtagttcctggaatgtaacatcctgcttcattcctccacaacttggcacatatcaattcctctgctcagactaccattctccagcttcctttaactcccttcccaacaacagtctatttttccaaaaaactcctggcacatggtagatatcattaaatattggtcagtcgaatgaataaatcaatcacttctacccacttttagcacagagcagcctctgtgggtgacatgtgcaacagaagaccgtaaaattaggaaatgcagttgacaggggaaatccgcaccgccatatgacaggctgtctgcttccgtcagcggttattcccttgcctgcctgccctagcccacaccacttcctcctcttccccccacccccgactttccagtcccagtccattggtttcagttggctgcagcctcctttccaccacttcactgcagcattgatctttgtaactgccataatagaactgattcctaccctgatataactatagcttctatgccaacagctgtagctctacataatcatgtgtgtgcatgtacaggtgtaagtgtgcttgcatgggtgcatgagtgtatatgtgcgcatgcatgagagagaaagaga

SEQ ID NO: 33694 - DNA, 1188 bp, Homo sapiens
caataaatggttctgaggaccaagtcactctggtgggattggggattggagctcagatcccaaaagatgaggtagctgactgcataatgcagtccccagggcctggtgccagccttgctggctctcagcagccacttgaatgggaccacaggatttgaggggcctgagagggagaataatgcctcagtgcacaggcccagggccatttccagtagctacctgtgtagggactttcactacttgggggaaatgagtcaggtcttgtgaagttggtttcagagctggccagagtttaggaatgattcggccctaataggggattagaaggaacttaaatatgttccttaaatgtgcgctcattacaatgtcactagaaggtccacgcataaagtcaagatcttgttcaggcccccttatcgccctgcttcgtatatgggtcctctgggaacctgaactctgttcttcattctcattcagacagcctagcctacagtaagcaggaagtgccagcaaataagtcactggggtagctccgggacaaactcagagacttggacagcaggcatttatttcttcatctcttctacctggccacattcctcttagggtctagaaacccctgccaaatgctaaaacgttcagtgaggggtgctgagaacttaacctttccctccctcctgcctagttgtccagaaagggatgctcccttctccttcctagacagccattctcactttctagctcttcatctgtttcagcctcctctgtcgccacacaaggccaaccctgcacacacacataggtatgcattctgcctgttctacattagcccctctggactgtgaaccttgaaggcagagaacaaggctggtcctttttttttttttaaatttttgtgatgaaatctcactctgtcactcagactggagtgcagtgaacaatcttggctcattgcaacctgcacctcctgggttcaagcacttctcctgagtagctgggattacaggtgcctgccatcacacccggctaatttttgtattttttgtttgtttgttttgatttttgtttttccgtcggatttatttcctcacattacagcatacttttcatatgagcctacacatatcagatggtaactctggaatgggtgagtctgtgacactgacccagcacagctgtgagggtgat

SEQ ID NO: 33695 - DNA, 1966 bp, Homo sapiens
atacattttctttcttcctggatgtagaataggaaaaaaagaaaaagaaaaaaaaaaagactggtgtattttctgtatatatgctatactacgatttttaaaaaggcttgtacgaaataaaagaatattccttttcggccaggcgcagtggctcactcctgtaatcccagcactttgggagtccagggcgggtggatcacgaggtcaggagttcaagaccagcctggccaagatggcgaaaccccgtctctactaaaaaatacaaaaaaattagccaggcgtggtatcgggcgcctgtaatcccagctactcgggaggctgaggcagagaattgcttgaaccagggaggcggaggttgcagtgagccaagatcgcgccactgcactccagcctgggcgagagcgagattccgtctcaaaaaaaaaaaaaaaaaaggaatattccttttccaggattattatgaagattcaataaaaccatgtttattaagtgttaagcacagtgcctggcacataacgtgctgggcggggtctatggtccagacagggggaccaggcactttccagcgcctggatctgcagacgcgaggtcttctgtattctggccaatcttggtgttgcagctgctctctgggcctcagtttgcttgaactaaatgtaacggggccaacttaggtgaactttgggaatccagccaacctgactttagggagagtatggagccacggatggcattgtgaatccggagggccgacaccagaagaacctgcaacgtggcatctgctaccttacttcccccggaaaagcgcctgcggcggcgcctaggcgcgcggtgcaatgtgggccagcaaaaggcgaggctggccccgccccttgcaccgcccacgtggccagcgccacctgcctcattgtgcccaggagttctccaaacccgcgctgcggagtgagtgaccaagttccggccagttcgacctcgaggatccagaggtggagacggtactacctcccagctctgttttccatccccttcaggtccttcctcgggaggcggcgaaggcggtccaccctgcgcgtgatcctttatgcccggcccctgcccctccctccgggtggaacttccccctcaccgccagacttaagctgaggatcgttggatctctggcggggtgcagaactgagcccaggccacagtaccctattcacgctctgtgcttgtgccaaggtgagtttctcttgctgctggcctatctttctcccggaggagatggcctcgattctttactactgaaatgtaagcccctggggttgagtggagagcgcagagcactggaggggacgagacttggtttcggatttgagctcttctttttctctgtatgatctcttgctaacttcccagtttctctgaacctgtttcctcagcaataaaatgaggtcctacattagaactgtagcaagaattgagataaagctttgaaggcgcacagcgcatactaggtgatctgcaagttttaattgccatctttttgtttgctcacctatgtgctttttccagctgctccggctttcttatgcaggtgcagggatagttctcagaagtggggagaagtggggataattctcttacttagacacctgctttgggtctgagaaagtctgacatgttattctgttgccccagaactctgttaaagtaagacacagatctgaaccttcactggatgaggctactgttaattaactcttccccttcagatcgttcatactcagggctgcaggcctgttacttttccaagatctgtttccttatctttaatacaggagcaatctcagtatgattctatctggtccactgggattttttgccgagtatagtaaagtgctttgatattctccaagaggattcttttcaggttttccaacaggtaaaggaagaaggtgacagaggcagcgacttcctcaaatgt

SEQ ID NO: 33696 - DNA, 1224 bp, Homo sapiens
taaataaataaagtaaaagataggctgggcacagtgactcatgcctgtaatcccagcactttgaaaagctgagactggtggatcacctgaggtcaggagttcaagaccagcctggccaacatggtgaaaccctgtctctactaataatacaaaaattagctgggcgtggtggcacatgcctgtaatcccagctactggggaggctgaggcaggagaatcgcttgaacccaggaggtggaggttgcagtgagccaagatcgcgccattgcaccccagcctgggtgacaagaatgaaactctatctcaaaaaaataaaaataaaaaagataacatgagggtttctgaatgctgccaaaggtccagataggcagttcctgacaagctcagagtctggaatctgttcacgcacagctaggctggaaagcagttgtatcaagcagaagatgaggaagtcaagagctggccgaggatgattttctgtcctagagaaaaacatctatgtggcaccttcattcttccctagggagctcttgttctttgcagatctcctccatctttcatccctgttccccaagcctcagccttttcggtgttcagtttcaccagcaaaagaaagggagaagcaagattcaggtttcttcttccttttccccttaagccagggtgttgttcaagctctcaccccaggtgtaatttcagagccttctcatgcgtgctgggtaatctgcgagaggccaacaggtcattgggcattaagcccaggaaacctgccttagaccctggtggcagcaggccaccaggttcctcttgtcaagtccagacttgcttgcttgatcccttggaaatttgattataaagagcattgccctggtagcttgtggtttgacactcagattgaagttttgattttgttttagcagaaaagagtggtttccaaaaccaacttaaactagactataaaattcttcctgggtcagaagtattaggaaagacagtgttggtgtactggctttactcacaacttgtctttttttttttttttgagatggagcctcactctgtatcccaggctggagtgcagtggcatgatctcagctcactgcaacctctgcctcctgggttcaagcgattctcctgcctcagccacccgagtagctgggattaaggtgtgcaccaccatgtccagctaatttttgtatttttagtagagagggggtttcgcct

SEQ ID NO: 33697 - DNA, 2076 bp, Homo sapiens
ggttcagagggaggagccagctgcctcccgctgcaagccccgagctttgaatcaagcgcggtagtttcagctgtagccaatcctagaacaaaatctttttgcgtcagttgttgctgaggcctagatctcacccagatcagttctagtcgctgctgcttgtacccgtcctcggcccttgcgtgtccgtccgttacgactcagaggacggagagaaagtctaagtcaccttcctcagtatccaggccggaaggagactctcagctactcgccctgaacatgcagagcagcactggcttccctgtctctggatgccgcaggggcgtcctgtcaggagttgtagtgtcaagattccagttcttcttatgcgacttgctggagaagcaggaagttgctgtttattggagaagtcgggctagggagggaaacaatcccgcggagccatatggagagggcaggaggtgtctagatagtggtaggccggcgggggacggagggtatgggtggtgagtcctggccctttaaacccgagggggaggatccggaagtggatgggcggggcgaagggtcctcgtatataaaagggccccggccgcgcggggtctctaatctgccattttctgtccctgagtgagtctctggcgtcccaaattgcctgtttttctcgcaggctctattccgttcgctggttcgccacctcaggggaacgatggccatggagtccacagccactgccgccgtcgccgcggagctggtttctgccgacaagtaagcgggactgtggaaagcttaaggcactggccagtccgcggggagggctaatggacgggggctccggagaaggggcagaccggtgggcgggagtacttgccttcccaagagcagctgtcgctgttcgggaaggcctggtcactggagcagtccttcttttgctgagagcctcgcgcagcagcggtaacggcggtcggctggcgccccctgccccgcttttcgcggccgccatcttgccgggggcagcggcggctgtatccttcgcctgcccctctccttcctcccccagcccggggcggttggccgggaggcggggccctggcgcgcgggttggccttcacgccccttctgtccccagcgtgtgcctctggtagaacccctggataacccgggaatataaccaacgaagatttggcgccaaaagggaaaaaaaaccttgcacgaggaaggaggctggacctgaggggtcggggtgggcggggccttgctgagggcggggttttgcgcgcgtgcgttcgcttccctcgccggccctggggcagggggcggggccttgaggaggcgggaaaactccattgtttggggccgctgcggctccagcaggagctttggactatctccgtggggccggcgaggctagttccccccgacacctcgctcacgtcttgtgctgggagatagttatcgctccccgcgactccgtgagcccctgcctgtggtggggaggattgtcgttctttagactttggaggtggtgtctgtttggggggaacattaccggacgtaaagcgtcttcaggaagcgctgtctggagctctcaccagcactgtttggttgctaggtgaatcggcagtagtatgcacgaagtggagaaggactggagggaaacaagataggattgttttgaaagcggcacagtgccactcaggcgtaatctgttttttgaacagtggagggaaacactacacgagttcaaggaaacaagtgctgtttcccatacagtaggtctgatttcccaatcttgccatatttttttaggcatctggttctatttttttttctaatcttgtgcgctttagaggttagttgccttccctgtaaaaggaatggttgctgtgaagttttttaaattgatattctataggcttacactctgtcatgattatgtctttgtttgtttatagttagagatttacgtatatctctgcttaccaccttttctctctgcgttcttgtagagcagtggttctcaagtcaccctgagaatcatttgggaactcatgggaaatacaattttaatttcaaact

SEQ ID NO: 33698 - DNA, 600 bp, Homo sapiens
tgcctaccaatttcatccttcctctattcgctggcaaaatgggaagcacttttaagtttactagcttcccaaacgttttatcaataactcaggctgattcttttgtgtactgtgactaggtctgctttaatctatataaactggtaattccatttgtgtttacccttaatacaacacacatcccccctgaaactattaagtaggttaatgcctctaaaacagtttctaggatttaatctgagatccatgtagtagttgaacaatcactgcctctaccttttcctcctcttcatctatcgccataaacaaatgtgtgttcactccaaaggtctgtttacccaagtgccattccccttttacttctgcccctttgacctccacaataggttagcaagtacgtttaatctccaaagtgtgctgcagctaatacaacacttaactgtgtcatgtaatgagaaaagccttaggatataatgaaaaaagtgagatacttaaaaaaagaaaaaaagaaacataaaaaagtgagatacttggcagtaataaggtagacattcatgtggactgcctaattacttacatccttctaacagaaagctatta

SEQ ID NO: 33699 - DNA, 1132 bp, Homo sapiens
atccgggagacagaggttgcactgagccaagatcacgccactgcactccaggccaggcaacagagcaagactccgtctcaaacaaacaaacaaaaaaaattgttttctacaacaaagaaccctaatcaatatactctcaaaagtcaatgaaagccaggcacggtggcccaggcttgtaattccagctactcaagaggctaaatcacgagaatctcttgaacacgggagcgggaggctgcagtgagccgagattgtgccattgcactccagcctgtgtgaaagagtgaaattgtcaaaaaaaagaaaaagtcaataacctgtgaatccccaacttcaatggcttacactgtttacatgttccttagcaaaacccatcttaaatcccctgatttccatgacattacatcattagaccagcagttctcaaacctggattacatcaagctaaaaaaattcaaaagatgttttaaggactgacacaggattgcctattttatttggataagtagaagattaaaaattttaatatcacaatttcattaaagacagtatgtcataaaagacaaatcttggaaaaaggaacaactcaccttaaaaaaaagttaacaatcttacattgataatattcacaaagggctgaagtctttgtcagagagcagcaatgagtgacaaccactgtattaacatatcctgatcttctccctaccctgtgattacagatggtccctaacttaggacgatagttcaatttaagattgttcaactttacaatattgtgaggtgagaaagcaactcaacagaaaccatactttgaattgtgatctttgcccaggctagcaatacgcagtacaatattttcgtgtgatgctgggcagtgccagcaagccatagctcccagtcagtcacaagggttagacaacagtaaacacctgatactgtacagggtatgtgttgccagatgattctgcccaacagcaagctcatgtaagcattctgaaaacgtgtaaggtaggctaggctaagctatgatgcttcgtaggttaggcatattaagtgcattttcaacttaacattattttcaaattacaaatgggtttatccagatgtaagtcaaggagtagctgtacttttt

SEQ ID NO: 33700 - DNA, 4981 bp, Homo sapiens
cgattgtgtcttatctttaactcaaaattaaaaatgaattacaagcagaaatgtgcaccagatttcttatcattctaaatttaaatggttgaatgtgtcctcctcagctaagcattttaacagccactgatgagcaatctagtaaattgaattcgctcaaaataaaggtttccccaagagttccccccacaccacaaatcaagagctctgataaagacaccatccagaatcaactgaatgtttatattaacatgtacaaaccactgagtacccccccaaaaaatcaatatctcactccagtttagtagttaacagtgacaaaacacaaagcaactagcttgtaatttctattaaaaactttaaatatttttcctgtaaaaccaccaaaataatttaacaacaacaacaaaaaatcctaggggtattaacaaaaaccaacttttgtatttgaaaaaacgtcaaaaggtacattgaaaactgactccctaggaaagatgagtttattttactattaatttcaaagttctcattcacaattagcatttcactcttttatcttttaaatagatacaggcttcagcacctttccaaatattgaaatttattggttttggtttccaatctatgactttttgtttaaacttctggatctatcgattaaaaaaaaaaagcaaacaaaagacagtctcttgttcaaaagggcacgacaatcaggtactccatacctaaagtatgttttcacttgttaaaatgtcttacactattctagtaaatatctcaaacttaatagcaccctaatttcctttcaaatattggataaaaaagaccttagaaaagatcagcagtctactaaattacaaatataagtctaatgaggagtgactaccaatcactttacttttggataagatttacacaagaacacgacttactactaaactaaaacatgaaccactattattaactgtatttttctggtaagcaataaatgtcaatgttaaaaatatttcaacaaatatgacaagccaacttcagagcacgaagttggcagataaaattgacaccacagcacaatttcaaaactataagcaactattaaacacacacaccaccgcaccgcacccattcttatgtaaacttttggaatagtcaactttgtgagcctcacctttgttttcacccagcataaggagagttaaaggtgagacaccaactgcaaaaaaccaaaatatcaaaagattcagttaatgtccccacaggggaaaggactaaaatctttaaacgttaatgtatttaagtaatcgaagggcagggcacttccccaagctacagccattttggattcagactgtctttcgaatttcacgggttggggagaactagatttaaaacaacagaaaaaaaataacacttaaaacatttcaggatcgaccagctttccctgcccctccaaggaaaggaggttggtagatatcggatagactcaatctaagcgaaaacacctcgctaccacagagaaccggaaagctgggggttaaaacttttttcccctcagatatccaacatttgacttacactttttcctccttaggttttcctttgaaggaaaacaaaagcccttagctctcatttcaagaaggaaagaaaaaaacccgtaagccaagtcactcaacgagcaccaagccggatcgcctggagaggagccaaagagccgcaggtgagcgttccgacccgacgaccgaagttaaagtaggagcgctttcgcggagccccggcgacgctcgcgtgcaaagctccatgcacgggggaggcgggggtgccgcatccgaaccacttgacccgtgggctccgctcgcccctctcgggtcggacctatacccaaccacctgtgtgagagcttctttcaactagttttaacagcccgttggttaggcaccgggcggagccccgcgccagaacgactccaggatctcctactgccccgtttcccaaactcccactcaccgggcagcggcggagctatggccagggactagacgctgcgtctgaggacgcgtccccagcttgtcgacccggcagaggcggctagtccacaaccataacaaagctcttcccaaaatggctgcccggcccacaaggtccaggaggggcagagcgggtggaggaggaggagcgaccagcagcacggccctcccatcccccgtccgaccccgccttacacacgcccacctgaagaagcgcatgcgcaagggactgctccggcgaccctcccggacgccagttccctacgctgccaacgttcggcctccagaacggcggttatgccctgccccgcccccggctcccttcttcgccgcttgaggcggcgcatggtcacctctgccccctacagaattgaatcctctgcctttcctcgtgccgcctgaggcacggacaagcctagtttagtacgccccttctaacccccttgcccacttccagggcctgggcgcgtatgaatgagtgggtgggtatgcatgtgtgtatcccttttttcttcaccctcccacagcccgccccttggccagtgcgcgtcccgaaactacctctacaaggacttgcaaaccggtttcggaggaacgtgtgttttccggccctttcccaccttccgctccttacttctcgtgtgcgcgtcgttgagactccagtccccagcgggccacacggcctggccccggaggctgcgcggctgcgtcggccgcgctacccgctgggagtagtagttcccctggagcgcaggcgtcactcccccgcccaagcgaagggcgggattccggcgagagcctgcgcttgcgacagtgccgtttctcctacctgaagtctcattgggtatcgcactactggaaggggcggcgctgccatgacagagaaggcaataaaactgaaggcctagctcgactaaaagcgcttactattaaggaagacttcgctgtggctccatccggcacggaaagctaaaccgtgtaatggctggcaaccaggaagctagactacctagaatccggaggattggagggactggccggcgtgggcccctgagatctcctactacatgtcttcagttttatccatagacacggaagggcactaaaattgcctggtgccatttcctgtgaaacaagtctagataagagaagggacttgcccaaggtcacatagccgagaaataaagccgagggcagtaggagaaatgatctgactttccgaaccacccccaagcctagggcccttatcaccacacctttcatggaagtgaaaatcctgctcttgtgctctttaacccttaatgaagtttataggtcccagcaaagaaaatggatgtaagaactgggcttttttccccctctaaatgatagtaaagggccctaatgcagtgagatgtgtccccataggccttataaaccctgttttgcaaagtaaaacataagtcccacagatggcaagcaattcaggtcacactgggcctaaaatcccgtctcttaccttccttcaccaccatcattctgagattgtttcagtacttgcactctacttacccgaactctgtgggcagattctgctgcctgggagccctggaatagaacttcaaggaccgttcaacatctggattcaactagaaattaagaatggcccccaaacagaaagccgggcctaggaaccaattagcgcaggtcaagtccctacccggactcattttttttcagccctcaggaagtaggggcctctctgaatccacttgccggaagtgcctttccagtggacctgggctgttgttgcggttgttttccttctctccgtgcaacgctggcaagtctcaaagtcgccacaggtgcaggttgggatgggaggcaccaagggttggtagtaaatttgcgacgttgggatgggagggcaccaagggttggtagtaaattggagacgcgggcactctcgggcagggtttcccgaagacactggcgtctaaaccccgccttcctttctcagaggtcagtttgaagctggcagtttgcagtcttcccaccagggcaatgggaatattgagctttttcatttatattaggaggattaagctttgagtctcagtccttaatcccgcatcacctgccgtccctggactttttaggttatcactttttaatacccactagttggaaagcacgtgccacagaggaaagggagtttccaaagatggggggatggttgagattttaaatggagtggtctggaaagtccttaagaagaaagtgattttgaacaaaagtgatgggtacgctctgcgggcattttggtctggggctcaggtgggtgggtgtgggtgtgatctaaattctactcggaggcccaggattacttacctccctacttgcttccttaagtatagtatgaagacattaactggtatacaggatttcttgacccagccctaagatctgtgatcaataaattagttcaatcgattttttttttttttttttgagacggagcttcgcactgtctcgtgggctggagtgcaatggcgcgatctcggctcactgcaacctccgcctcccaggttcaagcaattctcctgcctcagcctcccgagtagctgggattacaggcgcctgccaccacgcccagctaattttttgtatttttagtagagacgggggggaggttcactacgttggccaggctggtctcgaactcctgacctcgtgatccacccacctcggcctcccaaactgctgggcttacaggagcgagtcactgcgccctgcccaatcgattttttaaaattaagcagcaactgtaggtttttttagacatcccattctcttggttaagaatgaaattgtcagatctagatccatattatcattcacctgtttttactggctgcttacattagagtttttaatcagtccctcctgtgtaaagtgctttgtgtcagggacggttc

SEQ ID NO: 33701 - DNA, 1829 bp, Homo sapiens
agcctcccgagcagctgggactacaggcgcccgccaccacgcccggctaattttttgcatttttagtagagacggggtttcaccgtgttagccaggatggtctcgatctcctgacctcgtgatccgcccgcctcggcctcccaaagtgctgggattacaggcgtgagccaccgcgcccggccagggaggatcgcttgagtcctagagttcaagaccagcctgggcaatacagcgagccccccgccgcaaaaaaaattgttttaacattagctggctgtgatggggcaagcctgtacttccggctacttgggaggctgaggtgagaggatcgctagagcctgagaagtcgaggctgcagtgagttgtgatcgcaccactgcattccagcctaggagaaggggcgagactgtctcaaaaaaaaaagcagattattaggaaacggtagaaatgcccagaggaactaaagcggacctatgtttgctggctttgaattcactgctgggaacatgtggaaactgcttcagcaaaggggtgtcagaaagaatccccggaacaagtgtcaaaacacccgtggttctttgtgcttgagttgggggcccggcctagagagctagccctaaactgctgctacactaaaagctaataatcgttcctgcgctacctaaaggtcagggaagggatctcagacaaacgaggcgacaacagagggactggggacacagcctcaggattccccagttggggcgggggaggcaggagcggtccggacgagaaggtctggggagggcgacacttagactgtcggaggaaggcctgcggcggcagaaggaaagacaaggaaatacacagttctagaggcttctctcactccagtcctcaggggtccggaaagccggagggagtagaagaggaagttcccaaccccgtcacagacgcgcccgaacgcaggccctccttacccgccgcttccccttccctccggcgcccgctcaggccctgcgcgcgcagtcgcgaccagccccggccggagagggcgggggaaacctggcgggggtgacgaggcgggagtgactgggccgtacagttccccgagaactggaggcgaagccgggcggtgggaagggacttcggacgcttcgcgggccctgggttttcactgcgcgtgcgcgaggttcttccgctcgcgggagactgggccgctggcgcctctcagtgcccactgatggggcccagggcttgggcttgcttccccaaggatcaacagcttagctgcaagcctctgcttctgcctgctggggccggctggctcgccctttccattccgcttgcactctgattcttgtggtgtcccaagaaggccgcggatctcagttaagcagagacgagccgaacacctggcacggtccttctctactgttctctcgaatcgttttctgagtgcatgactgagcctggcactgaagggatacttattttggggaaggaagaactcaaaagtccagtttttttcactgttgaccctcatgtgtcacattagtggctttcaaactgttttgatcccagcctacggtgaacaaaaatattttacatcaaactcaataccacatacttgtgagtatatatatagaagtatatatctaacataaaatctcatttctttatttttatttttattttttattttttgagacggaatttcgctcttgttgcccaggctagaatgaatgcaatggccggatctcggctcaccgcaacctccgcctcctgggttcaagcgattctcctgcctcagcctctcaagtagctgggattgcaggcatgcgccacca

SEQ ID NO: 33702 - DNA, 3060 bp, Homo sapiens
ataggcgtgagccactgcacccggtccatttaattgttttaagcaagcaagtaacatataggaagagtcttgtgagggctttttgaaggatgagtttaaagacaatgagactggcataagtgaacccgttgaaggctttctcagtcaagtaggtgagggaagatgaaacttgaggtggtgccaatgggacggaaagaggaggcagattggagaaatagtgaggttatagaggcaataagacttgttcatttattggatgtgaggaaaggacaaggaaggagtccaggatgatttccaggtttctggttgaggcaactggatgggtggtaaggaactgggacagggaatagaggagcaggctggtgacaggccgtagagcacattggttatgtgcatcctcccggcctcccagaaggaatccatcactttttccacttttataggtgtttccgcactgtctttctgtccggatctggcagacctgggtttgagtcctggctctggacttataagctgtgtgatgttgagcatattatgtaatttgagcctatttcctcaactgtaaaatggaaatacaacttacttcttgtttgtgtatgtctgaattgaatgcacagtgtgtggtatgcagtgggcactccatagtgttggctatttttattactcagaaaggggtcagggaagaggcccaggacaaatgggtgaaggctttaagcaaggcttctaggtcaaaagaggaaaaacacaacatgtggcagaccagctgaagccagagggaggccagagctgagctaccaccacatgttgctgagcagatgagtcactgcaggcagcaggtcaggctacccaggccacagcagactgggctgggctctacacgatgacttcattgtatgccttttttgtcctctcctcctcccagaaggaatccatcactttttccacttttataggcgtttccacactgtcttactgtccggaaagagcaaacacggtggaaagggacagaagagccagaattccgtctagtttgatcactgatttgctgggtgacctggtgcatttcacttcgcctcagtctctttatctgtaatatgagaatgcgcagatttgcctcctaagtgtgatgtgagaattaggtgagagttggcaggcactaaataaaaaagcatgcattagccttctattcattagttgtgttattctgtctccttcctgctcccggcccctctctccctagttctttgaggacaccgatcgactcgaactcatttttgggtccccagcactgagcttggcccagcagtttcatgaatggatgaatgaaagattcaatgggagtccgcagccgctgacggcgcgccgagagccccgctcgcttctggtcctccgactgcgcgccagggccacgggcgggtcctttgcgaccgttcgctggcgcgtgcgcgggaggcggcgcgcggccggaggtggcgggcgggctcccggtgcgcgcgcgtgaggggcggggccggccgaaggctggctgtaggcaggcggctgagccggcggcgggtggcctgcccaacgtgtgctgggtgggagaaggcgaggcgtcagcgatgctgtctcttccgtgaggagcgcagaggaggtcgcggcgccggaggccccagaaggctcgaaggcgccgcgggctggggtcggtggcttagggagcccgtccggccatggtggccgcgggtggtggttggcgcggctgcgctgcggcccggggcagtgcggagccgggacagtcgcggcgctgacgcccgcgggccccagctgcagatatgaagcggagccgctgccgcgaccgaccgcagccgccgccgcccgaccgccgggaggatggagttcagcgggcagcggagctgtctcagtctttgccgccgcgccggcgagcgccgcccgggaggcagcggctggaggagcggacgggccccgcggggcccgagggcaaggagcaggtagggcgggttgggatccgggagggtgaacctgaatggaagccgtgggggaggggatcttcggcgggaggacccgggctggagctttggaggggtggggtctgagtagttcgcggggaggagtgggaggtctggggaggccgagaaatggggagtggagaaatggaagtggtggcctggggttgtattggaaatgggggtgtagaagaatgaaaaattggtgcaagagatagtcaggggttctggatggggcgaaaggacgctggaatgtgggctgagtgtgtgagctgcaacgagtaggcttactaaagaggcgttgaggagttatccataggagtaaatagagtaagatgtaagtcaatttgatgtagtgttatcctgttttctagaggttgtccttaaaattgtaaaaacggatgacactcccaagcattctctgatttggccatcattatacttttgtaccagtgtgttcacaatcattgttaaggctctctttaccaaccatctatttcacaagaaagcacttgtgaaacacctgcatgtgagcagtgttaagcccaattttgtgaacagaattcgtagatatatggtttgcctgctagttttccactgaaaacacattactgggaaaacacagcagcatacaaatattcatggagtttctgaatgaacaggatatgtttatgtaatttattagtcaagagtaggtgtatttatgagtaggggataaaggtcagttttatcaggcaggagaagctgccactagtagcggtaataagtttagtgaaaggagaataagtaatccttggtcttgttggatttacagaaaaatgttctgtagtaatgaactctagtgacagctttccttttgttcagctctattcgggatcctactgacttcatccatgaatgttttaagacttcttataggtctcttacctcttttctctcagataaattagcattttccttagacatttttttttttttttgagacgaagtctcgctctgtcgcccaggggagagtgcagtggcattatttcggctcactgcaacctccacctcctgg

SEQ ID NO: 33703 - DNA, 2151 bp, Homo sapiens
actttgagagtgccaggtgggtgaatcacttgagcccaggagctggagaccagcttgggcaacatggtgagatgtctgtacaaattaaaaaaaaaaaaaatttaagtagccaggcgtggcggtgcacacctgtagttccagctatttgggaagctaaagtgggaggatcgtttgagcctaggaggtcgatgctgccgtgagccatgattgtgcccctgtactccagcctgggtgacagcaagaccgtgtctcaaaaaaaattaaaataacaacaacaaaaattcatggaagattttttttgttgttgttagtttttccagaaaccaactatccctttatttcagccttttcatatcagtttgcttttggtatatctcttgcaaatggcatacagtaggttttctttaaaaaaaaaaaaaaaaagtcctgtttgtaatgaaaagtttgtctgtgtacatttattatgattaatgatatatttggacttgtttgtgccatattattttttgtattccatatcctacatctctatgccttactgtccccttttttttttaccctttaaaaatattggtagagttttttttcttattttctttttctatttctactggtgtgttagaacaaattcaaactttaaccccctcctgaacactacaagcactccatgtctcttattacctcccccaaacttatttggccatgtaatcaaactgaactgaaacaggccagtttaaaaaacaacaacaaaaccatgaaattcactgtaaccagaggtgacccagtttacctgagctagcatgataagaaagttctgttttaactctataaggagagtcactttgtaatgaataatctgctttttgttccctgtttgtgctttcttaacccattttctgcttagaaagccagccccctctgcttagctcagcagaacacgcattctatttttaagaatgagatgttacagaattgcaaacaaaagtcagtttgatctttaaactgaaagtcagtttgatctttaaactaaatctgttgtaattttgtcctttgacaatggtattgtcatcagcagtggattctgagtaggccctagaatgttcaccactcctaccctaagcccaagcagtgttatttatgttagttacattatgtgggtttaattatgagttatatcaagagacatataatattttagtggcagagaatacctttttttcatcattgatttgtttgtttttcttgagttctcactatgttacctaggctggtctcaaactctgggctcaagtgatcctcccaccgtggcctcccaaagtgttgggattacaggcgtgagccacagcaccttgcctcgttgattttaaatgttagttgaaaagttattgtctccaaaacccaattctctatccacttccaatggagtggattattgggttatgtttcttagagtctgttaatttccttctctggaaagagtgctgctactgcagtagggatcaatatacgtatagtgtgagaattcaatagcaaatgagccaggctgagtcccagggagggagttgcctcaggcatagacagctttgacccatagtcatctccacgctggtgactgttgacataaaggacaaggaccagccttgtgactcctggcttgcatatttacttgtgggggtagcggttactgcctttggacacttggcctttgtcttttctttggaaatattttatggctttagtcattgtgaataatgagtagtgcatataggcagtgaatcctcatctgtgggaatagcaccatttcgtggtttttttttttttttgagacggagttttgctcttgcttcccaggctggagtgcaatggggcaatctcggctcaccgcaacctccacttgctgggttcaagagattctcctgcctcagcctcctgagtagctgtgattacaggcatgcgctaccacgccctgctaattttcttatttttagaagagacggggtttctccatgttggtcaggctggtctcaaactcccgacctcaggtggtccaccagcctcggcctcccaaagtgcttggattacaggcgtgagccaccacgcctggccatgaatagcaccatttcatgttttatttaatacctttagaagttt

SEQ ID NO: 33704 - DNA, 1986 bp, Homo sapiens
ctgggtgacagagagagaccgtttcaaaacaaaacaaaaaaaagaaattatttcacataacgtcagttacctacctataacttacagagttgtaaagtagctcaaagacaataaaagacaaactagaagagtattctctaaacaatatgcatagttttttattggaaatatctagtaacctttttttcttttttaactttttccaatttttttttttataatctcctaccttttcatctaaaataatttgaaacgtttttgttcacaaaacaagggtggtctcattgggtttggcctgattatttgcatagtgtggccagaatattaatttatcataaagccttcttaaatttactttgctgtaaatttttataaagaatctcagattggacttttaaaggcctctattatttgtattttgaggctaggaaggcaagcctaagaaataccacatttcacttgtaataactataaatttgggtgaattcctaagggtcctgggccttccaggaagtggccttccttaccatctgtaagtctggaccctgtaaagccagataccaggccagttttcccaggaaggttttgtaagtattggctccataaagtcaaccatagttccttaaaagtggtttgttatacctgatcaaataagcatgattctcaaatgtgacctttcaggcaagctctttgttggacaaccattttttacaattatattctggtcaaaaggagaacagattcttgtttagccctattcaaataaccatattgccttgaactgtaaggagactcagtaagacgttcttagttctgggttaggggagggtcagtgagaatcagatgtgatttaggaatgtttcattttacaagagcaaagtctactcaattgttaagagttatagatagcctaacaaggaatacaactggctcccttgcatattagaaaatggacattaaaataatatttcaaacaaattactataatcatttcttatagttcataccgttctgtgtacctaattctcatttcactggatcttacgttagtagtcggcttcttaactaaaaaaagttctggaaattctgactcattccactggaatgatctggaagttgtccagttgtccaagcaatgctattggaagcctgtctattctttgatgtgtcagtagttttaaaatacctgccgcagtccttttccgtggagctctgagacaacccttctttgttgaagacacagactctggcttctagctgattgtagagccttcagacaggcctcagcacaaaacagaatctctctgcatgtgacagagtctcatatcataagaataatgcaactaacaaggaaattaagttgtttttgtcacatgtaaaatgagagtaataaggccagtccaaaaacttatagcaaactgtaagagattattgcaaataagacagtgaaggttacatctgatttagaaaacatagataaacataatttttagagagggaaaaatctttatgtataacttataatattcttgtggtattatacagacaccaaaaacataccaagaatatactaaggacatcaagtaaagagattcaatgggtctggaataagtcctatacatctatatttttataaaactccagtcctatacatctatatttttataaaactccactgacctagaaggtgctggattgaaatgttaaaagtaaggttgttaccaagtaaacattttcagtttttattatttatttatttatttattttagacaaggtcttgctctgttgcccaggctggagtgcagtggctctgtcatagctcacggcagcctcaacctcctgggctcaagcgatcctcctgtttcagcttctcaggtagctgggactgtaagcatgcatcaccatgcccagcttatttatttcatttaatttattttttattttattttaattttttgcagggggcggggtagagatagggtctt

SEQ ID NO: 33705 - DNA, 841 bp, Homo sapiens
caaccagacatcttattccataccctttgttgcttcacagtgggaagcaggcttcctaagtaaatttacagcagctcttgcaggggtcagattttccgagtgcctgctagttgctggagggaggggtttttgaaggctagaaacgatctactactctccaaatgtggttacaattcaacattgtcacagagaatgcacgatatgccttagcccttgttcttgctgttgactgagatgaccatggcgaggtatgtaagaaattgaaatgccaagtctcactccaagtagccaagtgactgggatgatttaacaccagtctttgcatgaggtagctccgggggcttccaggctaccacccgtccgctgagagttagtgtacccaactctgcagatatccagtacttcatcttactggaatgaaagaattaagacttgccctttatcttcttaggatcctggggaaatggccagagcctgttgaaatggaaaaattagccagttccttgttgtggatctcagctgagtcatggtatctgtagcagagtgtctgacctttttttcccctggcagctgttaaagatttgccaagtgagattatgtgtacctttataaaaaggcatgtggcctggaaatacgatctttagtgttttggcttttattttaaattttaaataaggttaaggcaaatgaagctggaattaattatccgtccctgaagtttcaagacattttcactttcagacacaaggatttagatataacagtttgatttacctttcataggccaggtatacatgtatcttctttattttaatccttgtaacaaatcatactcatccat

SEQ ID NO: 33706 - DNA, 747 bp, Homo sapiens
tctgatttccagtagtatgaagagccaaagttagtgatcatacacataaagtgagactagtcagcttttctatatgactttctgaaacttctcaggctaggattttggaaagattgtgtgaagatactgaaattactcctgacagaaggcatgataaaaagaatgtgagtgatacaggaataaaatccttaaagagtgaaggggatttcccaaaggtttgtatgtgacttttagcaaggaggagtaatggttgttgtagtctgatgacatcatttcaaacctgggtgtttttatggagaacagagggagaatgcctgaagatgaaatgagccagcaggatgtctaccccacctctaggtctagtggtacaaagggcatgtgaaatccaacagccatcatttgagagagctgccaaggaagctgcatccacaggggacagtcaagttgcaacctgttcagggtatgttaagggctgtactaaatgtgtgtccagggtgcttgggagtacaaaagtaaagatttgtaacccaagctagtcattaagcaaggtgttctttttggaggtagctcattgaatgaggtagaaagctcattctaagatccgtatgaaatagaattatatgattaggaaattaacagtccacagcattatagttgcctggatacgatggctcactcctgtaattccaacactttgggaggccaaggtgggaggatcacttgaggtcaggagtttgagactagcct

SEQ ID NO: 33707 - DNA, 970 bp, Homo sapiens
atagaggcagaaagtagattagtagtagccaggggctcgtgtagatggaaatgaagagtgactgctaacactcgagtagagggaaatgaagagtgactgctaacaggtatagattcatttttgggcgataaaaatgttctggaattatataatggttatgattgcatagctttgtgaatatactaaaaacctctaaactgcacacttaagggtaaatgttacatgaaagttatatctcacttttaaaattgtatgagagaaaaactagagtgtttagagttgcatatttagttggtaaagctataaggaaatgattatcataatattgactttagatggggtaaagggaggggttttgatcaggagggattatgtggagggattttggaagatggcattgttaaacctagatggtgtttacacaggtgcttgctatataattatattcctttataactagttaaactgtataaatgaagcagctgattcaaggtcaactgactgctcccagttttgtttataacttgtttctctgggatgaatcatcacttacctttgaactgtctcctccagctgctaaaatcgattcttaaagtggaaaaagcctgcttgctaggctgctagattttctgtcagattttttgttttttttttttttttttggtcccattgagccagttattgccatccttaaggaaggattcttctcaataatgtcattttttctggagctagaaccgtgaatgtaagtcattaataacaatcagcttagctgggcacagtgactcacacctgtaatgtcaacacctggggaagccaaggtaggggaattgcttgagaccagcctggacaacatagtgagacccccatctcttccaaaaattaaaaaattatctggcttttccactttatgatggcttacacctgtagctcctgctcctcaggaggctgaggtgggaggatcatttaa

SEQ ID NO: 33708 - DNA, 1506 bp, Homo sapiens
ttcccctctctgcgaaatcgctcaatatattctttgctatgttgttcttgtgtgtgacactgctcttcaaatattttaattgtttcattaaaagcttctattgcagtcctcttcatctgtatttcctacaggagagaaaaagaaaaaacacaggcttcattatctttattattttcttctaaccttggtcttaaacaaattttgtaattccagttattaatgtaatcccatataacacctagtctttcaaaagtcttctccttgtttaggaggactaaaacaagagcttttattcaacccctactctattacttgtatgtaaaatacatcatttaaactataaaataggccaggcgtggtggcttacacctgtgatctcagcactttgggaggccgaggcaggcagatcacttgaggtcaggagttcaagacagcctggccaacatggcaaaaccccgtctctactaaaaatacaaaaattagccaggcgtggtggcgggcgcctgtaatcccagctactcaggaggccgaggcaggagaattgcttgaacccggaaggcagaggttgcagtgagctgaaattgtgccactgcactccagcctgggcgacagggcaagactttgtctcaaaaaaacaaaaaggcatctgaatcacaattccccaaaaatcttcaggttaaattttgttcagtttgctttttagaaaggcaataaatatgcataagggtctagaaaaactgctgtcctgaatgtttacaattctagaagttttgatgtttatgggataattcctacattatctagcacttactaggctggggtgtttggttttggttttggctttggtttcggtttcggtttcagttttggttggtgggtgggtgggtggattggtttttttaaaactgttgcctaagctggacttgaaatcctgggcttaagggatcattccacctcagcttcccaactagttgagactttaggggggcaccacacacctagcttaagcatttgtcactttcggcaattgattactgagaatccactatacagaaattaccatctggtgatagagatttgtgaaacgtgaagtctgccctccaggactcagaatatacaggtggaacagatttctgaactctaataaggtttggtttcatgtcatggaagaggcaaccagttatttattaactagttatttattgctttacagagacttcacagaggaggtgacacttaagctaggtcttaaagaactgagatagaggaagaaaatacagcactgcacaaaggaggcatggtataatgtatacataaaataacaaggcatgttcaaggattagtaattgcccagtagggctagaacattagaggattagcagatgagggaggctggaaccttgtgatagtccatacagttaagattacatcatatgtatcttaatactaaaaagtaactagaattcccatatgccaaatatcttggtactaattctacaactctta

SEQ ID NO: 33709 - DNA, 1542 bp, Homo sapiens
attattcagcaatagaaaggaatgaggtactgatatgttacaacatggacgaatctgaaaacattttgctgagtgaaagaagcctgtcatgaaaggccaaatattatataatcccattgtccagaataggcaaatctatagagacggaaagtaaatcaatggttggctagggctggggagtaaagtgggaaatagggagtgactgctaatgtataaaggatttctttcagggtaatgaaaatattccaaaattggctatcatgatggttgtacaactctgtgaagatactaaaaatcactgagttatacaatgtgggtgaactgcatggcatgtgaattatatctcaataaagctgttttaaaataaataaatatcaggcttctgacattaccagatgggggtggatttgctataatccatactttttttcaaagtagctaaataaccatcttgtttgaaaaggattttatgtgacttataaaagtagctacagtttgaactataacttagcaaaatttataattcttctacttacccacttaacacaagaattaacagtgtaaacttgtgctatacaaagcactgcactatagctatgaaaagttacaaagacaaggtgttccctgcactcaaaagaacaaatccagagagaatgacacatagaaatacctaactataatactcatcagaatggggtaaaaagcaaattgtaacagaaacccagcaaaagggaaactttaaggtcaaacactaagcttctcaaatctagtccttagtgatttgagtacatgaccaacagggctcaagaaccaatgtgcttcattgtatcagcaggtgggttacactctaatcaccttcaaacggtgttatggagacttttctacatcccttcactggaggagctctatattgagatgagttgagctgaccagactgcatgaggaagctgctatttatggataatgatagttcacagacagctctaccaccaacaaacatgtaatgaccatttcacatctattacagagggctgcctccttgtatcttgctgttctcaactacagaaatgtaagaagaatgaaattattataaaggcagttgctacataaagttgctaaaagaacacaatcataagatctgaactgaatgcaatactggcctatttctacattcctactatctataatcactccacacatacataggcaaatatgtattgaacacctcccatgttccagaagctgtgaacataacaatgaactagattagatagacacagtctccatacatatggactttataatccaaaaggataaatttcaagataattcattgttcctaaaattgtgagtacactcaaatgtagctctatcaaactaaactgaatcttccatctaaatgttttaccttctctgagagttgctccccaccctcccatgtagattgtagaatatactgggcaaatgtgaataaaaatttatctcctaataacctcctaattgcatgaagataagcagatttatatctatcttccaggttgt

SEQ ID NO: 33710 - DNA, 2100 bp, Homo sapiens
ctgtaactgcaaatctcctcatcccgaacctagcgcacccaggaatacttctgccctgaaaacatcagcaagctcttggtaaatacaaatcagacccatcacgagattctttttttttttctcccaagtacctggaggatccatttcaatataaaatatcagttctgtcgaatagggcatcatcacctccctccagtctgcgtcatcgcggtccatactccacaccgtattgtacatcgcgctgtcaggggcaggtcgccaggagatatatagaaggcatatattttttatctggtatttaaaaatctaaaaatatatatctgcaaaagttccacacggaaatgtacttcgggttttccaacggccagtaccagtccggccaaactacccgaacagggtcctccccctctctcctacagaacacaacaaaatgcccccgaactttcaagctatgggcttttctcctcagaggattacacagaggcttgggggacggagagcagaggtgttaaaaagcggcttcccaaaaatcctttctacacagtcgctctccggggagaaaagctcccaccgcctccaaatctttccgcggaagccacttttgtgtccttcgaaggagggagaatgaagaggaaaaaaaagaacacgttgggagaaacccgggcaagtgacaaaggaaggcaaaaaagggggctggagattgcgttcaagtttcggggtcccactggtctgcagagagcgaatcccccagaggccgggactcgggctcctctccggtcggtctcggaaccgaagctgccgcagcctcgggaatggggccggccggagaagtccagtcagctcggcttgtctgggcgctcccgccggggtgtaagaaccaacccgaccgcaccaactgccctcaagctctgcccggactccagccactagagtttcattttaacggcgcggaggggacaccctccccgccccatgctgcccacccgctgaggcgccacccaaccgcgccgggaggggggacagcaggcatcaccaccgccccttccacgccgtcccgcctcgatgtaccgggattctgtcaagtgcctgagaacatgttcaaaaagctgctctccatctcgactttcacgtctccccaccgctctctaggcttcggctccccaatcagccatccgcgctctcccccagcctcaatcagaatggtacgatccgggcgctggccgcactccaggagtcagtgccgggagcacgcgagccaggcgaggagggagtggggcgagggaagagaggcaaggtgggtggtgattggctgaggccggttgccggagcctggagcctgcgtcttttgtctgccttgctcctgcgaaggagcgggagacggctgcgcgccccaagcgggccaatcaggagacagccggcgccggccggtaaggcggcgattggtcagagcccagttactaagcgggacaaaggcagaaggggaaaagaaaagaggaggaaaaaaaagaaagaaagaaaggaagaaaacgcaaacggcggttactgacaggctgggcgagcgctcgggggctcaaactgcctggagacaggcggggctcctgctgaggcttggtccgcccggacgagtaaggagaggagccagggaggacctgctggcgtgagacgcctctgcccggtgattggccgcgggggaagggagcggacacagagggggcacgttctgtcacttggcggggtgcgcgctcttctggtccttaggaggtctctggggagactcctttcctacagacctcttcaccttgctgggacagccctctccgcacccttgacaagttgtcaaagcaatggtccccaaacccacttgccaccttaccactcagggagaggatgtgcccgtggcccctgcaaccttcctggctgctacctgaccccactccctgcttctccccttgagcaattggacatttctgagggaggcatttcgcagttcctctgtgcttcccacccaaagacttttgaacccagaggtaactccccacgcctaaaatagtgagaggtctcagcaagccctcctgctcgagtgctcaaaccaattaaaaa

SEQ ID NO: 33711 - DNA, 2009 bp, Homo sapiens
ggtgaaaccccgtctctactaaaaatacaaaaattagctggatgtggtggcgcatgcctgtaatcccagctacttgggaggctgaggaaggacaatcacttgaacccaggaggcggaggttgcagtgagccaagatcacaccactgcactccagcctgggcgacagagtttatgtatgtattgattagtttagaagcgtgggtagactctctagttctgatgtggtctgtgccttgggcttccttcggctgcagggaacttgtgtttttgttgttgttgttgttgttgtttgtttctttgagacaggatcttgctttgtcaccaaagctggagtgcagtggcatgatcatggcttactgcagcgtcaacctcctgggctcaagggattcccctacctcactcagcctcctgagtatctaggactacaggagtgtgccaccatgctcagctaattaaaaaaaattttttttgtagaggcggtctcactatattgcccaggctggtctcgaactcctggacttaagtgattctcccacctctgcctcccaaagtgcggggattacaggcatgagccactgtgccagtcctgaactagtctttatccctgtatctggaggaagcaataggattccagggatttggacaggagaggctctgccctgagagggttaaaggcaaatccggtttgatttctggcctctgttacccagaccttgccaggctgggcaaagcaggatagggcagacctccagctccatgaaatttgaccctgcaggctagaagtccagctttctgtccttgggcaaacatgcctggaatccagccacaatctgccacctcacttcccgttctagcctcagtttttatagctggcaagtgaggactagtcaccaaggtggtgtcaggctgattcatccactgaagccctgggccgggaggctttcctctaagatctgtgggaactgcgcagggccctcctcaatctaggcctcagaattccccctgaggtttggagttgagctagacagcctttaagagaagctctggctgtattcccactggtacctcactttcctcttgtgaggcaaggaggtcttgtctacatgaggggcgggcctgaagttggattctggaggggagccaaatggggcctcaggtgggtgaaccttctcaacctcctccctctccaaggttgccagcaggtggaacctcagcctcgcctccattactatggtgactattgagcctgttctgctaccacccccgtctccacctatcagaggacagaggtgttctaggcacccatagcccagaaaggaaataggaggctgggccctcacctgcctgttttcaatcctagctatgtggcaggaccctggcagcagtgagggaaagtcttgcccctctgcccaccctgaggatatttctagaacccctgatctcctttatatctgcccaggtgtgcagcctggtcctagctatgcatatcccagctcccatttttctggctctagaggatgtttccctccttacaggatgaggttttagactccctagccaataaagagggaagtttctcggctcccatccttcttactcagctgtgtggtagtaagctacttgccagcactgtttaaggcctgcctgacctctctctccccagctgtgtggtgcagccctgttggcagtgggcatctgggtgtcaatcgatggggcatcctttctgaagatcttcgggccactgtcgtccagtgccatgcagtttgtcaacgtgggctacttcctcatcgcagccggcgttgtggtctttgctcttggtttcctgggctgctatggtgctaagactgagagcaagtgtgccctcgtgacggtgtgtgaaacccagctccacaggctgatgaccaagagtcccctcgcccttgacaccaggccctgggattcccaaaccctgctttggacccccctaggctcaggcttctgtctcacttttccgggggggggattagggc

SEQ ID NO: 33712 - DNA, 2023 bp, Homo sapiens
gccctccctacccagtgctcctgtattcttctatttgagaccttgatttccttggtcccctccattgttggtttctagagatggagccaggcccagggacccaagcgggggatcagacctgggtcctggccctaactgcctcacaggggtgtgcctctctgcaaagccagcctgatcagacttcaggcttccgtcagaagcttagaagttgtacttgggttccgattccagaactttgggttcaaatcattacctatagggacatgacacatagaggtctcccctctaggaacctgctgcccctttcccactggggctggccaacaggggtcccagtgcctgatttaggtggggaggaagctgggagggagcgctcggtggggagggtttgggacatctctatacctgacagaatctccgcagggcccgctggtttgtcagtttatacttccaggtaaggtaccagctccgcttcttccgagccccaaagggcttgatgagggggctgggcttccagtcgtccataccggattggcgggtcaccaatgtcctggccagcccatgacttcaggaatctgaagggaccagagggccacatggggtaagatgctcctcccaaagtctgatgccttctggggagatgagggaggacctcccagcaactcttccctgcaagcacccatactgtgtgacatggggaaagtggctcaacttctctgggctggcaggaaacccttcagtggggttggatcacctggaaattccctgagactggagtaactctctgaatcaaggctgtccaagggtggaggccaaataatcggctcaaagttcgttagcccctacaaggaccaagttccaggccttcccaagcctgtggtgagcaaagagcgacctctcctgccccagtcttcaaccctcgtcccatcctatctgccccagcttctctcctcctcccagggcccggagccgcccgagggctcaggagacctgcaccggcagcgctacccgttccggacacccacgcggaggcactcacggcttaggggccccgggccccgctcgggccccgctagggccctcactgctcggcccggctcgccgcggcctccgcctcctccatgccgcttgcggccccgccccggcctggcccgcccccccgcttccgccgccgccgccgccgccgctgccgcggggtgagagggcgacgggcggtgcttagggcggcggcggcggcggcggcggtggcggcagcggcgtcggggtgtaagcagccagcgagtaaggcgaatgctcagaccgtgctaggcagcttcgcagcccggctggctggtggggctgcctgcacgagagcagcccgctccccagcaccgccgatggcaagcccgactccagtcagaggcctagcaccttggaccagatcacagggcacgccagggtcagaggggctgcaacccttggacacagggcacacaccacccgccccatacccgtcctgggcaaggccgttacctagtcctggggcatgcacagctattggaggccaagggagattaaaatccaggttctgtcactgttctaagcaccttactgatgatgtttaattccacaacaaccccatgaggtaggcgctattatcattattattgttttttttttaattgagacggagtctcgctctgtcgcccaggctggagtgcagtggcaccatctcggctcgctgcaacctccgccttctgggttcaagcgattctcctgcctcagcctcctgagtagctgggactacggtcgtgcgccaccacacccagctaatttttatatttttagtagagacggggtttcaccatgttggccaggctggtcttgaacttctgacctcaagtgatccgcccgccttggcctcccaaagtgctgggattatgggcagtgagccaccgtgctggctataggcgctattactatccctgtcgcagataaagaaataagacctaatatcacaaagctaggagaggtggaattgaaa

SEQ ID NO: 33713 - DNA, 437 bp, Homo sapiens
ccacgtggcagtctgggccgaatgcctctccccactttctgggtgggcgaggcctgactccaaccccggccctccgctctagacctggtaccactgtagattcaatccaaactcccagaaatgtgccgcctttcataatccccagctgtccactacaggtggtaactcccctgctgctcaatgtggcgtaaatcttcccttccatagctgcgggaccacagctcaccgacctgggacaaacacccgagacgggccgaattccagctcgcaggtagtaattccgcccctcccctccccgctccgtcgcgtccagtccagctcttctagccctgccccgctcctctagcccaaccgctccccactgttggccccgcccctccccgccccgtccagctcttctcgccccgccccgctcttctcgcccaactgctcctcgc

SEQ ID NO: 33714 - DNA, 3637 bp, Homo sapiens
aatgcttagcaggcctcttccttggctattctcctaaaaggcctcacttgattcagctttttctggtctaggcccacaggagctcttcctcccctgtctcctctcaacttggctgggggctcagccagtaatgggatggtggtatgtacagcagtggtaggggagggagaaggggaaagggagattcagtaaactgtcaattgttttagggggaagaggccacacgggaagaagttcctccagagccttaccccttttccctccaacctgctcccctctagttagccatctcttcttgcagccacaggaattctcatccccagttacccacaaactcctctcttcctttctccattcttcttaagccgggattttccttgcttctttctagcctgcacctttaatgctgctgcttcccaacctgggcctccgcacccagtcatcttcctttttagccagtcttagcatcccagaagctccaggcggaaaagccagaccctctctgccttcttccccatgccctaggacttttctgagctccctgctcagctctacggagcctttcctcctgttccccatgggtcggcctgccccttgtcttctcagccgctggctggcctggggcctccactgtcccctccgcacaccggccgacttctaaaagcctcttccaccaccactatgcaggacactcaggcctcatggtactgggctccactcccacagccaagggcctccccgaccaccctccagcttatcccggagcttcagtccccccaaactccagggccttttccccacaccccctcctcatggcataactcaaactccgcgccctgcaacctcgagtcctcaaagtcctcactcctgtcctgaccagggccttcctcctgcaaagacgccacggccacccgcaaggcctcctggtggaacctcccccgcgccgcttccaggcccggggcctgctctcctgcccccctccccagcaggcctcggccgggcctgccacctcttcgcccaactccaaccccggcctcccgaccccaccctcacagagccagcagcctctcaggcccgaggcctcccctgtccccagcgcggctaggcctgcttggcagagcctcactttcccctctttcacttgccccacgtcggacccaagtttccctcgtcagcggccaggccgcggccagcggtccccaacccacagccccgcctcccagcccaactggccggttcgccctccccggccgttcatcccggcgccccaggccgccctccatccaggcccggccctttggtcccggccgccttcaggcctggggcccccgttcactcccattcagcccaaggcctcttggcggcgccgcgccccctgccacggcagcccggcagtccgggatccccgggccgtcgccccgcttggggcctccttggcccttcccgcctgtccgtcattcgagcctccctcgcttgtttaagccgctccgggcccccctccactcgctctccggtccctcctcgccgctcgagccgatccgagtggcctccggcgctccctgtcctgcgggtcgcacggtcgctcggtcgcttagtcagtttggcacccgagaccccggttgtcggttcgctcccgtcagccctgggccgtcagacaggccgcggcgccccgaccctttcgttcggcctctccccctgccccattccctcgctctccaatctgctgtcctcccctccgcccatcggcttggcctccggaatctcgacccccgtggcgtgtcaggcagatgctggagccccggggccatcagtcaggttcggtggccccgggcctggcctggccttgccttaggccgggcctcctaacctcggcccctgccctagggcagccgggccatcgctgcccaccggttcgacatccgagactctcctgcccggcccagccgagtgtcagttcgcgcggcccacagccgcaatccagcctcagtcgcccgggcccagcctgcttcgctccagaccgggcctcctggcctcgccccccgcgcccccgagccaggccgcggtgcgggtcagcctgcccatttaggtctccgtctttactctgtccagccctgtcagtcacaaaattcattctccgatcctacgagctggctttcagcgccccaggctgggccttgccccgggcctcccggcctcgccccccgcgccccccggccgctgggccgccccttgctcttagccagaggtagcccctcaccccgcgacttaccccacaccccgctctccagaacccccatatgggcgctcaccgcccgcccgcacagctcgaacagggcggggggagcgttggggcccgaggccgagctcttcgctggcgccgcctcccgggacgtggcctccatggtcgttgccgccgctacctcacagaaccagcaactccgggcgcgccaggcctcgggcgccgccatcttggggaggtgcgcgagcccgagagtgtcgcccgcggaccgccatcttgaaaaggtcagcagttaggacggctccataagcgatatggggaagaatgtgaattattctaaagaaatttcgaagaaattagcacactttccaagtctcttaggagctactattttagataaactcctagatcaattatacttgggtgtggtatgactaaggggatgtttcttagcaaagcctcctcgggtgcaaacatcagctacccctaacctctgcctgcggctggtagtacatgccaatctgagcatgtgttcgcgaccacgatgagtgtgccgcacttccggccagatcgccggatttccgctgagtgacccttacaagtccttcttgatcctgaactgggttaggtgccgctgttgctgctcgtgttgaatctagaaccgtagccagacatgggactggaggacgagcaaaagatgcttaccgaatccggagatcctgaggaggtaaggcaaggcgatccactcggccctcttctctgccctgaagcccaggacctagcccgccaaaacacgcacggggccctcttagcccccagtttaccctctagggtttgcatagtcgggagctctagttccctcgacctttccccagaattcgtccggtgactttggacagatagatgactagtttttctctgggcctcggcttctgcattctgtgaatgtagtgaaggtttgagagcgaaaatgttttgtggactaaagtcttgtaaaaatatgacctatgtttgcagtcagtcagatgttctgaagcccgcgtttcacagatttggggagcaaacagaccgccttgccccagctcaggttaggaatccctaccacatcttctatggaggttcggaagacctggccttgtgttccttttctttgaggaaggtgtgtgtctttggggacaatgaaagaatgtacgatgtgattctgtgatggaagagggagctctttcccagagaaagagtgctgctataattattgactgcttgctattccaagtgctttatatgcactaattaattttttttttttttttgagatggaatctcgctctgtcgcccaggctggagtgcagtggcgtggtctcggctcgctgcaacctccgcctcctgggttcaagcgat

SEQ ID NO: 33715 - DNA, 2149 bp, Homo sapiens
cagccaattatcagggtgggtaggagtgaggcagggagatcaaaaggcagggagattggctgggattacaggcattgttaccagaaaggggtcccgatccggaccccaagagaggttcatggatctcgcacaagaaagaattcagggcgagtccgcaatgcaaagtgagagcaagtttattaaagtacaagaataaaagaatggatagtccatagatagagcagctccaagggctgcttgcccatttttatggttatttcttgatggtacgctaaacaaggggtgggttattcacgcctccactttttttttttttttttttttttttgagacggagtctcgctttgtcgcccaggctggagtgcagtggcgcgatctgggctcactgcaagctccgcctcccgggttcacgccatccctcagcttcccgagtagctgggactgcaggcgccagcaacctcgcccggctaattttttgtatttttggtagagacggggtttcaccgtgttagccaggagggtctcgatctcctgacctcgtgatctgctcgcctcggcctcccaaagtgctgggattacaggcgtgagccaccacgcccggccaggtcccgaaacttaagcttcatttgtttcactgcaaatctgcttctgcctacaagcctggtctcattttcctctacctaaggatcttcctccatgcaatttcggcctaggaggcccttcccgccccttttcgcctagctaactctttcggtactcaaccaccaactcctaatcctccctggtcccccaagtgggctaggggcttcttgggagtccctcgcactgctctaagcatccaggcagagtcattattccgggtgccaggttgctctttttccagcagccttcaggggactcctggctgggcggagtctgtagaggcgcgcggagtcctgggagagcgtcagatgtatttcctttcccttttttcgctcgtgtcccgccgggtggcgctcaccacctccccggaacacgcgagtctcctgtcgcggttccggtcggaattaccccgtggagcacgccgatatggctgcgctgacactgaggggtgtccgggagctgctgaagcgtgtggacctcgcgacggtcccgcggagacatcgatataagaagaaatgggtaaggtccggctgggggcgcaggagggaaaagtgagggtggaaacttctccagtctttccgtttcccggccctctagaacgcctagcgtctttcccaagcactccacggaacgtccttaggcacctccctctctcgtcttttccgtcaccgcctctgtccgcactctatgtcccgagcgttagtgtcttccacttgttacgtctgcagtctcctgactccgcccaagttgcgtcatcaccttcgccttcattcttttagtgatgtcactgtctcttgttccccagctgtgtccacctacctttctgtcccccactcccccttttacttccctccctcccctccccctttcccttgcccattcttcccccacatgacttctcctttcctcattgattttccagcccggtcgccctcacccctcggaaaataccatagcgaccttgcctgcactcctgggtctccgccgccttgcaggaaaggattcagccccttcctcaacctcgagctgcctctggcgaccgggcaaggttacagcgaccaccctgtccatactgccggcccaaaccctggcaaaaggtgcaacgaatcctctcatcctctggactctccttgcttctccagagaccctttttcttgcctcactggaagccctggaatttcttctatgaccggcacgcccccctgcccaccccagccgattccctcgccacctccaccatctcttccacccccacaaccttcctcgcactcagggagatggtcttttgagtcctcttccccactcctggaaaggacctactgccgctagccctgccactcgggttccccactctccagcccttattttgagcagttcagcattccggggtcaccccctctctgtcagcggacaccttattgcagctggatgagtccctccagaatgcggcgtccctgtcttcaaggcacgtactgtgaccagcacactaatctctgttactctagcg

SEQ ID NO: 33716 - DNA, 1409 bp, Homo sapiens
gggaaaaatggttaccgcagagcaggaaatcggaatgaaccacggtgaagaatgagtgagggaggagcaggtaatcgaaaaatgttgctttatgaggaagttaagtttaaaagtagaaggcaaagaattgaagatactgacatattgattcttttaagataaatttagaactcatatctaacagctggcatgtctggcatggggctccggctggggcgcagtcttcagcatttggggctctggggtgcagggggcagaggacggccggggctgtggtgcccaaccggtgctaaactcaagcttgggaggtcgcccacgagaaacagtcgcccttccccacccgcctgctcggcttggcggggagcgggatgtcgctgggggcgatgccaggcgggccgcctctgatagcctctaggctctggcgcgcttccccgcccctcccgcgcaggcgggcgtgggatcccggctgatccagtccgggttttgcggcggagcgggcgggctgcgcgtgcggcggcttcaactgtcgcggtaggcagcagcaggctgaagggatcatggtgcagtacgagctgtgggccgcgctgcctggcgcctccggggtcgccctggcctgctgcttcgtggcggcggccgtggccctgcgctggtccgggcgccggacggcgcggggcgcggtggtccgggcgcgacagaggcagcgagcgggcctggagaacatggacagggcggcgcagcgcttccggctccaggtgactgccggagcgtagtgggatgggcgcggcctgagggtactcgcagcggcactttcagccgccggacccgccgagggacaggggatggggcgggcagagcagatgtgtaactctccagaatctctccttgccctaagatattccgcactttctgagccaggtagagcacgggggaagaaaggaaacggtagtgtcaaggcaggtggtggaaggcctttccctcactgggtcaaagaggagttttgctttgtgccaaagaatctcacgattgctgcctattggaatgcgaaaacgcaagcgtgacaaccagtgggatgccaggggttgaggactttggaatcgcagagtgtaatggccaaggggatctggagagcttagagttttgttttttgtttttttttgttttgttttgagacggagtctcgctctgactcccaggcaagagtgcagtggtgcgatctcggctcactgcaacctccgcctcccgggtgcaagcgattcttgctgcctcagcatccccagtagctgggattacaggggcccgccactacgcctggctaatttttgcatttttagtagagactgggtttcaccatgttggccaggctgatctcaaacgcctgacctcagttgatacacctgcctcggcctccc

SEQ ID NO: 33717 - DNA, 1104 bp, Homo sapiens
agaccaagaacccaccaattccggacacagaatgaatgtgtaaacccttccttttgggtgtggccttcagtcacagacccagcctcccaagatggggtcttcttgtttttgcccttccctgctagaggttggcaaccccctgagtagtgttcagagctgctctgtgggtgtggggatggcatggggtcaggtgcaggcagatggctggtgggcaagaaggcacctctctctcagcctcagtttatctgtgcaatgggaatggcagtaagacttaatcaaaacatggatgacatcagcgtggtgttggcacacagaaggcagccactgctggtgtatatttgtagtggtttaatcatcagtctggagctaggcacagtagcatgtgcctgtagttccagctactcgggaggctgaagtgggaggatcacttgagcccaggagttcaagtctagcctgggcaacacggccagacactgtctctaaggaaaaaaaaaacctacttgggcaggtcggctcgctgggcaccccttcaacaagcttctggaggagacagagctgcattctctagggatggcaagggcctgcccaggctgggccatgtcagagctgctggggcatgggccactggtgtctgctgcaggcccatgagacttcggcgagtaggggactgatccgagtttgttccccacagaacccagacctggactcagaggcgctgctagccctgcccctgcctcagctggtgcagaagttacacagtagagagctggcccctgaggccgtgctcttcacctatgtgggaaaggtaaggccagccaaggccagcccctccctgggaaaggtaaggccagccaaggccagcccctccctttcccctccctctgtccgcacaggctgtggggaaaacctggcctggagttagtcctgctgggggccatggtgggacctacagtgccagggactgccagggagggaaggagccagagcgtgtgcgtgtgtgtatgtatgtgtgtatgagacactgagcatgctgtcttagctagtaacctggcttttagcccagacttccctctccctcctgcctccaccccattgggcaacaag

SEQ ID NO: 33718 - DNA, 990 bp, Homo sapiens
ataaaactcagttccaaacctgagcctggactcctctcccctgaccttaagaacatgtcctcctgggtcccccgactgtggccagccaaaggctcatcccacgcctgactctccctgcacacatgtggctgctgcagaagagctgtcctttcaactccaggtggcgctgtacacccttactatcttgaagtccggtacacaggagggcgtgggctgaatcctctgccatccactagctgtgtagccttagaaaaggctaatcctgcccctaatcctgccacctcgatttcctcacttgtacacagtcaatagtaatccacacctcacagagtggagaggattcaagggatcagcaatgtgatgaggccagcacagtgcctggcactgagtgaggcttctgcaatgcagattccgtccttccctccaccctggggagagcatgaggccattgtcaagatgacccctgacacaaattggctagtccgagcccagagcgctgaagttcccagaaggaccgggagggggcgcccacccacattcttccccacctgagtctgcgctgacgatttcctgggcttatctggatcttcctgcagaaagtcagtcttatgtgaccctgtacaacctcctggactttcccgcgggcgtggtgcctgtcactatcgtgacactacaggacgaggaggaactggccttctacaaggggtgctacggagatagttctgacaaaaatttctcagaggtcagtttccttctccgagcctctcccggagcggggacaaaccagggctggttctctccgggttggggcccctgacggtagtggtggagagagtagggcgggactggtcattcctggtgttcaccctttggcacttatgctagtttcaccccaaccctgaggacacatcatttgacctccttgtcagccccatccatgtcaggggagaaaactttgcaaaaccagtggttttctttgtatttcttctg

SEQ ID NO: 33719 - DNA, 1915 bp, Homo sapiens
ttttgactcgagctgcccccatcctccgccccagctcctccctggctcggcccccacccccgcccttggtgcctccctaggtgagcctggaggccagtgggccctgcagcgggagggcacccaggctgaaccctggggatggcagaaattaagttggtcagtgtgccctggggagggactatgctgtcctttgccctcacctaccacaccttcacaagctgcagactccaggaacatactcgggcctcggggacttcccacacaactgcctcatgctcctatgtcttggccgctgtcaacctgaggccctgctggagccgccttgagcctgattcaccttttctcgcctgtttggagcaagcagccaaagtgagctcccagagggaggggcttctcttccggccagggcacaggttgggggcatggggccttcagtctggcctggttccaccccttgcatggaatgtccctccttattttcctggaaagctagcaaggggtggagcacagaccgtggagcagaagggagtccgaagtgcagatgaagaggctgccagtcgggaggctccccagatggacaggcaggcagaagaggccccgcccccacggctgtggggataccttgagaaggtacccagctgcccttcttccctcatgtcctgggcaacctagaaccagcctttctctgcctggcctcttaggggtccaaggccgaggagtttctggaccatttggagacccagaattccttctctccccaacaaaagtgtttccaggaattacttccttctgagactaaagcttggcctgacacaagagcctcttctggaaggtccttaactcattggggtgttggaaggcaagtcttagggatcaaggccagtttgtgaccatgataaaagctcagttgttgtccagggtcaggattcaatgcatatggatcagggtcagagttcaggttggcaccagattcagggtcaggctcagtgatcagagtgagagttcagtgtatggaccagggtcagcgctatctgttcccagggtcagggctcagtctatggcctgaataagggctaatgtgtgtccatgatcagtctgcatgcaagtcaggttcactatatggtaattgtcagggtttagtttatggactggggtcagagctcagtctgggatcaaggtcagtgtttgatgaatggacaggcagggtcagagctcagagtgtgactagggtcaagttcagtctatgattaaggtcaggacacagtatggactggggtgaggtttcagtctaacatcaaggtcagggtttagtctataagcagtctcaggacttatctgtgaccttgataaaggctaagtttctgtccaggatccaggctctctctgtaataaggtcaggttccagggttggatgagtcacttagtaaatctgagtgacctaactccccctcttcccccatttcttagggccttggacctcagaagaggaaaaggcaaaattgtgcagtctggttgggctgagtggtgtctatctcctgccatgtgcccggggtgccctctggtggcagtccccaacagtgccgatttcctcaggcttggtccctccatctggccatctcctgctttggggagcctggccctcaggctggtcctttggcgctgatctagtcaacccttccttcccgtgccatcccacctccccacagagaaatagaaaactgtgcaattggttaggggaactctcagacatatgaaatcttctcccttcctgcccagagttaggcatcttgacaaacccgtattactcgggacctggaatctcagctgtgcgatgagatccacaccttttccttcctccttcagtccacaggtgcttattgagcacctaccttgtgccaggtgggcaccgaaggta

SEQ ID NO: 33720 - DNA, 1271 bp, Homo sapiens
ctttctaaagtaccccaatccaaaatgaccaagctcctagaaatcacagctaccatgtattcagcacccattacatgacaggcgccatactaggtgacttccatataatcctattcacccttcacaatgaccctattatggccatttcctagggaagaaagtgaagctctgggaggggaagcagacttgccccaggacacacagctaagaggtggaagagatgagatctaaacccaggactccctgaccctgaagttgagcacttctaacaacacttcattcctgtgagcctgcctgcctctgatctgccactgtcagggagcttggagctctctagaagacagggtgcacctgacactcttattacctttccctgtggacagccatccacacaggcaggagcctttaaatactgaaaataaatgaaaacaattaacttaaaaataacgcagtacacagatttcacaaattcctcacgtgaaaaactattcatgatactggactgcctgagccctgcgcccagccatagcctcggtcctgatccctgggagagactgagtctcaaacgggccacagagtaagcgccatctcggacaccggccacgccccgaccccaggcacagaggtcgcagacagctcgggacagtcctgaaaagcgtccccttaggctgtccctccgcagctgaatcgcgtcgtgacctcgggcagccgtgaaggccctgactgcccccttccgggcacacgagctcactcacagaccccggccccatttagctcggaggaatacctcgcaggtctcgcttttaccttcgctggctcccgccggggagcggtcgcgcgcacccctacctgcagatcgctcctccgagaacgcggaagaggcggtgctagatccagggggtgggcccgatcagagaggagggtgagggggcggagctgcgcctgcgccctgatggctacccagggccgcctgagggcagggggctcgagctgagcgaactgcgcaggcgtgacagggaagaggcggggagaggggagattgctggcaagcgggtggggcttagctcctccggcgctttcttttccgaatggagggtggagaagcccgggaaggtaggaggccgggcgcgacaggtgtaattaacatgtactgagagcttctgcaggccaggaaggaattttaaaatgccttttatatgtggggaaatgctgctagtcttttctaaaacgggggccaattctgtacaatttctttaaaagtctgagtgcct

SEQ ID NO: 33721 - DNA, 1268 bp, Homo sapiens
cttcaaggcctgggtctctttccaggaaaatgtaagctcagggggtgggtgcagggcaggtgctcttctagccacagggttaactcccttcactccccacccccatgccctcactgagtttctatctgtcacagaacctctgtctctccctgaaccactgccgttccccgtcctagcccccatttcccagtgatggctatcctttcactcctggagtggcagtgccttgctcgttccctgggtgcggatctgggcttctcaaatgaagacagcaggctgaccctacctgtttctgatatttagccccctgctaggctacatctaccactccttgggcctggcccaggatctgggccagaggatggccccagtttgaacccagaatccatcctgggactctctctaggacagaggtcgaagagaaaaagtagaggcgaagactccacgctctcctcgcggcgcgcagccacccacgcccacccccggcttccctgcaacctcaaaccagctcccagggccaggaaggtcgtaggacccagaggagcccgcctgacatttccgctccccgaaaacacgccccccaacccctcccctctgccccgtactcccccaccccgacaatcccccccgcaactttcgaagctctgagcctcggacgccagcctcaggacagcggccagcctgccttcgggcgggactctcctccggactgtgccacgccaggacggccgaagaaatgaaagtggaagccaggcgggcggggtgcgcggcgaggccgcaggggcacggcgcacactcacgggtcctcttctggccgtggggtcacattcccagccacaggatcgcctttctcctgcaggtcccgcagtgcctgttctctctcctgtcagcctgtccgtctgcctgtcctgccggccgcggctgccctcctgccccgggcgacgccagctccgccccggccccgccacgccgcggccacggggcggggaggggcggagaaaggggactcccctccactccagtacacagacgcactcgcccccaccttcccggaaagtccatatggggctcccagcttccccttggacaaaggactaactgagctgcccgccctctcggtgcttccttggacctccaccaaggaggcagcctcaagttcccagacagtaaaatgggaaaacgctcggcttcttctggagcagaaacaagagctgctagataagggtggtttctttgccctcctagaatcgtctgcgtcacacttgtcc

SEQ ID NO: 33722 - DNA, 1715 bp, Homo sapiens
tcttcccacttgaactcttcagatgctcctatagcccctcatatgcaccttaagcccctctaagctccagatccttccctctggaagctaagaggtggtgttagggaccctggactcagagtcagacaaatcccaaacagctgtgtgacctttggcaagtctcttactctcgctgatcctcagtctccttaagagggttcaatgggtgatccgactgtgacactattagtctttgatgccctcctcccatccccagtcgcctttccttgcagtcaaggccctaagctaccaccagcctgggaactccagctctgagccaggcctcagctatcttaatatgtgaccttgagcaagtcaagtcccttctctagaaggcgttttcccatttctataatgaggacaggtgtctctgagctgcctgcctcagggctgtcataagagtccaccttagcgtttggagaaccaaagcagacaaacgtggaacgagccagggctttgcagagactcccagctctgacaccaattagctgtgtgatcttgggcaagtgacctagcctcgcggagcctggctacatcatctgaagagctgggacagtactagtgcccacctcacagggctgtcctaaggcccagcagcccgggccgcccctcctcccgcctcctgcccgcctccagccaacccaggcccgcacctgcgcagcagctggatcttgtcgcggtagcggtcgtagaaagggttggcctggagctcggcctcggccccgaccccgctgctgtcggcgcccccctcgggccggcccgagccggggcgcactgggaagacgcgcagctgcgcgggtgacacgagccccaggcccagggcgcggctgcgcaccgcgcacaggccccggtagagaccggccacctgcaggaccgccggtcccgcgccacccgcagccgccaccaccacagcagccatggccgcccccgcctcctcctcctcctcaggcgcgtcggcctcggcccgcggcccgcgcgcccgctccatcccgctccgagtgcgccgcgcccgcgctccggcaccgaggttccgcgcgcccaaggttccgggcgcgggatagcggcgaggcggggcggggaggagggggcgcgccgctctggccccggcactgcgcgctctcgccgccctgtgtatgccacggcccgcctcctccagggaggctgcccaaattcaacgcccttcctccctctgggaccagcagcctctgcgcgccaagtccgttctctaaagccagcggatctccatgtcctcgcggtgcttgcccctggcactcgctgtagtgccaggcactcgatgtagtagtccgtccttcagcatcgaaggtcttttcatcaactataatcacagcagcaagcttctctttactgaggttgctatgtgcaggacactgagcggcttcatactctgtgtggcagtattatcctcatctaacaaataaggaaactgaggccgagagtaattatgtgacttgttcaagttctacccgacagctgagctcttttcaagatggcagctgcctcccaagcctccttttcctctgcttcctgacatcctccttgaactccagccacagtgacctattctctcccaaagaaacaccaggattactccttgaagagtccttattcaggccctttttgacccctggaatcctctctccttccattctctcaac

SEQ ID NO: 33723 - DNA, 1446 bp, Homo sapiens
gctgccttccagggttgggaatcctgggccagagccccctggtcactcccacctaggggtgggactgaccagatccgccagggactggagattggagcccagaggaaactggaactcagatgggtgggggaaatcacatagaaatggccaaggagctggtgaccccaaaggataaggccttgggtgcagagtgttagtagagggtggagagggacctttatctcccaaagggcgaaaaaaaagccaggtcaaaaatgaaggattctcagcccggataagtaggcaatacttctaagggtgctccaggaggtgaggaagggcacgcttaaaatacgtgtttcggacctccggagcaagatttccaatggagagggaagagaaactcgttcttgaatgggaagagagtggggaggtgcagagtaagaaagtgggaacgcgtcagtcccttccttgcaggagaggtggcggcaggagggggctcccagcagctacaatcccaacactgcttggccgcagagaaaatgccctggccaggaagccggctggggtgtgtgatgatcaccgttctccggcctccgtcctgaacgtgaagggggcccgaggccgaggaagatccggagcccggctagaagggtcggcctgagagaagccagtcccgcgcctgatagacccccgccccgctgtctgggccttggggacacggtgccgcgggcgacggcggctcggccgaccgaaagcgctcccgcccggagtttgaggtctccggcacgggcaactctcggccactcacacgcgcaggccccactccagccgcgactccggcccctgctccggcttcggccgcggctgctcccgacacgttgttgttggcgttggtggcggcggctgcggcggcggcggccgcgagctccagccccgggccatcgctccagccccagatcacttcccctttggcagcggccgcctgcgccgcctgccagtaagccgcactcccattggtcgcccgctggggtgacgtcacgccggggcgaaagtcgtggcggagaggtggggcgttaaaggggccctgccccggctggggctgggtcccacctgccgattagggtggccccgcccccaggagggcttccgggacctgctgcgaacctgagccgggtggagtcctgcatcctgcggagcgcgggcggggcaggcaaagcgcccggctgctcgacctacttcgaaagttcatcagccgcccacgccccctggactaaccaagtctgaaggctccgcctctctgactctcacacaggctgttaaaagtttaggcgcgtttcagattaattaacacattcattcagtcaataaatatttattgagagcttacttactacgtgtcaggagctgttctagcgctggggatacagccatgaacaaaataaccagggtccttgtcttcctgta

SEQ ID NO: 33724 - DNA, 511 bp, Homo sapiens
agaccaggaaagagtcaaggcaagcatgcggccattatagcagtctatatcagggccagtagtttcgtgatctggattttttttccccttgggctcctctagcccagaatgtcaaagttttcagggaattgttagccaaaaattccactggactttgctgacttggcctgaactcagagaaaaaaggaactgctgagacctctgtccatggtgctgatgtaaatcccccatttccacctctagaacgcacacttgcattcctgtctcagctctcaggactggcacagaatcaacaatcccagcatcaccccacatatggccagaggctcagaggccttgggcctggtgaaaggatggttttgggatgtgtgtctggctctacttctgtttaaatgccccaggtcatatttgctttgatggagtcttggtagccagactgagaaaagcttcatatctaggaaacaggagggctctgaccttgccatttcccaccctatagttgaggctgtta

SEQ ID NO: 33725 - DNA, 448 bp, Homo sapiens
taatatgcatagcatgattttttttctcaattcatatacatgacaatttaaaaaaattctacatcatgttaggtatgactttttcccctattgataggtctaccttttctaccagagtaagtcctagagcaattttagtcctacttcagtctagtactatagtcacagcaggagcctgtttaccaattctctttcaccctacaatagtatgtaattacacaatcagaactttgcactctgtttaggagtcctgaccaaggacaatctgtactaaacagaaattaatatttaaaaaatgattgctttgccaacctcaagtaaagtaggttaaatagcaactgttgctatgaattaaccctccctggcatttttacatgcatatctgtgcatgagcattctttttttcctctttttataatttcaacttttattttagattcaggtacgt

SEQ ID NO: 33726 - DNA, 1593 bp, Homo sapiens
caagaaaggtgggaaaacaggtgcaggactgctacatccaccaactttctggtatttttttttttcacaatagccctagaaaactaaaatgggtgggataacaatcacttctctcaatatcttgatctcctgacctcgtgatccacccaccttggcctcccaaagtgctgggattacaggcacttctctgaatatctcatagaattatacacttattcactcatttatttattcaaaaacaaaggtttttttttaacctcaccttttagtagctaaagaaagaaaaataaattattgtgttaaaacattatagagggtgtactgaagcaataaatcatgggcttgggccattcagagacagagaaaataaataagtaaagaggtctttaaggacgaagaggagtttaccagttggtaaatactagaaaaaggaaaaagcactggcagattcatggagatcatacatgaaagagcagaaatgggatgagctcctcttcaaattaccactcctctcacttttttcataattatctccacaaggtcataccaaaggtcatcaattcagaacataaatcaaagtagatttcagaaagaattccttggaagtcagctctcccgggggcccgatttcctcctgctccctaatccatctaaactcttatgcccaacaccttcctccttagccccactcatggcaggtgactcattccagaacccagagaatcagagttcttttctttctgcctcaaatcctgggctcctatccaaaccaaagagtagggacatgtaactatttacacttcaatccacccaacctcccctagttctgtgactactttccaccatccatcactccctccctaaccccgactggggactcttggaccctgactctttccctacttggatcagcacctgtttttctcccatagcatgagcaacagtagctctgaagtcagagattttagctttgaattctcgttgtgctttttttttttcccctccctagattctcaatttctttagaattgggctcaaaatgtggtaatggccaacatttagtgagcatttgttatgttctggccatgcagccaaaactttacatgctttctttgcaaaaactctgcaaaagagatttttaaaaaaatcttcatattataggtgggaaagctaaggtgcaatcagggtagctccctgtccagaatccccagttggtaagaggtacagccaggattgtaacccaggcagtcaggctccagagactttcctgttaaccattcatttaaatgaggtcatgattaagttgagcctccagtccagatggcaccccgtaaactttccagggagcatttcatgtttgctatgttttattcagtattttcaaatagcaagaagatgtgtcagattatgaactccccatattggcataaatgcaagtctcattatccagggcagctcctgtgagaaactgaatggcaaccatggggctaggtgtagcatagtcattgaaagcgatgtttatggagaatgtttaatgatatgagtaaagcatatgggaaagtgataaaagcagaatatagagccatctgtaga

SEQ ID NO: 33727 - DNA, 528 bp, Homo sapiens
tgaaatgaggcttatactgccctgtatttcacagagtggtctggaggactgaaagataaaagatatgtaaaagtgacatattaggtaagctcttatagtttccacttcctggtacttgggagtgagtttttaaaaaattacaagtctaagagtcagtttgcccaaagttgcattgtctctaacaaaaaataaagtcctttacttagtcttcctacttatttctatacatttaaacattttttttcctacgttttgttgttgttgtttttctgtatcagcacataaataagtagttaccagctttcagcttcactctaggggaaaggtcaccataccgttttctcgatggtaggctgttgtggctggttcattccgagtttgttggtggtggtgtttgcttttaaagtgaaagcaagtttattgggaaggtaaaggaataaagaatggctactcaataggcaaagcagccccaagagctgctggttgccataaattttggcaaatttatgactcactatatatgtctgc

SEQ ID NO: 33728 - DNA, 1157 bp, Homo sapiens
atatggctctatgttctacttttatcactttcccacatgctttactcatatcattaaacattctccataaacatcgctttcaatgactatgctacacctagccccatgattgccattcagtttctcacaggagctgccctggatagtgagacttgcatttatgccaatatggggagttcataatctgacacatcttcctgcaatttgaaaataatgaatcaaacatagcaaacatgaaatgacctctggaaggtttaggggctgccatctagactggaggctcaacttaatcatgaccttgtttaaatgaatggttaacagcaaagtctctggagcctgactgcctggactacaatcctggctgtacctcttaccaactgggggattctggacagggaactaccctgtttgcgccttagctttcccacctataatatgaagatttttttaaaaatctcttttgtagagtttttctggagaaagcatgtaaagttttggcttcatggccagaacataacaagtgctcactaaatgttggccattaccacattttgagcccaactctaaagaaattgagaatctagggaggggaaaaaaaaagcacagtgagaattcaaagccaaaatctctgacttcagagctactgttgcccatgctatgggagaaaaacaggtgctgatccaagtagggaaagagtcagggtccaagagtccccagtcggggttagggaggcagtgatggctggtggaaagtagccacagaactgggggaggttgggtggaatgaagtgtaaatagttacatgtccctactctttggtttggataggagcccaggatttgaggcagaaagaaaagaactctgactctctgggttctcgaatgtgtcacctgccatgagtggggcaaaggaggaaggtgttgggcataagagtttagatggattagggagcaggaggaaatggggcccctgggagagctgacttccatggaattcttttggaaatctattgatttatgttctgaattgatgacctttggtatgaccttgtggagataattatgaaaaaagtgagaggagtggtaatttgaagaggagctggtcccatttctgctctttcatgtatgatctccatgaatctgccagtgctttttcctt

SEQ ID NO: 33729 - DNA, 1058 bp, Homo sapiens
agtgccgactgcccagctgtttcagaactccaccatgcacccaactgctcctccaggacttccctacggatgtgttgcaggctctgaaacgtcacacatccacgccgcatcctcatcccacacatgctcctgcttgtccctggcatctgccattctcagtgccattcactagcctatatgatgccttcgaatcagaggaagttacctctccctccagggatacgggcccacacctggtctcagggaccctttagtggaggcacagtctatatagcccagagcagtgcccctgatgccatcgtcttccaatttgctcagagcagacactgggattcatccttaatatctctctcttctctctctctctctctctctctctctcgcggaggccccactgcccttgcattccacaggaagtcccagttgctggcatgacctgagaggttcctgggaccacgccatggaaatgcgtccggtcccagtgtgacggggaagagccgcgcctgaagctcaacttccgaggctctcatcaatctacgcttcctttggagcgtgcagccaccaggtggcagccgaggccacgggcagacagaaaagctcccgaaactgaaggactgccaggcagcagagttccggagggctcccaggaccttcaaccagaaagagacagagcatatgcgcatatgtatgtctgagcccgtgcacggaggaggagtatgaacagacaccgcgggacagatggctggagtttagtcccttccttcggggctcttcaccactccttgggcttcccttctcctgtccagccctgtcctgggtgcacagagagggaagtcactccattcctgcccttgaggagctcccagacccagggcaggagcaggatgcagacaagtagacagcaccctggggtgggtggagtgagtggggcaggtggggcgggtgcaaagagagggaggagcaggggctgaagttgcccggaggaagtgctgaacccaggagtggggaaaggagcatctgggaagaaatggcatctacgctgatcatggagggctttc

SEQ ID NO: 33730 - DNA, 4048 bp, Homo sapiens
aaactgagtctcaggaaggggcagtgatttgctcaaggtcacacatccattcaggcagagcaggacgaagaggtcagatatttgggggagtcacactgggcactgttctctatccaagcccaagaggccgagacaaagcccaagtctttgaggggtggcttgggccccactctcaccctacttgtacccccgggtcccctgtactcaggacccagccatcccttgggcaatgcctgctcttggggcttgggcctcaaatcctgttcctccctgagatcctagaaccaactgctgccagttttcactcgttgaaaacaagtgacaggcagagacttggttcagaggtctctgccttgggacattctttcagctagcgcagtccctgctccccctccaaactgtaagtatcaaggccctggggaggggagccagaacaccacctgtccacccctgggtctcccgtgcccagccctctcctcctgagctaccttgctgacagctggcaggtggcactgccgtgagcaggcccagaatgaggaggctgagggccgacatggctgcagcagctcctagccttgcttctggccgccggtgtctgggctcctggagctgctgtggagtctattggtgtccgcctgaaatcaacctgggctcagtctggccctggaggagaggagctaggaaggaggaaggcgagggagggaggagacacgaagacgggcgtcggagagaacgtgccctccctcccatggtaatgagctgccagacctggcctcccctggctggtgcccagctcacttgggctggcattcgaggtcatcttccaggggccagctaaggaggtgggtatgaggaacaagcagatgtgggagagtcccagcctcacctccatgccctgagctcccttttcctggcagtggggctggattctagggaaaggggtgacacacagtcgctcctgccttgactgagcccagtgggcggggcttcttggaaggctgacagtgggattaagaaatgtcctggctggctcaggagcctggggaaaaccccagaagcccagagaaggctcaaagctgccagactccgccgagagcctggcctatttcctgttctccccaccacctgcccctgccccgccaagctaaactctgggactctaatgctgggacacactacggcttcagtgccttccacgccctggcccagcccagtagcttcctaaatccacccccttctgcaaagatctcaatagagggcctgaaggtcccagtccccagctttcacagcccatgcccaggccctgacccagcacagctaacctagtcccagttcggttcttcctcttggccccagatgtggtccctggaaaccgggcagggcctcaaaacaagatacagccttggtcagaggcttcaacacccaacttcagatccatctccacccatggcagaggagaaaatgggcaaacacagcctgctgtgggggacaaaggacggacaccccagatggcaaggtgcgatctggggccctgaagccctgggcccgtcaccctcatagccaaaagcagcattgaggaaggcacacctagcccctggaacagggaggccctggagccagagccctcggaagaggcaaaagcctccccaggatcacgtggtgtccacctggccctccagctcagggaatgagaatggccagagttcctgtgcaagcccctgaccaagggtcatgctggtctccttgccccaccccccaccccagaagtatgggaagctgagatgctgactccctagaaaggagcgggccaactggaacaaagtctcatcagagatggaaggtccccaggagccagcacctgagctgaaggcacctccacagcctctcttccctgaagccaccaaactcctattcatcaggcctcctgggcaacccttcctatggcaggttgattctgccttcctgctccagcgggagcactcagacatcatgcctcaggcctgcttcctgtgtgtgtgtgtgtgtgtgtgtgtgtgtgtgtgtgtgtgtgtgtgtgtggtgtgtgtgggtgtgtgtgtgtgtgttcacatgcgtgtgcagtcgggcccattgccatccaaagatggagtgtctcaaggtgatctgggagaactttgcttggagttgagtgatgcctcccaaacatgtatatcctggcctccctcccacacccaacttggtgtcctcagaatcttctaacacagactggagtaagcactgtgcatgttaatgaacagccagagaatcactgattggaatgtaaggaatggggctgaatttaacaaacatctactggtgccttctccaagaattttagggaggagagtcacatggttagttttgcgtttgggaaaacacctctccatgcagtgtggagagtgaaaggggcatgcaaaggctggagaagagaaatccagggatctgctacagtggccacaacaccagtgcctggacctgggcaggaagtgcccatgggaacagatctgagccctgttgaggaggtagagaagccggggtgtggctgctggaacacagtgccaagctgggagaatgggtacaggcaggaggcagggcttcaggtgactcccaggtttctggcgtaggcagctgggtagatgctagtgcctcagtaggggccagagcaagtttggggggttggaggattaatgagctatagattttgaggtattatgcttgcagtgcctgtggactttccagagggagacatctggaaggctgcaaaatccctgcatctggagtggaacatctgggagccgtctgcagcacagggatggtaactgaggcctgggagctcatggtctccccagtgtgtgtagcgggggtaggggtgttgaggggagagcacagaaagaaggagacacgcccccaacacacaaaggtctttcaaaggaagaaggggcaggaggaaacaggaggaagcaaccccaggaaagtggggtatcccaggagccaagcaaggacagacttaaggagggtgggggggtcacagctgtgccaccccctccaaccagtgccctcagcactcaagtcccaggttctgccttccccaccccagtatcctccacttccctgaaaaacccagggaaaggaaaggatcccctgggctatgctttgggagtggtgggggaaggggatgaacaggaaggacaccaggtgatcaacaggaggaaaacatacctcctgggtcaaagtcccaagctttagagcaaaacaagttgttccagaaaagagggagcatgggtggacacttggctttgaggctggtccctcctccctggaggtcttcacacgggtggagggtcatctccccagctgtatggacacagccctgatccccatggtaacaaggtgggcccccctactggtctggctggggcccagggtctggactaaggtctcagcagccccacagggctgcaccgtgtgtcctgagcagctgttccatcgacgttcagttcctccttcctgttccagcccagctgtcacgcaaaaccatcaggccccttagacaagccctccatccagccagaccttatgcgattgcccttcagaaaagccaaagtgggcctggactgtttccagcagtctccttcctcccaaccccatcttgtcagccattccactcactgccagcaggtggcagtgtctagctccaataccagactgggcgtgcagggagccagtttgctgctgaagattctgcaacttcccctccctccagcccccacttttgccctcctccaggggtggtctgaagaaagggacggtggacattgacatgtaaatagtctgggaacagcatacagggagtgctcagggctctgacatagggcagcgtggtggactacattgctaaggaaggcatcctggaggaggtaatgcaggcaaagttagccagagtgttgtactcggcagacagtctggggagaggaatccaggcaaagagcttagcctgagaaaaagtacagagaacattcaagaagggtgt

SEQ ID NO: 33731 - DNA, 1339 bp, Homo sapiens
acaactttaaatggcacgttatcgactgcaaacctctttcacataccttagctcagatgatacccaaggatttcatggactgcttaatttctcccactagctccccttctcgtcatctgctccaggctcctggagggcggaacccactacagggctttgaatgttacccaccaaccttcccagggccccgctgccgcctctcaaggggaaaccaggagcacaaagctccacttaccgcaacttccgcggagctgaggtctgtttgcagggtaggagcgggagccggctccaaggagcgccaccgccgactccggccccgcctctgggacgttggggtcgcgggaactgaggcggcaaacacaagctcgcgaaactgaaggccgcgccacgcctgctgactggtcagaaacctcgccagtcagggagcgggggtggtgctagagagccgcgcacggtcgccgttacgtattggtgtgccgaccaatcagcgccccgcactggttccgcgctcgaccaatcccaagtcttcttggagaactgcgggcgccaccggcgctccaggatcaaggatccgaggatttaaacctttcatttcgtcaacggttaagttccggggcggggtaggctttccgcaagcgcaatggaaagcccagctaggtagacggaggagcgagtggcagatgaagccggaagtgctctataagatgatcattggtcggcgactggaagcggacacccgaagaacagtttccaaactctttacctgaaagcacaaaagacaagaaagttagagttattccagtttcttactttttaatttttattctaaaatgtacatttttaatttttcctttttgtgatcacttatcctcaacttctagatttcttccagtttctttcctaggaagccatctgttttagtgacataattttttttttttttgaggtggaatctcactccgtcgcccaagctggagtgcgatgacgcgatatcggctcaccgcaacctcgcctcccgagttcaagcgattctcctgtctcagcttcccaattagctggtattacaggcgtccaccacccaccaccacgcccggctaattttttttttttttgaaacggagtctcgctctgtcgcccaggctggagtgcagtggcgcgatctcggctcactgcaagctccgcctcctgggttcatgccagtctcctgcctcagcctcccgagtagctggaactacaggcgcccaccacgcccggctaattttttgtatttttagtagagacggggtttcaccgtgttagccaggatggtctcgatctcctgacctcgtgatccgtccac

SEQ ID NO: 33732 - DNA, 2787 bp, Homo sapiens
aacatcttcaattattttgaatccgttacctcaaatatcaaatgagctcttaacgttggccagaaggccttttaaaggcctgtatgcaccaaggctcagttcttgaacgtctccttttcttctcccttaagattcttccctaatgaagggggcaggcgaacggagttaaagggcttccattgctgttagaatacagcccaaattcctttccataatcaaaagtcctgatctgccaccgacctcactttctcaacttttcaccttccattctcccctcatttgactcagccctggtctcactgtcactggccttttttccttttttttttttgaagcagtctcattgtcacctaggcaggagtgcagtggtgctattacggctcctaggctcaagtgaacatcccagtagctgggatcacaggcacgggtcacggtgcccggcttttaaatttttggtcgagacggggtctcgtcatgttgtccaggctggtctcgaactcctgggctcaagccatcctcctgcctcagcctcccaaaatgctgggattacaggcgtgagccaccgcgcccagccaggccttccttcaattgctttaacatgccaaaccaacttagattttttgcacatgcttttctctgtgggacactctatcctggtgtttgcctggtttcgctcttttctatccttttgtcttggcttgaatgtcacctcttctgaagccttctctggcgaccctggccatcttatgtcctacttgttatttcttcaaaatcgtactgccttttgtatgtactggtgtttactcattcacactggctacctccccatacctcactggctggaatggaaactcattgcgagcagagacaataggttttgctctcccgcggatcacgtcccagcctccagctcagcaccagacacttgagggcgcaggataaaatatctgcagtcagaaagcactaataaccacccaagggttggaggaaagctggcgcggaccgcacgagtgtcgccgagacgccgccgccgtgcgaagctcctccccttccgacagggccgcggacgcccgggcagccacggcggcggggccgcggcgggcgccggctcagcccgcccctttctcccgccgcctccccgccccgccccgcgccgcgccggccgctgtcagctccctcagcgtccggccgaggcgcggtgtatgctgagccgctgccgcagcgggctgctccacgtcctgggccttagcttcctgctgcagacccgccggccgattctcctctgctctccacgtctcatgaagccgctggtcgtgttcgtcctcggcggccccggcgccggcaaggggacccagtgcgcccgcatcgtcgaggtgaggcccgggcagcaggcgggctccttggggcttgacgggatgcgggccggcctgtcccgccgcccctagtccgcgccccgcggagtcgccgagccgcagactacgagtcccggcggccaccgcgccgcccgcgtggcagtggccgagggccgccggcgcgcggcgtgccgggacttgtagtccgcgcccgcccgccttgggggccaccgcttgaggtcgctttgttcctgcgccccttcttttcttacattttggggaccagattcgtctctagagtgggctgggagagggatcccggaggccaacctttgggggtcccccagcgcgcagaggttagcgtgtcgctgatcgtgtggcaggtgaaggcagcaggagcgcggatttgggttagaggccgtgtgcgcccacagttgtctgaaggagagacctatttttcttctccgcgccttccctctggttccctaaactccgcactgtcaccgaacgtgtctttactctagaaaggaggcccgtggggcggggtgttattttaggcgtgctgtgggctgccgctggcactctcgagccccgtccccgcaagctttagggcggagccagccctgaggctcggcccgggtcggggatggggaaagccgggagtgctgttctgagatcaagcttcaacctttggccctgctgccaactcacgctcggccctcggtcacttcctgtctcccagcctcagttagcccttgtaatacagtaaaaagagtctctgaacccagattttctcaggatataaaacacctcccaaatgtaaaatgctgttacttttttttcttttgctttgagacaggttaccagttcaattcttttaacaatttttgagctagatgtatggttggttagctgcattgacactgtgggaaaaaaaggcttcatggacaatctggggaatgcttgggaaagaaggaaaacaggatatctagaaacagaagaggcgaccattggtggcctctagtgaaatcactctgaaaccctgtaaccaacaaaagtttttttgacctagaacttataatttcctcctcttctaggatatggccaatattagcatggggcttttgcttctctccttatatgttcataacaatcaactcctgtcctgtattttattccctaaatagcatccagagaaagttagatgagttcaacaagtcattatgtgttggacagatgtatttataaatattgatcattttgccaggcgctgtggctcactcctgtaatcccagcactttgggaggccgaggctggcggatcacgaggtcaggagttcgagaccagcctggctaacatggcgaaacgttgtctttactaaaaatacaaaaattagcctggcgtggtggcgggcgcctgtaatcccagctactcc

SEQ ID NO: 33733 - DNA, 2107 bp, Homo sapiens
caaaggcagaaacaaagcgcaaagaaccttgcccaaggtgacagatagggtaagtagtgaaggcaggattggaaccccaggagcctgacttaaggtcgctgctcttaactactatgcagaccaggaaactgaggctccgaagcggggaagtcacctaatgagggtcacacagccttgctacagcggaggcagctgggattccggcctcgcacgcccgagctttagccactgtgcggcgctgtcggggcagcagcccaggcatccgctcagttcctgctcacgtccagcgcccatctccccttccgtgccccagaggctgaaatgggcccaatctgtgttgaagctgcttgtttctgggtcctggagggaggccgggggagaaagaggtctaataggatgggcaggaacccggctagcgagaaacaaggcacagggccaaccttagttgcacaagacttttgagagatgaaggcaacacttggtggaggtcagggttcactgagggggtgtcgggcagggggcggaggaggtcctgccgcctgtcggtggggcccagaaccctgggagccaggaaggtggggggtgtccagtcctcagggcaactggggccagggagaggggagggagaaattaagcggattcccagacccatgaacagacatccagacaaatgccgtttccacagagactcacggagagtgagatagtcacagagactgagacaaacggatgccgagatccagagggtcggagaacaggcaaactcggagcagtagaccggcccgcgccccgggaacgcggccacagcggccggcgctctgcccggcctctccgcgcggagaggggtggcgggcccgacagcggagggaggagagggcgccgccgcaatctcacctctcccaggcccaaggctgcgggcgccaagttcgctcctggtgatcactcgaatgcgtctcccctcgggctggaagccgtgcgggctcgggtgggcgccggcgggccgcgctggggcggcgtgggtcccggcgtctcagcctcgcgctcccactgcgcttcggcccggtggcccgggcgccgccttggggagaggacgggtggggaccgccgccacttccctggctgcggctggcgcccgagtgagccttaacatccaggggctgagcgttctgaaggcggcggcttcagggagcacagggtgcaggagcggcggcgaagacaagggcccgcctccggccactcgagcccagctcccgccgcggcggcggtttgttcccgccgggtccctcagcggaggcgctacgcccgcccctgtcgcctcgccccaccccgcccagggagctccgccctagcccgcagctcttccgccttaggcagccgctaggcgggagggacaatcccccaccaccaaccactgccaccccgaggggactaggggctgaggcccgcccaggtaagggaaagcctcagctccttccgttgcgccccagcggcgggtcccagctcggattcccggggtagtggcgggggccgccggcgggtcgtgccctggaaggtgagcgcggccgagctgggccgccagggggcgctgcggagccgggggacacccctccctgcctgcctcagtcccccgccccctccccgcccgcgcgcaaaacgcactcgccccagaggcagcgcggccgagcccgagccgctgccggagcggagccggagagtggcggcggcggcggcagcggcaccatgaccctgggcagctgctgctgcgagatcatgtcctccgagagctccccggccgcgctgtccgaggccgacgcagacatagacgtggtgggcggcggcagcggcgggggggagctcccagctcgctccgggccccgcgccccccgggacgtgctcccccacggccacgagcctcccgcggaggaagccgaggcagacttagccgaggacgaggaggagtctggtggctgctcggacggcgagccccgcgctctggcgtcccggggggcggcggccgcagcggggagcccggggccaggcgccgcggcggcccgcggcgcagcggggcccgggccgggaccgccgtcggggggcgcggcgacgcgga

SEQ ID NO: 33734 - DNA, 2019 bp, Homo sapiens
gtactataactttatatataaagttatttagttcttacttacaagaaccttggcggtaggtatgaatgtggtacttagctgaattagtttcctattgctgtaacaaattactgtaaacttagcggctttaaacaacctaaatttatcatcttacagtttggagttcagaagtccaaaacaagtttcactggactaaggtcaaggtgttagctgggctgttgcttctagagactctgaggaataatctattttcttaccttgtttaacttctaggggccacctgcattccttggcttgtggcccctgcatctctccaatctctgcttctatcatcacatctcctggtctcactgtgaccttcctgcctccctcttatagggacccttgtgattacactgggcccaccctgataatccatgataatctctccatctgagatccttcatttaatcacatctgcaaagtccctttcaccatgtaaggtaacatattcacagactctgaggatgaggatgtggacatcttgagggtggggagcattattcggcctcccacaccatcttgcagatgagaaaactaagacttacaaaggtcaaggaacttgcctaaagttctacagccagtaactggcaagtcccgccctctttggatttgagcctccagctcttaacctcaaacaagaagactgctggtgcaggtgaaccttgaactaggttttgaagaatgaatcagagttaaaaaaaggtgtgtccagtggaggaatggtgtatgcaaaagcaagctgagcactgggtgtgctttggtaccataaaatgctcagattcgctgggggtgcagggaggtgagacaagacaggtaggcagggtctggatggtggaaagccgcctagagcaggctacaatgtttgcagttgaattgaaagatgtgaaaaaccattggaggatttcacctgtatgtcctgggtaatcccttcccctttctgaccctcagtttccagctcctctgccctgatctgctttttccctccccactgtccctttgtcccctcccttctcacccccttgctgccaggcctggtcccatccatccctgggcaggaatgagggctgggtgaactgcccccttcccccatccccaggacagcgacggtttccaaatatctgtctgttgaaataatgttctctgggcactgggcctccctccctccctcacattcctgggcgagccggcctgtttggcttgctcggacaaatattgactttctctgtccttctcactctgggtctgtttaaaaggcatcaatctttgccggggtgtgagctccctctccgtaacctgtggcctctgcggtcctattcgggcagggagtggtaggggaggggctcacaggctctggggatacccctttcttgcttggctgcactatagaggcttttggtgcaatgctgttccttgtcagctgctttccacgcggtcctgcgtggggcctaacagcccacttatggagcctctacttgagggtcaggtctatgcccgtggcatgtgcactgagaccttcatacacatttctctagactcctcaataaccaggcaggaaaccctgctgattctaccctcaaacaattattcatcatccaaccacttctcagcctccaccgctaccctccaggtcccagacaccatcatctcctggatctgactcctggattattaagttaacttcctaaattctgccccacttcccttcagtctgttgtcaattttggagccagagggatgggtgaacatgttggttagcctggcttagaccccccagctcccctcccctcctcttgctcctcctctctccctttgggcctcagggtttttcctcccacctgaaaaactttgcacgaaactgttctctctgcctggaacggtcttcccagatctggtagattccctcccttacctcttagtaaaatgtttctctggccgggcgtggtggctcacgcgtgtaatcccagcactttgggaggc

SEQ ID NO: 33735 - DNA, 1519 bp, Homo sapiens
ctcttgccctggagtctactgcaagtcaagttcatccccttcttcagagtagctttgctctgtcccccaccggggcccctcccgctcagcggggctgaggggctgggggcctcgagtctcagctggactgtggcatcaggccggggctgagctgggccttcccctgtgggagcagaaatggactcctgggaacaagtttgcaagggatgcggccgggcggggttgttcagaggactctgaaggggactgtcgccaggagaaagctctctctgagctcagtggaagcgccgcgggcgtccttcgcctggccggttccggcgctcttatctggcgggaaagccagctcctctaccgtgtcccctgtgcgcccgcggtcctctgaggacgcccgccccgtaccaacccgtcctggcttccactcggccccggagacagggcgggcgggtggcaccttcgggccccgcggggcgcccgccgcggcgtggggcgtggagagggtggcgacagagcgcgggcggggacagcgcgtgggccgcggggggcggggcgcggtggcgaaatggcttttccagattaggggcccagcccgcactgttgacacagtcataagttttaatgagaaattttgagtatttgtgtgggagacgcagcctctgtgcacagatgctgcgggcgggcggcgcggggggccgtccctccctggggccgccgcggccgcaggcccggcacggattcctttcaggcagaggggaaacatttaaactcgctcacctttgaactgccagggacgctgtttaccttggctgcccgagtggcagttttacagatattaaataccgacccgaggctgagccggggctccttcgctccccgcccccgccggggggctgcgctgggcacgccgaggcccgggatgcccgttccaccgggggtcatctcagtgagggtcccgagcccctttctgcagatggtttctgtaatctgtgctggggagacgccctggggctctccgttctcgtccactcctcagcctattcatctcctaattcgattttctatgtcagggcggagcagtgtggaggctgagagctgtctgggccctgctcacccatttttttttttttttttggcatttctgcatctagaaaggggatgtcataagcgaggcacctcctaagtaggggctccggtggcctggctctgtcttttcaaggaacagaggagacctctctctccgaagatgtctatgggacagaggagggctctgcctgagccgcagtcttcagcgggcaggcagagggctccctgcagaggcacaagccatgttgattttacggagcaggctgctatgcacatttcactcctgatttattggtttttaactagatccttatgctgggctaaaaaagccatcttgcactttgcaaggctctgctgactgctgccgaaaatgacacacgggggctccttctgccctccccgccctcccacctcaccccacccaaagggccatggcgga

SEQ ID NO: 33736 - DNA, 697 bp, Homo sapiens
taagagggagagagagagagagaggtgagagaatcattgggatctcatgttttctttttataagcgcattaattccatcatgaaggttctaccctcatgacctaatctaaccctaataatttctcaaaggccccacctccaaatatcctcacattggagattggggtttcaacatatgaactttgaggaggacacagacattcagtccgtagcacaggagtgtccattctattcagctcagtttcaatggtctccattgcattcagcgagcatataacctgtgggagtccagctgccctgaccttgaggtcagtgtcctgaaactcccatggtccaagattcacagactttggacctgctggggaaaacagcactgggggaaaatatctcaggcaggatgccaggaggaaacagatggcatgctaaggttggctaatgttggtgagtttttttttatgttggtaaaatgtatatagcataaaatttatcattttaaccacttttaagtatacagttcagtggcattaagtatattcgcactgttgtgtaaccatcacgatcatccatctccagaatggttttatcttccccaaccgaaactttgtacccttttaaacacgaactccccattctctcttcccctccccctggtatccattgttctactctctatctctctgaatttgcccattctagg

SEQ ID NO: 33737 - DNA, 1243 bp, Homo sapiens
agtaacgcacaatctcagcttacagtccaccctggtgctaagccctcttgcccaggaatgccaaatgggcattactcattaccccagaggccagtgggtcctggggtaccctggacctataggcaaccttcagggctggcttactggacagggggcaggtgacttcctgagatctgctcaatccttgccactgaaatccctcttggcacctgtacctgggcagcagatctgaacccattattgaccacaattgacaccctcccttcattcaagggaagaaagtcatgttgactcacctccttacgttaggcacagaccattttattgaacgttaacgcaaatcacacgggcaggaaatgtcgtaaagagaaaagtaatcttctgacggaaaaataaattatcagccgtgttccgaaggaaaagaaacattcttaaataatttctcttgctgttggtattggctggcagtgtgggccagccaagcaaatggtaatttccaaattagattatacattatgtcatattagttttatattagaaaaacaaacgggatcagaggagaagtgccaaggttggcgagctgtgcttgccacgtgaccagccgtgtttccactgcagaatgtttaatgattccgggagaggtggaagagcaaacattcagaccgacgcgggggagagttgaggttggttgcacagaggtaggctcttccaggagggaaaggacagctcccaggctgggcccctctgagtatgggtacgcaaccaggctggggaggcagggagcacccccacaacagtctcgttttcttttctccaggtatttggaccttcccttggaaaagctggtctggggcatgggctttggagtcagggcaccatggccagtccatgttcacaggagcagcaggtggaggtgccccatgtcagtcccagaagtctgagtggggctatgttggtggcctacttccctagagagctgcccttgggcagtgggggcagatatctgtctccctagtgtgcagggccaggggaatgataaggaggagactttaaatgagactcatattgctagctcatggtttttttttgtttgtttgttttttgtttttttttttttttttttttttttgagacagagtcttgttctgttgcccaggctagagtgcagtggcatgatcttggctcattgcagcctccacctcccaggttcaggtgattcgtgtgcctcagctaggattacagg

SEQ ID NO: 33738 - DNA, 1018 bp, Homo sapiens
gaactggcagagcctgtgcataaaccaaagctccaaggctgaaatctgcaccaccacagcaaatgcctgtgagtgggtggggagtgagggatgatgaatggctggtcaagagggttcttgcaattgctgaggcatcggagtcctgacctttaaagcccctttctccctaagactgttgctcagacagaaaacagcacttgtttgtgtgtgaacttgggcaaatatcttttaccaaactgtgagcttgtcaaggacagggatcttgtgagattatctctgaaaactttgtatccaacttggatgttgatatcacttttgatggttgcgtggagacaggagaaagaagaaatctagatggtgagagctagaaagggctcagggcctcaggaacccgggtcagtgtttggcgtttataaatctaggtgactctgaagagtgcagagctgctcccggtcccatgacaggcattggctaatcattcacagagcccctgcccgacagatcttctgaagtagccactactaatcaaagttggcactgaaaggaaacttatttgctactattggccttgcccaccccctagttgtaactgagaaaaccaatagcagagatggggaggcagcttgtttgaagtcacactaccagtcacagacagagtcggatcccaaacccacctcccagagcatacaatggcgttaaaagagaagatttaggacaaattaattaccaagtatctgacaagtgatagcctgtggccagctctggctgcctggagcctggaggaagagagaaaatagaacctggggaccaatcacacggcactgcaggctggaagtcccatcactttgggcagtcctgtcctcaaactcttttccatatttctcagtagatctgggttctagctccagctggattttcctttggtagtctatgtcctctctctggacctcaatttgttcatctgttaaatggggacaggcatggtgctcaagctctctgagatgtaaaattccttctg

SEQ ID NO: 33739 - DNA, 1253 bp, Homo sapiens
ccatgggaaactacagcaattttcttggaccaccagtgggagaaggaggcattcagcaggatttctgcctaacttctgtctgacacccctggtggcctggggggctactgctgctcctgacttacttccctttccccctggagagcccagctcctggggatgacctgacccgaaaacacatgcattcactcaccaaatactcagaatccttcctctaggccagaactcttgctgggtgcttgggaccccatctttgtccttggaggagctcacagtccaatgaggggggcagaaatgcatggagaccacccaaatgcagtctgcacagtaggtaagacctgtgactgggatagcggggaagccgtgggaatgcaggggagtcttccggggaaaagtggtgtctgagctagactctgaaggatgaggcagagttcagcaaagaagagcagggggtagggtccatgctgcaggcagagggaacagcagaagcaaacgcccaattgttggaggcggagtgagtcacaggtagcttggtggactggaggacaggactgtgtgagcaacaggggaggtgagcagggacaggtatacctttgctaaaaaatatttattgagtgcatgctaattgtgaaagaccttgaatgacattcccaaatcctgaatcatctcccttcctgggccctggcctaagtgtctgtaacatttgtaatgaggatttgtttctaaatttagttaattgctgtttggcttttcccatctcatgggaatagctctactagagggagtgggccaggaaactggcctcaagaccaggaatagcagcagggacatcatagtccaggagaggagagatagcaagggtggcagccaagggcatggcctggccccttatggtgtttccacctggcctttgcactatcttcttggctgcccatgtcttccttggggcatgagatccagcagcctcactctacagcctggggagcatcctgggctggctggtgcatgtggggcaattgagtgcagagactggagtggagtggttgaaggagcaggaggacagagagggcccttggggaaagagttttgtgaagcaaagtcccagaacagggaggaagtggtggtctcagccaggaggcagagccctacaaccacagggcccagaccctgggagaactgaacccgggagaagcaagagggagccatcattaattgcacaatagtgtgctatatgctttgcttatattatctca

SEQ ID NO: 33740 - DNA, 634 bp, Homo sapiens
gagattttttttttttttttgagacagggtctccctctgtcgcccaggcttgagtgcagtggtgcaatctctgctcactgtaacctccacctcccagtctcatgtgatccccccacttcagcctctcaagtagctgggactacaagcataagccaccacacctggctactttttttttgtttgtttaatagacggggttttgccatgttgcccaggctggtcttaaactcccgagctcaagctatctgcctgcttcagcctccgaaagtgctgggattacaggcatgagccatcatgcccggcccagatatcttcatatcattcttttagttgctatttgttgagttggtattagtcacctacttgtgtgtcaagcactgtgctgggagctccaccctgaccccaagaggaaggaattattaaactcacttggaggaggaggaagctgagactcagagatggaatgcgacttgccaaggtcgttccgcggtgagactggggcttcagtgtttggactgagggctgcctgactccagagttttttctctgcaaaacaactcacaacagttggcatcatgtgctaccttttcttgttaagtaattattaataatttgacagaacatcttttgagtg

SEQ ID NO: 33741 - DNA, 694 bp, Homo sapiens
tcattactcatggttggaaaacaatgttaatttcccccaagcgggaagcagctgcacttgtgagccagggctcattttgctgcatgaatatttatggcatgtcccctaattaagctcagaaataaaatttatcctgctaacagggtccacagaagactggaaggccatgtcaggaaccagcctcttatgcctgtgaagtaggtttgtcaatgaaacatttgtttccagagccacttggccagggacagtgtccacagtagcatttcctggaaggtcaagcaccctttgtgtagtcacatgcttgtgcaaggggacacctacactaccttgctgagcagtgatggatggctattgtcccaggcctgcatgtggtgacacagaggtgactctaggccagagcccttagcaatacttcttttcttttagccagtgtgactcaggtattttctgattgggtgtcaaaggccactccagtataaatagcccagtgagaaagcgccctggagtgggaaccaggaaagatgggtttgagttgctcccctgacactgattctagctgaccaggggccggcctgcctgctctcccagcctcaggcccccatttcgttaaaatgatggcggactgtcaacatcatgtagttactgggaatcatgggagaccatggaagataaagtcttttggggaatgattctc

SEQ ID NO: 33742 - DNA, 2156 bp, Homo sapiens
cggggccagcgccctaacctttcagagcctggccctgccacctgtagaaggaaggcgcgctggtggcccgttcaagcaggcagtggcagcaccgggggccttctagaagggacgaaacggctcaggggccggggaaacttgtttggcttgacaacgcctgggctgggcggttacagcagcaatcccgggattctcggccccggggggtcctgtttacgcaggactcgcggcagactggagggagtggggcgctagagcttccttccttagcagctgagaaccatttcatccccaccaccgctatcctgagaccccctcctctccccatctgcgtcggcttcccgcgaaccttccccggcggcatcttcaaacacacagcggcggacacacaaagacgctcgcgagccagcactagtgtaggcactcgggcacacacagatacacgacgcaaggtcccggggactcggatggagccgcagtgtccccggcccgggcggagagggctcgcgcgtaggggcagctgctcccgggccgctctcacaccgggcgcgcggctctcaagccgggagctggcgagctgaaagcccgggataattagcgctaattacatgtgtgcaaacagccgcggcagagggcgcgggctaggccgcggggccgcccctcccccggcctgaccctggcagtcccaccgcagtggaggggctctgctggcgcagctcgagccgaccgctaggggagagcgcgcaggagcacccacgagacccgggaatcggggtgcgccgtcagtgcccagagccaccgagccccgaccacacacgcgggcgcgcgttgcggcccggcaatctcgggatggcgggttacagtcgggccagaggctgagcccagaactgggggccgaacacccgctgcccttcgctgcccttcagcggggaccgggcggggtggggctgagcattctggcccctaggcttctccgactgttttggcctccggagcaacccggtgtctgcggaagattggaagcgactctccagcaccccgccgccgaggcccgctctcccaggccatgccggctggcgccgaggccgcgggacctggaagggtcggagtctggtgctggtgccggaaggccagccagtctctgtccggatgagccacatgatcccagaaagagcagcctgagccttagtctgcgcgcccaaaaaatgagaatgcagagaccattcatacctcgctggaggggcttcagatgctgagtacacgggggtgggggcggggagagcaggagaaagggctttacatgaatcctaacgtgtgaatgtttgcactgagagccagacttagccatctctttttatgggcctaggtgcctgcggcgggctggcttggcgtggcggcagataattatattcctataattataaatgaagctcagagaggccaaacgtctcacaagaggtcacacagcagtaagaggcagctggtttttctgacttcaaatttcaagttcagactgcacaactctccgccatccctcccggacgcccctggaaccccacgcacctccaggccctgagcgaagcctggaagctgcggggcgaagcggagcgcgagagaggttgcgctctgcgggtcgggcagccggggctcgctgcaggcccatggcgccctcttgcgttcgtggccggaggcgcaggcggctgctgggctgacccgtgtcccgcggtcctgctggacttggacgcggcatctgactcctctctctcaatgattgcgcaggcgaggatcgattagctgcggagagggtgacctgagaccacacgaggatgcattttgtataccgtacgctttgtatgctgtaaagcacatgggacacccagtcacagcgtttgaacaccacggtagttttccactcgcttccaccccgtccttgattttttacaggagtcctgtaaggccagcagggcaataattattattcccactatacagatggggcaaccgaagcaggcccaaggccactcgctggcgagtagcggagccagcacccagactggatctgcttcccccctcacgtgcacccggctcccaggctagggtctggctctcaccgaggtttaaggaagagggctttggagtcagacagactcgggttc

SEQ ID NO: 33743 - DNA, 778 bp, Homo sapiens
ctgtcaaatttctatagcagtacaactcttaatgaaataatgttttcccagcactttgagatgatagctaacacctgcagaaaacacaacattaaatttagcaatagatactgggtagacagcttgagagccatgccctccaaacatcccttgttgcacaactgtggctaaatgggttttcacccattgcttatcatgattggtgactcacttctagtcatcattctctccagtgtgagaccagaccaacaaactgggaggtccattccggcactgagggatgatcaaaatctaactatggggtgattaatcagccatgctttcagagaaagatcttaattaaaaggagaaaatgtgaaagttgtcaaaatcaaaagaaagccacatgctaaaaattctcacaaatggaatcaggggaggccatgaaggaagggttgtcatgtacaaatacctgataacaggagctatcacaaaagactgtgtaaaaaccacaaccttgaacaaaggtgatcatactctaacacacacacacacacacacacacacacacacacacacaaatacttgtatgaggcccagtaactgcctgtccaaccttggactggcaacacccttgttattgatccttgtagccaaagacaattacctcaaaacaattaagtaatcctcctcatttctttctttcaaaacctttgtctttctttacctacctgataagcacatagttgactttggcacacatattcccattaaagtgcccatttccaaataaatataa

SEQ ID NO: 33744 - DNA, 1131 bp, Homo sapiens
aatctctactattgggggtttctcttagagccctagagcccaagtccattctaaagtcagtttcaaagcattgcctgcttacctccctacatgtctctgcagaagagaggctggagcacccccccacatccctcatcctagccaggaattcactgaggatgtgtatgttacaagtttggcccaaccaccacaaggcccaatgagaagttttctctcatttccactgtcaggatcgatggctggcctagatggttgacagtagggatgtctacttccttacccatatttgtaagaatgaagccttgtcctaagtgtcccaagacaattacatcggaaagcaacaatcgaacatcagtcagcacacttcccaaagcctgagtcatttaggcttaagtaacctgtggaggacatcataaccgtggtcagctagacccagccagctaacccagcccagttaattattaccattggtccttcaggtatcatgtctggacatatctccagactctcagcttagactgtctggagaactactattaaataagaacacacacacacacacacacagacacacacaatcacacacaatgaagtctaactcatatagagcaaagaaatagtttttctatttttgtgtgtttttttaaaggacaataaaacctacagaaacacagccctcatcacaacaacaagatcaaatatccacttcaagctacttaaatgttccccaaaaagaaactggagggtatttgctttataagatattactaaatggccagttcatgtattttcccaaaatgaatagatattctgcccccaaagactgaaatcacatgtaaatttttgtttttctaaaaaactttattttaaaaatttattttaaattcatatgaccctaactatagaagttacaaaaggatgtacagtgaaaagtcttttgccacccctgtctccagcctttcagccatcctctctcctgactcccacttctggaggacccagtgtctctttccagagatatttttattcatttgtaaatgaatgtgtgtatatggtcaccccatcctgctcctttttaagaaacaaatggaagcatacaaaaaattagtggggcatgatggcaggtgcctg

SEQ ID NO: 33745 - DNA, 947 bp, Homo sapiens
ctggcccccaggtgagttctcaacccagccacagatcagtgctggctgtggccacagccctggcctctctgcacactcacatctatttatatttgtgtttcccactgaaccttccacagtgctttgtgctgcatcagcacatgatgtatatttacaaaatgaacatgtgaaagaacagtgtcacaaacaaagccaagacagacagatatattttccacaaccaaaggaaatggtgctccctccagcccactggaggtcccagcctcccagaaggtccactccactactctacagtaacaggaatgaaaagaagtgtctggagtcacacaagcctgacttgtcactgagcttgaacaagcgcgtcaccctctctaagcctcagttcagtcaactcaagtggggagcataaccctgagatcacagggctgctgagaaaaatcaaatcaaataactcatgggaaaaagccacataaacccgaacatagaacagtgtgatgtcgtcattgccctgacttgagagaacaaagcacagatccagtgaagggacttcccatggcaacctgggaaccataactgtctctgactcctggcccagagcacagactctaggttagccagccaaccccatctctgcagcattaatcattaagtcaaaaggtcaagaggcctctagctgggagacagactaagtacctacaagtggggcttgtgtatggtggtggggaggggctaggaaatccccgcaacttcaggattcagagctctctggagaagtacaggttcatggagaaggaagccatagccctgttcctcagaagcctacctgcaacatgccagaaacttcccctggcccagccggggggcccacagcctccagcagtgctgggaggggttccgggagggagtgagtgctgccccactcagagagcactgacagcagcaggcag

SEQ ID NO: 33746 - DNA, 1918 bp, Homo sapiens
aacttacttatattgtcagcctatattcattcatttatattctttctttacttcagtaattcaaatactattattgagggctcggcgcatggggaggcactgttctgtatgctggggatacagtgatacacagtgtgggtgggggtgttgcggatgcagcctacaataatacttaggactctgccattgagagccaagccgccttggttcacatcctggctctgacacttagtactgtgaccttgggcaagctactgaacttttctgtgcttcaatttccgtatctctgtaatggagatataatggtacttggttactgagtttgggaggattaaataaattcatcacataaagtgctttgaacagtgcttgacacatggcaggcactcagtaagttcttgttattcttatagcagtgaacacagaaaagtcactagcctcacagggattacattccagtggggagacacacaacaagcaccttgacaaggagctacctaataccaagtgccacgaagaacagcagagtgagaagatggaacagaatgggaccagggtgtgctatgtgagatatggcagtcaggaaggcttctctgaggaggtgatatttcagcagggcactgaatgcatttcggaccacatgggaccaagtcattgtgtcaattagcaccccaccagcagtatgtgtgagtgctggtagtgaaggaggacacttccagtagcagaatgaacaagccaagagtgaagaatagggacagggaagtgaacatgacgtaccactccttccacaaagaatctggggcaccgtgacacatgctctgcaacatgtgctgaggacacagacatgactcagatggcactcctgccctcaggggagtggccagacgtggccacagacaaccagaatactgggtaggaagagctcaggaggaagagctctgccagtacaagggcaggagcctcctgcctcctcctccaccaccccagtcctggctcagcttcctgcataacaagggatctaaaaacgcatctcaaagggttgggagatattcaaacagccctcaggacaaaatcatatcctgcggcccctgcctcaccccaaggatatagatttgacactcaacaaaggaattccccaggagacggccacagggaggaagacctgagtttcatagcctgagcctacactggacacagaggatgagcggaggggacgtggatagtctcttgcagcccactcgccccaccccccagccaggaagcccagcccaacacccgcttctcactgaagttaccataaagcacagcctgtatctgatcactctgtgtgagcactgagcgagctgtgggttgctctgctgagcggagggaagcatgtacacttccaagttcaacaaccttgatgcctggcagtgggtgccctgggactgcccagcctggaccccactgcccccctcccaccacagttaaagaaaggctccttgttgaggagaggagctggtcaggttgccctcaggtctcgcttccccaaggaccaggtgttttactcggcagcaaaccagagctgtcctggaaccaaccctgttcagactttgtcaccctgtccatcaccctggcttggctgcagggcccaaggtggcaggagacagagttcactcctcatttattttcaacatccactctagggaggttggattaaaagtctcctggaatgacagtgccagaaagcccttgggtgatcctctgggctgaaaggggcccatagggcagagatttcctcaggtcgcactgctgaggagggaggggcagagatggtgctggcacagatcccatgcccaccccactcccaggcctgcctcctcgtactagtgtttgctttcccccaggcctgcgcatattctccatcactgggacttgt

SEQ ID NO: 33747 - DNA, 1047 bp, Homo sapiens
ccaggcccagctccatgctctgtagccctctctttagcctccactccagggcagcccaacagacttttggggaaaatgactttgtccttcccaagcttctcctctccatgcttagccccagttcttacagttcctcgtagctcccaggttcactctcaccaccttcctatagatcgatccactctctcctgagcactcatgggcactgggtgctgccttttatccaaactgtcctggggctgggaacgggattaggctggagcaagccagtatggtttccatgttagctctctgcaagcgggatacttgggcgcgacctaagtgtgctctgcacccatcagaaacaacaccatttctgatggcagagaggcacccagtcggttctaggaaacccagctcactgtttacccagtgcctattttgcactttgtccccagacaaaggtgtctgacctttcctgcctggctttctaaatgatacttttgaatggctgctttgttgtcccttgaggtcccagcacatacccaagacaggaatgcatgcagcggtcagcaccccatgaatacgaaccgctatgaaagcagtccggggcagcatggagttcctgcttccctcttcccttcctttcctacctcatcatgctgccatcatctggctccaagagaagagcagccatgtcctttctagttgaaaacatcaggaaaagtacaataaacaattaaataaagaaacttaaggcaaggaggggaaagagccttctatgtgcctacacaggaaaactcatttcttttaatcctcctatcaactcctaatgaggggtactattgctgccattttatagatgagaaaactaaggcatggttgattaatttgcctaagttcagcaaccgaataaatggcagagtcaggctggggcctgtgtcattggcttctacagcccaaacatggcgcctgccttggtaaagtgctggaactgctcactctgtcgcagcttctcgaattctttgtagacttccaatgttcccaaacacaccataaggcaaagcc

SEQ ID NO: 33748 - DNA, 2245 bp, Homo sapiens
cccagaacctcagtggtagagccaagatgaacaccaagttccttagagtagaagtccccaagcttccgctagccacactgtgtctcattaccctcccccgccaccagaccccatcctgataagcacacacgtgcatgtacacacacccatgcacacacatacacatctatgtgtacacatgaatatacacacaaacacacttgtatgcacacactcgcagacatacatgtacacacatatacacatacttgcacacacaaacacatagatgtgtgcccacttacccacaaaaatgcacctggttcaagaaaaagtgaactacattgagaactgggaaacctgacttccaatttacctggacactgcctagctatgtgaacctggctaagtcatttcacagtctcagttctccatgtataaaccaggctagtaatcaccttgcctacctctccaggctgtctgttacaaggttgaaaggagaggtgtgagaaggtactgatgagctacgctcacttgcctctgtctccttggaagctgatggcttggaagctcagaggcccagccacttgggtttgagtcccttctctgccacatactatctgtgtgaccctgggcaagtaagttcacctctctgtgcttcagtttcctcatctgcaaaaaaggaataattatagaacttagccaccaggttttagtgtgaggattcaatgaattaacacttgtgaagttcttggaacaatgcctgggctattataagtgccaataaatgttagtcaatggaataccattgtcaaattaatacttattaacttagctttgcctggtgcaacacaggagttcagtaaatgtttgtctaatgaatgactaaacactattggaagaggagggtgatgcaatcagatttactcacacctggtactgggagtaaatctgactgcattatggtctctctgaattaggttctgccttcctcttccttcttttgttctcagactccctggttcaccagggacaccaagagtccccagtaccccattcaggatgtcacgttctctacctatgggtgagcaaaagcctcctgccctctttggaaaataagcatggcagttcctaggctcattggcccagagcatttaagcacttaagagcagagcagggccagagctggaagtggttggaacggggtgaaggggacgatcaggggaggcagtggctccatagctgcagtgtttatacatttgcagtgtcctgctccagcaatcagcaagcactactccagaccaagtagggttcaggcactctgctgttcctctgcatgactcaaaggagatgtggctgctgctatgatgacactctcaggacatccctcaccacccacctactgccctcctgatcagaagaaatctcccagatcccgaggcttggatcaaaataatgatgactactgcaacaacaataatgttaatgacaataattttgcacatttaccaggttccaggcaggcattactttaaactctttatgcatattaatttatttgatgcttgtaacaacctaggaggcagatactattattacacttattttacagttgaagtaacggaagcagaggaggcttaggaacttgctctacacaggaagactggtaggggcctgagctgggatttgaatgaggctggcaatgtgagagctcatgcttcttacttgctatacccaagcatttactgattcgtcatttctaagtattttagttgttactggatttttcttttctattttgaaagcctaaacccaaacgtacttgaatccaaaagaagagcacaggctttgaagtcagggaacagtgggttcaaagtccaatcatttggttattctgagcctttagaaaagtttcttcctctctctgagccttggttccccaatttaaaaaaatggggataacactggttactccagaacggggttctgaagattcaacgaggacacgcacacgcaatccccactcaaggacatggcacatgactagtgtttaatccatgttagggtccttccatttttggcacgaaatttcacatgtgtgtgaaagatgccaatgttcccccacaggtaaactgtaaaatgtaattaatatcaagttataaagtgattattgagcttctacgtcccattattacaagtcaatattgtgcactttcagccttcatggagaaaggaggttgaaaaaagcacaaataatctcaaacaa

SEQ ID NO: 33749 - DNA, 2439 bp, Homo sapiens
gcagagtgtatgctctatacctctctgtttctccccagatcccatctcacccagtggggccaccctgcacactgatgcattctgactctagcccaagggctcttggtgaggacaagccatgtattgagcacaaggctgcctccattcacaggaaggggtatctactcccacataacaaagatgccatgcaagcaggcctgctgccccgccgtgaaacacaattagcctccctggtttacctctgagttggaattgaagctctagaattttggcatccatccatccattcattcattcactaaatattaattgtatgtgggatgccattagatgcagggagaccaactatgtctgtgccagggcagtgagcacagactgacttaaacacacatacgaatttatctgatggatcgtctcccaaagacagattaacataacaggtttctggaagcagggaccatctcacaaataggtgacttgcaatatgcattcactggatattcaagacatgcatgttgaatacagcgacagatggcaggtgacatctggacaaggcttggaagtgctctgctagccccatccccaggttacaggtggtgaacagagagaccagcaaagcatcagagcccatccctcttgattctcaggccagggcattttcccactgccaggagctgcctcttagggaccaaagcacttaggagaaaaagagcaggcccttgctttaagccaggacataaagaaacatgagagtaacttcaattaacccagaatgtgggaagaattttgaaggtcagggaaatggaaaaggtaagtcatgaaaaaagttagcattcagcagtggagataaactgagctgataaacggcctttgaacatttgggttatttatttatttgcttccagtccttgtgcagttgttaattctggctaaaatttcccagtgccttgcttgcatgtgtggtacattatgtacccatctggcagcaagactgacacctcccctggcaaccgtcctatgaagtttcaaacacacttacatgtttgcgtcccaataacaacaagacagaaagggaacagaaaaagaacaccccggagtttactgcgctgactctctggcggagttaacaacgtctagtctgcaacaggagctcaacaaacatgtgagcaagtgaacttgggccaggcccaaaggccagactgagacacctcatgaagcaaaagaaagatacaggccatggtcaccgtgaggctaccatctgaggtcccctttgcagaaataaagataatttgttctggagtgttgtttttttccccctacattccccctgcttaaacaaaccctggtgaaaagaactcctgctctgattgtccatggaaagtttccctggaatgttggaccgagtttctggaatgtatagatttaacgagccaatttggaaattaacagagatgaaaaggaagcgttacggtcacattacacactgaattcactacctgagtcaggcccaaggggtcaaggaggttccctgaaacttcccatgagtgggcttagcaggttccagacccaaaaccttgtccaacccgcagttttaggggagagtccacaaagatcaccaatagacttgctgaggaaggagcacaaacttcattaagaattctgaaacactgtataaacatcgtttccaaactttttactgagataagacctgcctacccttagactactgagtgtcatgttttgaaatattttccctattaaccaaaccacatccctgtcccaaatgattgtgtcaaattgccagtccaggcttctaatcaggaaaaagatgacagagtttgagccatggatattgatatattttggggggtagaaacttgaaattttagttatctttatttgcctctagcaatttgtttttaatgctgaacagccttgggatttcaactagggtattacggtaacaccatattactgtattccttcatgtctagggagctctggggtccaggccggacttagttacttcatccagtttctctcatgttgcaaaggaggcagtggaagcccagagagaggaaacaatgtaccggccaggcactgcataagtcagagaccccttggaagccctgcccaggaaggatgcggcccccacttcctaccccaggcagacaccatttcttctcatcccagatttttacctaactctttacagccttttctcctccattcagggcactgagccatctgactcgatcttcaaagaataagtcttttttgtttagagatgtactaaggggctttaagcattgcacatgattcttcctcaatagcctttgatttttcttccaggacttgatcaaataggttcaactcaagcatcaagaccaggttgcggtttcaaccaaagccactagggaacagggaatatcccatcag

SEQ ID NO: 33750 - DNA, 1440 bp, Homo sapiens
cctgtgtcaagtccaatagagcctcagaatcattctcaacccaagatttcaggaagccactaccattaggtcctcgttaacataggagctctgctcaccattcccagcccaggctattatcacagaagcctggaggttttgtttgcttgcttgtttggttttcttttgcaagtggatccacaagcagggatttagtgtcttctgaccttgggtaggaaataagtgctcactgggtatgtctgcttataggcaggaactctgagatgcagggccaggcttttaaaaagctggcattctctaagtttacactcagcctgtcccccaggtgccatcctccaagatcttcatgccgtgcagagggagatgagaccaccactcacaagggctcagttaagcagtgattcactcaaggacagaagccagcatagggcagtttgagtagacctttcagtgatcatttcacagatgaggaaaaaggctgggagaggtccatgatgggccaaaagtcacactttagaaacttacaaacactggactgtgccctcctctagggaagagacctctcagtcactgatgtttccccacacccaggtcagtgacctagaacatataaatgatcgaaggcgtagacacaaagcctaaaacgattggacagcatggcattagtaatttggcctaaaaagaaaggccaaatagaatcagattcacaaacctagtgtcccttgcagagccagccctggggttcagagggaggacaagtgatgctgtcctggtcccaggtgaagccagcaaggtgatgtttcccctgccatgtcctcatgatcaagagaaaggagcatgccctccctcgaagctgccccttccagtgtccgacttcacctcccccaccgctcctcactctcacattgcagcctgacctccttgttgttctggtcccttttccaaaatgtttggggaaggaccctatggatctctcttcaggctctatccagccctgaccccacactcaagcacttactcattttaagagctcagcaaacattggtgaatggatgaatgggtaaacggatgacttatcagagactcctgttttccaagtccttgttatcaagtgcctggacaattctgttacacatatattcattcaacaaatatgaataaatatggagtacctactagataagaggcagggtgtcaggctctggagttcagtgggggacaaaacacagtagcttttcaaaaggtcttttgacttttagttccctctccattttaaccattttgcacttattttcaaatttacccttctatagctgggtttggatctcactcctcctgactcaacaactttcaatgcctcccactgcttattggaaaatggccagattccttacactgacatttaagaccttctaagatctagctgaaatctatgttccc

SEQ ID NO: 33751 - DNA, 1523 bp, Homo sapiens
gggcgcccgaggctgcgcccggggggtggaggtggagcgggcgggctaaggtgggtgcggaagcaggacccaaaccatggtcccacgggactagaatacccaggcaggcgggagagtggccgggcaggcgctcgctcaccgatccgggcggccggcactgtcctccgtccgggggctgcgggcgggcgcgagcggtggcgaggagggcggcgagcagcggccccgccagggcggcgtgcatcctgccagggcccgcggggcgcgggggaccctcctgggcggcgcccctcagcggggcggggagcccccagttgggcacggagtttcctctggagcacggggctccagccgcaggatgctgggcgccctctggggcgtggctgactgtccctgtcggacctgggggtttctctggggccgggctccgtctgttggaagagggagaccctctagggctgggcccctcccccgggcgctcaacctcgctggccgagcccccgggtgctgagggcgtgttggggtccgggggcgcgcggggtcccggagctgcgtcgcggtccaggggcgcgcggggttcctggggcagaaccgagaacccggggtgcgcaagggtcccggggttatgctgggcacccggggcacgcaagggtcccaggggtgcgcggcgctccaggaggcgcgcagtgggacaagtgcggcggaaggcgcggcaggggtggggggcggctctggggcgaccggctgcccccgagcccggctcagaggggcggcgggcggccgcgcggccgctgcccgggctccgccatgctgctccgcggccgggagggagggagagaggagggcgggagagcggcgcggagccgggccgggctgggggctggggccgctggggcgggggaggggaggacctggcgcggggggcgggggggcgaggggccggggccgcgccgggccgggccgggacgggccgggcggcagggagtcagggctagctccgcgcccgggcgcggcgaggcggggtctgatgggcatggcaggcgctcgctcgctcctctctcgctccctcgttcgctccctcacacgcgcggagggaggcgaagcccgcagcagccacttcccaactttccaaacttcccagcgcaactttttcctcccctcccctgcccgcgcctcctcctcccccatccctcctccttcccttcgccaggcgcgaccgggccgcagcttccccgtgcggccgccagagggcgcccgggctaaggacccgctcggccaacctccgccggctcggcggcggacgcggactggtggcagcgacagatttggggaccagcctcgcccaacgcatccgtcccgcagatcctggcaggagcgaacagcgagagggacaggagttggactggggaggcagcaatcacacaaaattcagaaagctgctgtgtgcaaccttatgtcacgcgtagctctgggatgcgcttggtagatgctctgcaaacaccaaatgtaaaagaaaagaaaagaaa

SEQ ID NO: 33752 - DNA, 623 bp, Homo sapiens
ttcatctgtgattataggagagaaggcctcaagcatgtgaatgatgtaggtggtctggtggctagataatgctgttctgggagaatgatttccactttctcagagaggaagatctgagctctgacctgagccactggtcagctcctagccctgaccgttgatacagactgagccagtcctggcgccagactgagctcttcttgtagactgaatgtctagttctgtccagacacctccctttgttgataagaaagaagctgggaaagcttctttcactatggtgactcagcataacccatctctacagctgaagagaaaacttgaagcaaagccaggctcagcaggacctggataggtccacagatgaaagggaattccccaaacttgtcagaggaggggttggtaagagtagaaccactgatggggcatgtcatgaccagatagagccaagaacaggaggttatcgaaatggaccaaaagttgggattcattagaaggaaaggcccagactgaagtaggaatggaaaatgaatgagactggccatgaggacatgcaagcagatctgaatgaagtgggttgggtggagttatgggtgatccagctaaatctcagactgctaagt

SEQ ID NO: 33753 - DNA, 825 bp, Homo sapiens
agtccttcccacctctggggttccaatattctgctccttttctcctcttcctcctccccctcctttctcctcctgctcatctggggttagggagattgcgtgtatgtgtgtgcctgtgtgtacacatgcatgtatgtgtgtgcacgtagtggcagcaaggaagaggaaggaaggagtcctgcaggggttggtggtggcagttgggagaaaaggaggcaggactgtatgtgccagcagggctcagagttttctcaccaactaatggtgcttggggcagtttaatcattaaaggaaaggaatgaagccaggagcgcctcaaagtccagcctgctgttgaccaacactaacagatgagcaaggagctggcagcaatggggcctggagcttcaggggacggggtcaggactgagacagctccacacatagcactggactccagagttggtctgcacgcctacgacatcagcgtggtggtcatctactttgtcttcgtcattgctgtggggatctgggtaagtgggccctgaggctggggctagcaggggaggtagtagtggtctctcagcttgggtggggctgtggagctggggcagggctaggcagaaagaagcagatcatagaaccatgtggctgagaaggaagggccttcaggaatcaggctcctgatctcctcatttttagaagggcagagaggggtgtggctggtctgaggtcacacagagagtcagaggcagaccaggcccccgactcctgactcctctctgagcacctgctgcctttggccccaaccatccctggttgccctgagcctcactccttccttct

SEQ ID NO: 33754 - DNA, 547 bp, Homo sapiens
gataataatagtatcaaactcataaggatcttgtaagaattaaatgagacaatgcttcaggtctatgtatatgacttgatgcatagtaagtgttcaaaaggatacttacagacactgagaggtgacttggtccaaatgcctgaccttacagatgcagaaagtgaggtcactagacagtaagcaacaggaaagccacaactttgcctctttcacaatttgtattcccagtgcctggcacacatgatgttctcagtaaatacttgtgaagtagtatttgttgccctttggttgaatgagtgtacccagctagaactgagtgcccaggctttccccaatgtgcgctctgctttttgaatccaccactggcagaccccagaaattcctcaccaggtttagtttcaggcttattagcaaatgcaaattgaattatgaagtgcccttttgcaacaaggacaacaaaaacagtttccctaggaaaggagggcatggagaggtgaaagctgggatgaaagtctaagacaatacattctaatcaaacttgataaat

SEQ ID NO: 33755 - DNA, 1124 bp, Homo sapiens
agtgcctcaaactgacattgtgcctgtcctctcacagatttatatcaacaaatgttcataatgatattttgatatagatgctgttagctttgttttgtatatgaaaaaattggggctcagagaggtgaaatgacttccctaaggtcatacagctagtacacaagtagcaaaacctggttgaaacagatttgtccacttgcaaacccaggtacttcctactatattcatcatttttatagggatcacctccaggggatgattaaaaggatagaggaagagaggcagtgactgaagctctcaggaagcaccactgtggcccagcttctgctttgcactccagtgaccttgaggttgaaagggacaaaggagcagactcccctgatgctccgtgatgagtcaagggtaaaggcagctctcagggaaacagctggcctttctccagcagccaggcctgggagataaacagatcaatgcggacactcacctccacctaatgagctaatggcgcagccggggcactgccttattggattgctggtcgtgctgacaagcctagagttaagcaggtccactgcaggggtgggggcctcattatcccccagctcctagggagatccagttccttcatatgaaagctaggaatgccttgttcctttatttgtttgttcattcgtttgtttgtgtgtgtttgtttttactcattctcctatgacaatgttgagatttgataggatgatgtcagtgacctttctgctttgtggaccaagtgtcacagatgacggaaacaactgccctccaaagaggcagcctggtgtgttgctgcaatgggctgaatgtttgtgttcctccgaaatttatgttgaaatcctaacctccaatgtgatggcattatgaagcagggcctttgggaggtaattaggtcatcagggtagagcactcacaagtgggattagtgcccttataaagggaccccagagagctagctagccatgttgggatacaacaagaagatggcagtctgtgacctggaataggcctctcaccgaaacctgaccatgctggcattgtgatcttggactttcagcccccagaactgtgagaaattgttgtttagatgtcaccca

SEQ ID NO: 33756 - DNA, 740 bp, Homo sapiens
tttcatctttgaaatatccctggagctaggtgctttacacacatcaactctaattcttaaaatagccctgtcaggaggtactattacctcctttatacaggtgaggaaactgaggcccaaggaggcttagagacacacccaggatgacacaattgataagcaagacttggagtaagaaaaaatgttctaaaaataactctctggcagtaggtcgtaagtgttggaatgtcacactgcctgcttgctcagcaacacgtgcattctgtgagggtgtgtgggtgtgtatttggctctgtgcacacatgggttatactctctggcatgggaaggagaataaaaagcaaacaaatgaattgtgtgtctcctccaggttctttagtaaacagacatggctcagggcttctgctatcaacctagggacagacctgacttcatttcttcttgggtccctgctttccaggctctgtgctaggtcctcggatttaggtgaatcagaaatgacagtgccctagagattcttccatccatgtgagtcagagagctatggagtatggaccatgggcttacattcactagcctgccagagcagcctggaaccccacttaggaaactgggtcattgttcagtgtttcagccctgagcccagcccagtggagatgacttgcctcatgtaggagtttgggatgctatttgtttagctttgtttttggtttgtgtgtatgtgtgtgtttgttttgttt

SEQ ID NO: 33757 - DNA, 1047 bp, Homo sapiens
tcagtttcatcagcctgacaccaggaggaaccccagggacaagcttgaggccccagagtactttagaaccagtatagaagccaggatagaaggagaaatgagggggagaggaagttttcaatcaggtgctgggctttcactgccaaaaaatttcccacaaacaaacccaccccagcaaaggaagctactgttggctggcatgctgcagaaaagaaggcgggcatgaggcctcattaatccggcggctgtgggatcagttgcagataccccccagcccacccactttttgccatctgctgctgctgccgctgagccaaacgtatgcagctctggtgggagcccagccggaagccagaagaggggcccagacccttgtgtatggggcaatcccagcagcagggacctttgagcccaggctcctgacgcagctgtgtctcccaaccccacccccatcccccatgcaatgctgcaacactccacaagttggaagccgctgagggagaagtcccagggccctgaacaaatattagacaaataactgactaaactgcattgattgagaattcactgtgtgccagacacataccttatatcccataaatactatcccaaaccacacaaagatttcaaaactacatctgtcataattcttgatgatttcaatatgcacaaagacaatctttccaacacctcggctcctcaacctacactcctccttccaccgcagttactcccttcctgctcctcccgtagggcttaatagcttaatttcaatggcaagcatcctcttgtcaatacctacttcctatctcactccctttactatcctgactcaaaataacccttcaaccctcctgggaccttcaactcacttttactgtccctcaccaccaccatgtcctcacttccctttctaccctgtttaaattccatataaaacatatcatccttcccttgtgtacactttcattttcctcacccctccctcagttcattgtattcttttgtttcaaccaaagctctccatctactgtgtacctgcaccct

SEQ ID NO: 33758 - DNA, 542 bp, Homo sapiens
gattaaatacagagcctcttggttccctacaaggaaatggtggttaacattttttggacacaaccatttaatcagcaatgaatctaacacatctatatctctctactttgccccagaatactatgagagactatcaaatattgtgctgtaatgcaagcacacagtgaatacaggtcaccctctgtaacttcccagggtagtaagactatcaaatcacaaaacactgtttgttttgcatgactcattcttagtgaacctacattcattgaccctgatatctaactgttaagctgttaaacatacaattctcaggtatattctgagggctacagatatatctcatttgaggaatacagatgagacatcagcaaagactggaatgctggaatagggaaaacagctaggaaggaagatctagtacctaatttcttacataggctactgggtacatatctgctggcctgggaagccatactttctccaaaagctaaggagagaatggtgtgcagaacaaagaaggactcctgtttgtcttgtagttg

SEQ ID NO: 33759 - DNA, 660 bp, Homo sapiens
ccacttgtatatcgtccttggagaaatatcttttcgaaccctttgccagttgttgctgggataatttgtctttttgttattgagttgtaagagttctttatatattccagatacaagtcccttattattagattaatgatttacagtaattgtctcccaatctgtgggttgtactttcactttcttcgtggtgtcctttgaagtagttagtcaacagtactgattctgcctcatcttttaaaatttaactcagcttgcaaaataatcactaagtgaaaaacttctgtaatatatatttctcactgataatagaataaagagtgatgactacttccacctcttcaacattcatacagcacatatgacaagaactgattcttactttgcacacattagtagtttcatccaactgtaaagtatctctctagtagtgttcacaatatacttatcactcttccattgaccaccccattaccattgtatatgccatccaacagtgtcatttgatgaagtatttaacccaagaacttactctgctgtctctctctctctctctctctctctctctctccctctctccctctctccctctctccctctctctctctctctctctctgagacagggtcttactcttgcccaggctggagtgcagtggtg

SEQ ID NO: 33760 - DNA, 659 bp, Homo sapiens
aaatcaaagcagatgatggtaccaggccaaattgaagggtctgttgtgtggtggggtaaaataaacaaaaaaggcattatccttccatttcttttttaatgagatctcacagttttgctttcacagtatcacctactatgaatacagaatgtactgtaaactataaatcaattcacccccaacaaagtgacctctcattagagtctaacctcaacagtgttgacaaccatctgctgccttccttaacacattccacaaaaggaaaacaggcatgtgtgccaaagtaggaagctgagactgcaactcaggattaaaggcagtcaaaggtaacaccccttcccaaaagtccatttctctttcagagctttctgtacttagtggaaacatcaggaaaacaagaaactacctacacacccttctcttttttcctattccacttgtttcttctaaatctggacagctgacattatatcctgtaactgagttgccaattattgacaaatcaagagccagcattccagttgtttaaacgtcatgagccaaactgcttttgcaagtgagaagaataagaaaaatatcattgtaaatcaaaaagcactactagtttgaaagaaattgtgaggttacaaaagaaataatggtttggtaattagaatctg

SEQ ID NO: 33761 - DNA, 2087 bp, Homo sapiens
ggggaggggaatccgcaaatatgaataggtaatttattaagcttgtgaattcattgcagagatactctggaatatatagtcttatctgtctccttgttatcttcttaccctccaaagattccaattaggcaaagtctcaaatgtttactcctctttgaaaaggacctcagtaccccattgtcattgccctcgccatctcatcattctgcttttttactcttcccttaatacaatataaatacaccacgcccataacaccacacgctccacgctcacactccatacatctctccccacagaaccacccaaaacatcccatacttaatggtccaacaccaattaaaacaaaaactctacacgtccccccatataatacaggaaacactacacattccacacacattgtaacccaagtcattaatacctccaatcccattcaacccgtacttaacacattctacacactcatgatagcatataaattatacgcttctccatagctcgccacacacacacacacacgccacgcaccgtataaaagcctaaatgacacaccactgcagcgttcaaacgctgggaagaagactcccttgtggcaccggaaacccacgaggttggaagtgggaggggaagagggccagatacttcacctgaaaatccgccaggatcatctcccggtccatgttggacgccatggcggccgccgagttccgcggctccgggagcgaagcgcgcacctgggaggcagacggcacctcctgcgaccgtcgccgccaccgccgccgccgccgccgggcgccgaggggctggcgggcgagccggcgggcgggtcggcgggccagcgggcggggcagcgcgggaagcgctaggcgctcatgcactcggtaaccttcaggcgccccggccgcccgcctgcaacctgcggagcccgcgtcgcagcagcccggacaggaagattggtctggatgtgggtccggtcttacagtcgcgggccaggatgagggcaggttgcgacagcgcgcacccggataccttcagcggcgttaagcccggcgggggcggggaaaccgagcgagcgagcgggcgggcgaacgccgcggccgcctccgcctcctccgcttcctccctggccgccgcctccgcccctggttggccagcgccacggctgtcgcacattttgcctgtcatcgaggtcgcaaagcgccgctttgcggctccacgtgaccaccctcctgtcaagcgctgagcgcgcgactacccggccaggatctctgcgctggcggcagagactgcaacctgcagctgcggaagcttcaagtctcgcaacaggttattccagtttggatttaagcaaaggcctcaggatagcgcctccccctagctgaggcggggaccagattgtgcacctcacgtggttagtcacacaaatacacaccaccctcacaaaccaactaaacacactgttacaactcgtctaacaaacagcatttcagaaatatatgtttttctctacaatgtttcagcaaaatacagcttcatatagtctctcacgctcaacctgtcaaaaccgaatccacactgtcacacccagtcccaagctccctgacgtctgcatcctcagactccgtaacacagaagtaaccagactgccatggtagacatgggagagacgaggaagctgagaaaggtaaaaatctcgttccagagaagaggaggagcattttttttaattgataaggtagttatgagaaataacaacctcgagttaatagggttgctccaaagggggaaaaaagggaaaacctttctactgctgcagttatatttgtttttttaagctgagacatcttacaaatgggataaaacttgaatccagctttgaatatagtcagtctatttttatttatttatttatttatttatttatttattattttgagacggagtctcgcactgtggcccgggctggagtgcagtggcgcgatctcggctcgctgcgacctccgctttctgggttcaagcgattctcctgcctcagcctccatagtagctgggattacaggctcccgccaccaagcccggctaag

SEQ ID NO: 33762 - DNA, 3040 bp, Homo sapiens
agtccttgattaattaaggcttcagagttcgttcttacatatgccatgtcttaagttttcataaaattcagtctacacaagacttgctttttgtgagcactgtgcttagtggcagtccggatttttccctccacccccgcggccacccctgcccaccgcgccgtcgggcatggatctggcaggtgcgaggccgaggccagggctcagcgaaggacgccgagtttacagagcgcgcgcgcctagaggaggcagcagcagccgcagcctggccgcccgaactttgcgagcctggcgggggagcacagaggcgggccgacctgccccgctagcgctgaggaacgactccctttatgccagctcgctgtccgccttcccgcagcgtacgctgcggagcctcaaagaccctgcggccctccacaaccgtcttaaataacaaacccctgtcctcgcccccgtaggaattggggcagctgggggttcgcgtcacagactcaagcccgccagcagaagggcaggccggacttcgcggggccgaaccccgctccagctggggacaggccgcctagccggcaggagggagccggcgcgagagacttgacgggaggaggtggagagcgggaggcgggaatgagggcgcgggaccgggcgggcggagcgtgcgagactgcgagcgcgagcgccagcagggcggagggcggggcgtgggcggcgcccggccttcccgctcccgcggcgctgcaactctgccgagcctccttaaaactctgccgttaaaatgggggcgggtttttcaactcaaaaagcgctcaatttttttcttttcaaaaaaagctgatgaggtcggaaaaaagggagaagaaaccggcaccctctctgagaggcaacagaagcagcaattgtttcagcgaaaaaagcagcaagggagggagtgaaggaaaaaagcaaaaaagggggcgacacgcaagtgcctgtaggggtgaaaggagcagggaccggcgatctagggggggatcagctacaaaagaaactgtcactgggagcggtgcggccaaggaggaagcagtgctgccaggctctgctccagggcacagctggctggcggctgccctgtccgcagcaaaggggcacaggccggggaccgcgagaggtggcaaagtggcaccgggcgccgaggctgctgagcgctcgccgagacggcgaccggactggctgccccggaactgcggcgactctccctactcagaacttggcctacgtttcccaggactctccccatctccagaggcccccacaaaaccgggaaaggaaggaaaggacagcggcggcagcagctcaatgagtgcctacagcagaaagcctgaacgagctcggtcgtaggcgggaagttcccgggggggctgcccagtgcagccgcaatgctgccgcgagctgccccagcagtccgggctccgtagacgctttccgcatcactctccttcctcgggctgccgggagtcccgggacctggcggggccggcatgacgggcttctcgggggcccgccgcacgcccggcagcctccggagacgcgcgccgagcccggctcccacggcctctgaggctcggcggggctgcggctgcctggcgggcgggctccggagctttcctgagcggcattagcccacggcttggcccggacgcgaccaaaggctcttctggagaagcccagagcactgggcaatcgttacgacctgtaacttgagggccaccgaactgctactcccgttcgcctttggcgatcatcttttaaccctccggagcacgtcagcatccagccaccgcggcgctctcccagcagcggaggacccaggactatcccttcggcgagacggatggaaaccgagccccctggaggacctgcccctgcagttctgcctcacacggctcaagtcaccaccgtgaacaagggtgggtgaatgccttttcttccccctgaatgtctttccttccgcggtattttctgccccgatctatagtcccttgagtctccacacacactcctcacagagatctgtagcgtaggtacgtgacagctctgcctacatctgacgtccggagtcattaaccaggaatgtatgtgtgtctgtgtgtctctctgtggagtcgtcagaattcttcataggggttaagctaaaaaagcgaggcgaggagcccctctccaatggctcagttttgctgaataatcacgtgtgaatcgaggggcgggcttttggcaggcagatcttactagtatttactaccaagctctactccagattaaccatcccagtccttctgtcagtctccgatgccatcatgcagcctggttaggagcaaaggaaaggggaaaaagaaaaacgactaattcatcttttcctgatcgtcaggaccctaaagaatggccgagccttgggggaacgagttggcgtccgcagctgccaggggggacctagagcaacttactagtttgttgcaaaataatgtaaacgtcaatgcacaaaatggatttggaaggactgcgctgcaggttggtattaagagaggtggggaaaacaagtcaataatgttgcctacgtgacccgggtttctagatttacagcttttaagctttcagggacataaaatttcactgtttttaaacctagttggttgccatattttatatctttaagtggatgcaacttctcaaaatgacgtactttgaacaaactcctcaaatccaataacatccttgatatcaagtggggtccagatttggtcttagtttttggaatgtttttgtgacggtggggattttaaagtagtcagtgtagggccgaggtttgtttgttttgttttgtttttaaagacagctctgtaaacacattattatgattattatttgaagtaaatacactgctattagtggttttacgtactttgcccccaataatagactttaacgttaattttcttgactactgatgagggtgtttttccttcaaatgcttcaagttttgacaaacgacctttcctcgtttgga

SEQ ID NO: 33763 - DNA, 4220 bp, Homo sapiens
tgtaagcctcttgaacatgccgaaatgtataggatggatgaaacggtgctgctggggacctatttttcagcgacctgaggtggggagggaggggtctgaacttattcagatgcagagagtggggatgcaagtgctaattaatggagtgtccagagctccaggagacgacgctgttgtaaggatggaggatacaaagcagaggatgcgctctcaaattcagttcttcaccgctgcgtccacattcacgtcgggaaacttggtctcagcctttgcccaggaagctgaagccaggcttacacctgggggtggagggcactaacatgacctcggttcaagttctggtccccgaactgctaaacaaagtgtcttttatcacattttggtagtgaattaagttttctgataaacattatgcatcttgcaacggtgtgatgagttcatgtacacacacaccacaatgggcgactgatcaataagtaggttaagtattctgtcccgagaaagcaatatgatgtatttcccttatcgtattgatcaaaagaacgttgtggatggagtccgtggcccaggactggtttcgaaatctcagttcccaaaaaggtgctttcggcttttgccgggggtagaagtaaatagtccataggcgccgggcagtcacagtgctggagcaagaaaaggtcgtgctcacagccttcctggctgccctaagcaaccttcatcaaaaggctacgggggaaagtccctgtctcggtctctggagactgttctgcttttatatggcagtcccatgaaaacagctccacgcaggaacctagtgagaggcaggaaacaaatttcccacctgagaccccgggtaaagctctgcccatagccaacccaagccttccacggaggggctgcgaagacatcttttctgtccctctgaaactccttctccagactccagctccaactcccggggccctagtgataggaagctggagcccagagctccctcagggcgcgcagaaaagccaggggtgggggtgggggagcttcaaaaccgttagctcgcgttttttccccctccctcgctaaggtttcttttcttttctcttcctgtccaaatatttcaaatttccgcgccttaaataacagtctccttttatttagttagtttcctcggcaggtttggcagcccgcttgtctctgcccccctacgggcccggggcgcctcgggcgcctcggtgctgcctgcagcccccgcgcgctgcccccagcccagcttgcgctgtacggagcgcgcccgccggagtcacagccccctcctgccgcgacctcgcctgacccggctgtccgggcacccggaggcaactaaggccgccccctgcccagatgccggcctgcctctcagcttgacttccctccccggactttggagtgtcttctgcgttaggatttggatcccagtggccctggagcggcagaagggccgcggcgataggaaagcagcgaaggaggccagtggccggagtctgccccagcccccacccgcgggtaaccttggaggcgccctcggagtgagtgtgtgcgcggccgcgcggccggccggggcgagcaggagcaccgcgccgcgggcaggaggcgggagcgggggggcggggagggggagcgggcgccggcgcctcccggccgccggcgcagcgccccgggagctgcgggttccccgggcggccaggcgaccccggtcctggccctcaggcagcggtccccgaggaggcggcagccatcccactggacggttctggcgacctgtgcctgaggaccggggccggagggcggccagggagcaagggccagcgggccggtgagtgcctagctcttcgcggaggtgagctggcggcgggacgcagcggggaggctgagcaaacggcgcccgacctcgatgccagcactcccttcccctccccccatgacagctgaggacagccgggctctgagcctcgcgtccagttgcgaggaggcaaatgcctctctggcttcttagcccctcagactattcgggaagttgacctatggttttgtcggtcccccccccaaccccacaaattactagacgcccaggactgacaatgcacgttcaattccgaaagaccctcctcccgaaacaccgtgaactgcagggctcgggtgcgcaaaacacctagaaaggggtcttttttcaacccgaaatagttttgaaaatcgagtactgtagggatcatcagcgacgcctcaaaacaattaaaaaaaaatccccagatctggacacagacttgctaaattaaggttccagtgaaatgttttgtcatttgctctagaaacattgtgcgagcttcaggtgttaggatgtgggtttggaattttctgtggtgtctttaatcctcaaagacattaaataacagcgtggttacaccccccggcaagcgagcaaaggttatccttgccaccacagcacctgcagaagcacagtggaactcacatattttgcttcctgagttctaaaatggcttctgaacagtccagaggtaccagcacataggagcagggggaccggagaccgggagagagattgtacatttaaaaaaactacgcagatactattacacttcaattgttccacctcacctttctcccccagccctcatcctcatcggacaaggaagaattttagtgtaggcctgttcaataattctaaatacagcctttttcttttctctcatgtctccccccaccaccaaataaaaacaaaaacaaaaaacaaccagccaaaaacatcagctctttgggggaggaagtaaaaaaccaccaatccttatccaactacacgtcatttcttttgagcactaagaagaaatgctacatacaaccaatgctatgaaagaaataatttatcaggacttcatacgcatttaatttggtataattaaagtgatattgtcttttaacatgaaaataatgggacagtttctgaaactgatgcatgaaaaactcaaaaatcttcctggacatttttggagacagaagcttctgctcttttaattttctaagtaactaagagtagttacttagaaaaagctgatactttatcttgaccatataaagcagtatcatgcgaattttattttcattatgtgtcttagattttcagattagttgtatgaatagtgaaagatcacataaaaaggaaactgccaacatcttttaatgttgaatttttaatttagaaatgcaactaaattatttatcacaactctattaaaatacagtccactccctgttccttctcagtggacagtctgcacaactggctggtaaagaagtttgtcctgagcttaaaatttatgctttggaaacattattttctaaaataaaaaaaaaacttactgatttttaggaataattattctataatttggctactccgtacacaactaatgtaacagtatatcctgtcttacattttggaacttttttggcaattcttgttccatagttttctccttctgataattttattaaaaagtaactgtcctcagtgatatatcagcattctgataccgattctgctaattcaggcacttcacaccaaacctatacaggccatttaaaaatgaacatgtattcttatttttgtcaaactttggaacagctgtgaataaatactaacaattgaaaggcctagaataattaatttgcaaatcagcaataatgttatagtgtggtgatgattcaagatgaaataaaaactcatatattagaagaataaataggatgaaattgttaaattaatcagcacttgatgattaacaggataatattccttgtttcagtattcacatagacaatactgtatactgtggtgtgctttttaactatgaaagataacatttaataatcgtgagatataaaagtaattgatcactccagagtatctttttcaaaacataattaaaaacaatggtttacaaaatatttcactatattatcacctatagttttggctgtccaccccactttttaaaaaaatttctctgtatatttttttgtctccacattttaggtgatgaacaaaagtagcatgtagatagaggttttcaatacttctttactcctgattcttcagccacctatttgcctgttcacaaacattacttcaacttttaaagtcatgtttaatgatgctaaaagtagttattatc

SEQ ID NO: 33764 - DNA, 1950 bp, Homo sapiens
agcctcagtgtatctgatttactctgtgagaaggaccactgagttgtaggcagagttcctgaccctccaaattacaaaaacgagctttttaatccaagcctctccaagcagaaaaaacagccatcattgaataatctttcaaaatagaatgtcctatagaaaatatacattcgctataaaaataagcactaggccatgcattccttggttcccacggccaccatcctagttcaggccccaatattagaccattgcaactgagtcctaactaccttttctctgcctccagtctcttccattagtccatttccccttgccaccagattgctgtttctaaaacacagagctaatcatatgactctcttgattaagaaaaacagaaaaacaacttcagtggctctcacagcctactggatcaagtacaaactcctttgtctagtattcaaggtcctccattaactggccccaaactacctcccaacacacacacacatacacacacacacacacacacacgttctttctctaaatttcagcttccctgaatgttattcttagaacacagtgaactttcatttcatcaaatatttgtatgtgtttttctctctaaaatgccctttggcctaccagtcttctctttctcttttttttttttttttttgagacaggtctcactctgtcacccaggatggagtgcagtggtgccatctcggctccctggaacctccgcctcccagattcaagcaattctcccacctcagcctcccaagtagctgagagtacaggtacacaccaccatgcctggctaatttttgtatttttttttagcagagtcagggtttcgccatgttggccagtctggtgttgaactcttgccctcaagtgatccgccagcctcagcctctcaaagtgctgggattacaggcgtgagccactgcgcctggcccaagtcttctctttttaagacccagtttaggctgggcactaatataaaaattagccaggcgtggtggcccgcgcctgcagtcccagctactccggagattgaggcggggggatagcttgaacctgggaggtggaggttgcagtgagcggagatcgcaccactgcacttcagtctgggcgacagagtgagacctgtctcaaaaaaaaaaaaaaaaagactcggtttattttactgcagtttcagagtgagaaaaaagaaaaagaaaaagatccagtttaaatgttgctcctaatggttaaaatcatgatgtctgttccacctgggtccaatccaggattacttaatgggtgaccttgagcaagttacctaaactctctttcctttagcttcctcatttatataatgtgggaaataatagtaactacttcttagagttgtaggtcataaaccaaataatacatgtaaaacatttagaacaatgccgggcatctgattagagctcaatgaatgttagctctgatttaaaataatgataaattaataatgaataaagaaataatacataaatgtcctatttcctgagaagattttcttatttatccaaagaaatataatcatttctatcacaatacattcacagtttatactgcttataacatttattttcacatctcttcatacaatttctggaagatagaatgtgttaaaaaaattatttgtttaaaatgaggtcatatttactattcaaggttgtttttttttttctttctttagagataaggtctcactgtgtcagccaggctggaatgcagtgacatgatcatagctcacagtagcctcaagctcctaggctccagcaatcctcctaccctagcctcccgagctgctaggcaggtgtatgcaccacactggattttttttttttttttctagagacagagtctcactatgttgaccaggctggtctcaatcttcgggccccaagtgatcctcccatcttggcc

SEQ ID NO: 33765 - DNA, 3546 bp, Homo sapiens
tgtgccagccttgcacagagggacagatgattcagcttgatcaggctgtgacagagaaaagctcagggtctgagagcacacaggatgcgactaacccagactggagggtcaggagagtctccccaggggaaatgaagttgcatccagaaggattcctgagaataatgattagcctgatgagaagcagaaaggttgggagtggagggaagtgggtttctgtgagagaaacaatatggacaaaggccccaggcagaggcaatagtattccagataacgaaaagcattttagagagtctagtttagaatttgtgaaggaggtgacaatgctgctaatgagattgaaagggagtcagatttgtaaaccatttaaggattgtcttaaggacagccttgaggagacactgaaggttttaacaggagaatgacatgatccgatttaaattttaaaaagataactctgtcaactgtgccaacagtgaattggatgtgggcaatgatgaactcaggaacagctgagagtctattgcagaagccaaggtgagagatgatggtggcttggactttggtgctgggactggaaagaaatgaacaatctgatatacaactggaagaataatctctctggctgtgatgtggaaggataaggacgtgattggacaggcagggatggttcagtaacgagctaggactttattgtgaagggataaaggggaagcttttaacattttaatcatgggactgatccattccgatatgggtttatataaatagaccgcttggcggagggtggtgagaagactgtcaggcagtgcacaggtaagaactgagccctagacggggcaggagcaatgaatgtggggaggcgcgggagacgggagattggtttcggagccaggtacggagccaagcagtcagagagaagcaaaaattgacgcagcaccgagaacagctgctagtggagagggggatgggcgccgccggagccgccctcgcctcctggcgccgggggcgggaccagagcacgcacggcgcgatgacgcagtgcccgagccggcctcgttctggctgccgccgtctcgctgaggcggagtaggatgaggcccgcggccgtggctccggcgtcggcgggggcagcagcagctgaggcagcagctgaggcagccgcgacggccgcgcccccccccgctgacctggattaggcccagcagctccgtggccgccgccgccccgcgggggggcggggtggggaagtgcttcgtctccccgcccccccccccccatcgctgcctcgcaggaggcgaacgccgcgaccccagcggagcccgcggcccagccttgatcccccaaccccgggggctggcatgagcggcccctcggcggcaccgtggggcggtggagtcgcctccgcctgatccccggcctgtcgcccgaccccacctcgccaaccgaggcggaccgcggagtgtgcgaacgaccccaccgctgctttctcctcccccagatcacgcaccccagctccggaagatggggaactgcctcaaatcccccacctcggatgacatctccctgcttcacgagtctcagtccgaccgggctagctttggcgaggggacggagccggatcaggagccgccgccgccatatcaggtaggggagggtgtgtgttggggggagcgagtagaggcagctctggcggagattgagggggcttcggggccgtctctgcccctggcttcggcaaggcctggcctgggcggcattgaccccttagggctggatctgagggcatttgctctctgatctcagagtaaggttgattcttcgcctgccctcgggcaccgtgtggggatgataccctctgcccttgagttctgggatcagagtatgtgatcacatccccttggccagtgtctggtggttcgcttgtggagtttgggagtgacattttcctgtctttatgtctgaatcgtatgatttcctcatcgcaccgccaactggattatgggttctggataggtggttgccaagcaccacccccccgccccatttatgttttcatgtgtggtcgtcctcttacccacctccctcgtctttttgttaattggatctggcaggttttccctctgcttgggagacggatctccaagtggtgattttaaccctagcgacatcgagttacttgtgtgtgtgtgtatatatatatatatgtgtatatatatatatatatatatgtatataaattttaatccctcctctttttgctccacccatatgacacaccttttaaacgtgctgacttaagaaaacttgattagcttgaactttggaaacctttaaacctggcttgggaaattccttcggttactcgtgttctccctttgtatcaaagactctcctaaatacgttgtactgctttttgtacaataatcagtagtcccagatgtgttgcagaattcgagtgaagacctcttaaactcaaaataggtatgtggatgttataatccacaatagatgtgtgaaaacctttcctgtactttttccattttagatgatattgaatacacccttttccagagggcttcaatagtagtagtgcttaatttcttcctgaagagtttagttttctgactgggtaggctcctttgttgtttcatgtgatgacatcattatctagtgttttcttttctcattcctgtgtaaaccaatgtctcatcacaccagaaaaacctgatcatatatatgctcgttttctgaataaaattcttctgggggcatttcatatataccagtaaggtccagtcttgattgtggtattacagaagcctccatgacttctccctcttacgttctatattccaggcctaccaaatacaccaggctgttcacagctttgttttgctccagttcctctctgcttggagcccttcgcccgggtcagccaggtggacatctaatcctctttgagaactcagctttcatgtctgaagtcccagcattcccttccttcccagcccgaatcccttgtgtccccactgaaacctctacacttccataagcaatatctataacactttagtgttgtatctttgttagatgtgtgtctcatccttgtaatcgcctccttcagtgcaagctgcgtgaaggtagagaatctgtgtttccggtttgctgttgtatccctcgcatctgcctcagtagggactcagtaactgggagataaattacgagtaaaagcccttgagaacagggactctcccctcgctcagtttctggcacataagcacctaaatgctgaattaattaatgaagttgaatttagtattttctgtatttacacaaatattttttccaaagtaagttgtcacagggtagtctcttaaaaatcaaagctgaatctgggtgtctttacaagtacctttgagtgaagcaagcaagctatgtttatccttcactgtctttccctcctatgtttactatacaacaaaagtgcttatttaactttttttttttaatgagatggagtctcgctctgtcaccccggctgga

SEQ ID NO: 33766 - DNA, 841 bp, Homo sapiens
caaagtgctgggattacaggcgtgaaccaccacgcccagccaaacatgaacttttaacagtccatagagaccttcaatagttcattctatgtcttcccaaagggctctattcttattttgtcacttaacagttgactttatacagtggaagcagtcatagattactcatttagagatggagttttcgagtccccaaatgaggtttcttgtttgtggacctagcctattaatcagtaatgaactttgcactggaattcaaaggagccgtgctaacccgagcagaaggcactttccgaccttggaaggctgcatctgagggtgggcgtgagaagttcccatttgctgcttggattgcagaatccagacacctctcatttattactgaattagtgtgatgatgctgaggatgttgagaaggcactgttaggctttaaatttgaagtaaacaaggaaaagactgttgactcccatcatcttagaagaaatgatcttgggagtaactccagaggaaagggtctggatttgattccttgaatggttctagtactcagcacactggggctttcttaaaacctcttggtgccattcttcacttgggaatctcccacctggacctcagccaaatcttgagttggtgttggccttttaggatcctggctttgatgtcaggttgtggctttctgctgtgaatgataactgtcttggaaacactcccattctggctcaagagataaggaatagggcaacctgccaacccatgggagagctgagggcccagcacactgctagaagccactctgccattctgagggcctgtgatcagtgagaggctgaggtagac

SEQ ID NO: 33767 - DNA, 1984 bp, Homo sapiens
cactgaaccacacaaaccttccatgagaaaatcccacatttccctcctccaggcctttgcccagcctgttccctcagattgcaatgcccttcttcggccaggtgtggtggcacaggcctgtaatcccagcactctgggagggcaaggctggaggattgtttgagcccaggagtttgagaccagcctgagaaacatagtgagacactgtctctaaaaagtaataataatttttttaaaaaagaaagaaatgctcttcctctacatctcctgacatatctgtcaaggcctcaaatgcctcccagaccactgggaatccaggcctcctcctcagggactccatctgtaactgaggcacgggccacgctgaactgacatcagcataggctcagctctccccatactgtgggcacctcgaggacagagcttgtgtgtgactcatctctgtcctcagcaccgatgtcagggctgagccaaggtggcctcaggagcctctgggctccctgctccttcaccgacccaggctcctcagctgaagggtgtgttgggggcagggggtggcatttagtccatcacatggagaaggcaacaggcagggagggacgggaacaatgccaggtcctctctgtatgtggagggagtcacttaacatgtctgggcctagatttctgcttctgcaaaatggggacgataatgccagcctgcccgggtccctgcgagactgtgggactgactgagagcgcctttactcccttccccaggtctcctcgtgaattatttatgaatctcctcagtgccaggtttatgctgggaacttcagaggaaagagagatgactaaggtttacaggctgtttggttgtgaaatcatgtgactttaccccttttcctgcttttcctgttcataaaacactcataagttaagttacttctgggtgacactcctgtgatccttgagggtcaaaggaaggaaaccaaggctgctctaccactcgccagccaggggcactctctggatgctcccaggcctttgctaggactgcttaatctgcaggcagtggcttgtagagaggagcaggctgcccagagtgggggccagaaccaggtttcagagtccctcagacacaggttggagtcagctttgccagctaccagctgtgtgacctggcatgtctcatgtctcatagcctctctgagcctcaagtttttccctgcggaaggaaaaccttaactcttctccccaatgggtttttgcatggcttaaatagaatacccaggccaggggccactgcaccaaagctcggtaaatatgagtccctccgtgtcctgcgtcacttccctgcataaagtccttctcctcgaggaggggcttccctggcagcacacagacccatcccccagataacacccccagcccccaggcctctccatctctcaagtccttgtctctctcttcctctcccactgcaggtctgaggcccgggactcagcaccacctgcccagccccacctgtggaaacttgtctggtgctgggcccagaaagagggacagccccacccgggcagctggcagaaatgtggaatttctagtctgaggcccaaggccccaacaggcacctgtggctaagaatactagcccctccccagcctacctcctggaagcccccaactctagtctgaactgggaaatgaagtacagaggtatgacaaccctcaaacctcaggcactccaagtttagcttgtacccaagtttgtatttgcatatatatcatctaggccgctagtcccctcattcctgagctgtcctctcactctgggacatgtctactggggtcccaccttcttgggcccagaccggctgtcaggatagggagggcactggaaggcagaggcagccccttggcctctccaagtctcttcctcttcgtgctcactgaagctccccctactccactttctggtcctttcagaccccacttcattgtctt

SEQ ID NO: 33768 - DNA, 1817 bp, Homo sapiens
agtaacagggcccaccccacaggagtgaacgccacgaggcaggtggggaaggctgctctgaacgtgtctgtgactacagctccgtgagaaagttgggacccagaaggtgagtgaccgacccggggtccccgcgcctccgcctcctcacagccccctgcccccactcctggcagcggcggcggctgccaggggccgggcggggtgggggctggaagccgcagtgcggccccaggccggtgcgcggggggaggcctggcgcggcgcccgccacctgcccgggccccagcccgcgccgcccgcgcccccgggcctcccagccgcgcacttaccccgcgggcagggctcctggggcgccgccagccgaggtcatcgccgaggggcgcgggcggcgctgccccagccggacgccaatcgcggcccaggtgctgccgccgcaaccccgagccgggcgctgtgcggtcgcggacgcggcggccggggaggggcgcgccgggggcggggaaggcggcggggccgggccgagcctcggtctccccacccgcaccgtagggccatggccgcccgcggcgacccgcgctcccgcaccgccgggggttctgggcggcccccacccccgctccgacaggtgagagcccggcgccctctgcgcagacaccgcccgggccgggagctcgctccctcctcacacgtccccacctatttggcgctagaagttcttctccgggacctgaggtccactttactgtcacttctcctccccacagcttccgccccgaagcggcccccacctgagccgtcaccatcctcccgcattaatgggggcattcgtgcagacaaagacagcccccagagtcaggcctggattttaatcccaccatctcgcccactgagtgactgcaggagaccagaaggcggggaaaacacggtttagcactcactgctagctggcagttcacactgccttctcaaatgatccccataattgctattttacagatggggaaactgaggcatggggttcatttgattcacgcatggtcactcacctaataagtggcaagctaggactggaatccatccctcctgaatccaaagccaacactctggcccctttcccccttggccccctctcccctgcattcccagtgcctgtgtgggggtcacccacaacgctccccaaatgtccactgtgcaccgagccctgaggcggtgtctccacctgacctgatcttctggcacagaaagccactggcccatgaagagttaaccagtcaccatctcctggccccagatgctgctcttaaccatgactcatcagagcatgtggctgccattagagctgtcccttcacaaaggaggggacagaagtaaggaaggactgtagctcccctggagcaactatgacctccaggacgtcagaagaggaagcagaaggggacagcctgcagaagcaaccacggtgggaacaggacttgtaccagatcccaggggagccaggcagtttgggcttggtggtagctgcttaaaatctaagcaggctgcctggaaaggcagtgaagtcccatcctgcccatttgtgagcaggggcagatgctcacttgcaagaatcatcccatctctaggagtctcatatacaggcacgaaaaagataattaactactagaagtaagctatgatgacatccaccagcaactataaagaatccagacaaggggagagactggggagcttcctggaagaggtggtgacagaactgagccttgaagtttatattatttaaacaaactgaagtcatggagagggtgtaccagatcggg

SEQ ID NO: 33769 - DNA, 1982 bp, Homo sapiens
gacaaccaccaccaccatcaaaaaaactgggaaatagactttccttatgacacttagaattcctgcaaacacgggttagttattttacatgaagcatgtacgtgactcctggtttctgagaaaacatttttttctctctatcctacagtgctaggcaaagcaccccaaagcctcttgattttaaacacagaaaactccactgccgaaatgtttgccctatcccagcgctaaagccttagaagcaccgacgaatctaggccaaggagtacaagatggcagtgagataccacaatgcaggcaaggaagacgggatgggccccaatcgggaagcacgcgccaccagctctggagagaaccgtctgaggagacgcgggggagagtttgggtcacaggagcaggaaggaactggcaggtgtctgtcaccttatcatcccggacaccatgtttacattgtaattggcttctttacagagagggagggaccaggttcccagtgtgagtgatgtttagaggttttctgagaagcacaaggactggactttgacaggaagcaacgaggcaagagggaagctcgagaacaggttttgctgaggattccccccaagaaaagtgctccccgggaggccgttcctggcaccaagactggcggagccaccacacccgttaaagggatccacctggacagcgatcaggcgtgagccccccgaggggaagttgaagtggaagcagacgtgggtggcaaaaggctgcattgggggtctgacccagaaggaaacctgatcaggaggggggagaggctgaacggaggaaggggccggcagagtgggtagttgagtaggatgagacttctttggaggcgaggctaactacattaaactctgggaagggagggcttccgtcggaccctgggagaaaggcaggtctggagaggaaagactggcttggggggcctgcgcgtccggctctggaaggcaactcctactgggggcggcgcgcagccggcctggcgggcgagcctcgtgcggcccgggggtgcggccggcccgcgcgagctcaacaggagctcacctgggatgcgtgcggccctgtgggaggaaacttcctgggtaggtgaaagctgccccgcgggagccggcccggcaccggcagagcgcggccgggtcacagtccactcggcagcggcgcggagggcggcgagggccgcgcggggcggggcaggaggcgcccgacgaccctgggcgaggtcgcggcggccgcaggggggctccggctccggagggcgccctcccgcagtcgcacccgctttccctcacacacaccggccgcccggcccacaagccaagaagctgcctgcttggcccacaagccaagaagtcggcgaagctgagggcggtgggggagggggcaccggccggccaagcccggcggacgggcgtgtggcgttacctgtgtcagagagagctgggccgccgcagccatggtgtttccatcatgcaagggaggggaaggaagacgggctgactggggctcggggcggggaggaggcggagggagcggccgcaggcgaggccggggcgggcgggcgggcgtctcccctaacttccacaacttccctccccacgcccgccccgccccgcctggccccgcccgcctgcccgcccgccggagccggccgcggcgccgcccaaaccctggcgccggagtctcggccaccggaccagagcctgcccccggggccgccttggaaaacccggcgcggacataaaattaaagcggacgggctgcggaggcgactgcagattgacctgtgaacttcagacaggccacctacctacgctgagctcctgcttctgaaaaatgggggaaattgtaactagaggcccagttacttacaaagactaaatgagataatgatagaaaataataatggcactttatatatgccaggctctgtactagactcttattttttgaattgtatg

SEQ ID NO: 33770 - DNA, 903 bp, Homo sapiens
aaaagtgagttcccttcctctccaggggaattcttcatccaggactttgtagattatagtttctaacagactcctgggaggaatcatggccaaggcctttactctggggccttgagccactctcttttctcctgatttggggaggagtcctccccatctttcttaataagtctcagagaagaaagagatggagaggacaacaactttttaaaggctggcgtattggtcccctcctttttaccttccaattaaaggaaagaagactggcagagagagggaagctgggtcaggacttatcatcatggctggggcaatcacccctaacatctgtccgggaattttaatgtttcagagttttaccacatctctgatttccctttatccctagaagcacctccaaggatcacgtaggaccagcagaagcagcgtaaagtattggaactttgaatctgacatcagaaagacctgcactcagccgggcacggtggctcacgattgtaatcccaggccgaggcggtggatcacttgaggtcaggagttggagaccagcctagccaacatggtgaaaccctgtctctactaaaaatagaaaaattaggcaggcgtagtggtgcatgcctgtagtcccagctactcaggaggctgagccaggagaatcacttgaacccaggaggcaaaggttgcagtgagctgaaattgcatcactgcactccagcatgggtgacagagtaagtgagactctgtctcaaacaaacacaaaaagagctgtacttaaattctagcttttctacttaccttaacagatgtatgtcttcaggcaaattatttaacttttctgagtctccttttcacatttagaagtaggagactttcacagtgtcatattttcacccccatcaatat

SEQ ID NO: 33771 - DNA, 1053 bp, Homo sapiens
aaaatgaaatgttccttcatgaggatagatgcgtaggctgagaaaaaactggggtccaggctgggcgtggtggctcacatctataatcctagcactttggaggccaacgtgggaggactgcttgagcccaggagttcaagaccggcctgggcaatatagtgagaccccatccctaccccaaagaactttaaaaattaggcaagtgtggtggcatgcacctggtgggaggatctgagcccaggaggcagaggtcacagtgagccatgatcatgccattgcactctagcctgggtgacagagcgagatcatctcaaaaaaaaaaaaaaaaaagaaagcaagaaagaaaagagaagaaaggaaaagaaaagaaaagaaaacgggggtccagagtgctgtcaggctggacctggctccttccctctgccccctcccatcatcatctatatgaaggtccagctcaggacctgtaaacaaatgcagggcagaaaagaaagaggctttaagcacttccaatccctcctctgggttcactatcattttgaccttgagttctttaagcttaagtaagatgggaatttcccttgtctctggccacaccctcccccacaatcatgggcccttattgttataataggtattttagcctaggtccctcttcttgaaggcctcttggtgacctgctttgtatcccagtatgctcccaggcctgtgtcagtccttccttgtaccccaggaccctctgatttcctaagacagagatctacaagatcaaaaacagcctaccccaacttttatatttctatgctgtggagcctccaaggctttgctctgcctgcctggcagtttgctttggttgtgaccatttgtccagaatgactgaaggcttctatgccagcccaccaaattcacagtcattcaacacaattgtgattgggaaagttctctggttcctagcctgttctagccgttttatgattcctaagacagacagcatcctatcctgggggctatagttgtgacagtgccctgttgatttaatcagtttccatcttc

SEQ ID NO: 33772 - DNA, 1444 bp, Homo sapiens
atgttggccaggatgctctcgaactcctgacctcaagtgatctacccgcctcagccccccgccacccagagtgctggaattacaggggtgagccactgcacccagccttaacttaattttcaaccttacctcccatgttaccactctcactatccaaaacacacacgtgcttaagtaagatctggactgccccaaggaggcctagttacatatttaggttacagatacaacactctggacacatttcagatgctaaaaaaaggtcacttccttgacctcctgtgcctttctctcactgaggcagagtacaatgccttattgtagtgtacctgtgagagggtctacgtagctgatgacctccttctcctcttctgagaactggaaaatgtctccctgtgctatagatttcttaatatggtaccatgtgcctccccacctctgtggtttacttatattaacattcaggtttagagttgcttttttcaggtctttgaagagtcctgccacatggaggcggggtggagttatcatattagacattttctgttccaagtgaatctgagcgttttcaacaactacagtggctgtcattaggacctaatggagctgacagtgactgctatcagagagcttaccaaacatgatgtgatacttggatcctgagtgcatatcctcctggttcagggtggcaggaaagagttttacatatccgccaccacaatacttcctttgcttgtgttttactgaaaactgaaacaccaaggtctcattctcattgctgaatgcttcaacctggttgagaaggcataaaacttggcatgttcactggtttggagacctagaagcagaaagcacagagtcttcaggcttaaatacccaaaaagcagccagagagatccagcacttgacctcaccaatctctggtattttcttccatacctgtgctgaaagctttgcacacatacttttattcaagcctcagagcaaccctgcaaaatgagtattatctccactttacaatcaggaggctgagtcataaggaggtgagtcacctgcctagggccacatagctagcaaggagccaagctggaattttaagccacgtttgtctgattctttctgcataccatgctacctctgattttcaagagatacttgaagactgttctacaactttacaaaacaaaggcctgtttttccgaggctcccctgggtgaccagaatgaggttctaccatacaaaaatgctgtggtagaaagagcccctgcactttctggacatctttctaccatagcctcgtagatcaaatagtaatcactgctaacattcactgaacacttactcgttaccaatgtgtttcattcacatatattactactgtacttaatcttcataataaccccatgaagtgggttctcctaatttctctgctttatcatgaagc

SEQ ID NO: 33773 - DNA, 1338 bp, Homo sapiens
gcataaatgaatatcagatatgaaatcttttggaagtggaaggtatcatggccagtaaaattatttattaatatgttcataatcttttttctttactctaatcccatgacagattataaataatcttaatagcagtattcacgtttgcattctcgcatccgtggcatggagtcctacacacaataggcgccctaagaaagcgtgtttgacttgatcgctggagcatctgccggcaccgcccaggacccgcccaggacccgccccgccccctgcggccccgccccccgcatgctgaatgccatataggcgagtgacgtcaggccgtttgttgtcattggcggctcccaagatggcgtccatcatggaagggccgctgagcaaatggactaacgtgatgaagggctggcagtaccgttggttcgtgctggactacaatgcaggactgctctcctactacacggtgagtccttggagggcacagctccaggcgcctcggggccgcgtttcctgggtggaggtgggggaccggggttttaggtggctgagttgaggttgctagtctgggggtgccgccgtacgcgagggttcccttgttggggagggttttacgtctcggatagccaatgagggtgagggagagaggggcgcagccaataaatagaaactagctgtctgatttatgggttgggggtgagccaagtttctttcttagggtccgctattaagcggtagtggggtccagcatggttgtgagcgggtaagggtgatcgtagtcatggcttaaaaggtccagtcttgcggttcatgctgtcttcatatgttgtcatggactttacactgtcccaccaaggccctgtagccggccgcaccccttagcttccctccagggattgaagagctctgcttcctcggaggagtggccagaggagccgggacaggtccaaaagtgaccagccctcgggcaacaccagggggtccgaaatccctccagtcggttcaggttgtgtgtctcattcaagggacgcacccctctatttagcgggaggcgagctcaaacgacgccttaacttttgagagccaaggatttcctacacgcgagactcttgtcagcgaagagagacaagtgatagtgcagtgtccccttacagttacattctgggttcagggcttcactgttgttaacatgagttggtggccgtggaaaagtagatgaattgctgtgaatcttacgtggttgtgtgtgtgtgtgtgtgtgtgtgtgtggttttttttttgagacggagtctcgccctgttgcccaggctggcgtgcaatggcatcatctcggctcactgcaac

SEQ ID NO: 33774 - DNA, 3801 bp, Homo sapiens
aaggaaattgggggagttatagatctatgaggaattggaagtttagaaagaggagtttgtgccttttgttaatttatgaaaggttactgagtacctattgtgtgcctggcactttgttaggaagtggggttaaagtggcaaataagatggaaattgttcatcctctcatggtacctataatatgttgggggacataccagataagagctgtgatagaggaagcacagggggatacataggtgggctacttgactcagtcttgaagggttaggaaaggtttccttggagaagcaggtttgttttgacttgaatgatgaggagagattagccgtatgagcagagagggaaaagtgcttgagacaaagggaataaaagttttttggaggagagaagagtaagcagcttgtcagttctggaggttgggctgtgaggtaggtagtagtgagagatgaactggggagctaagcaggaggacagataatgaaaggctttcttggcaaaccatgttaaggaatttgaactttatccccagggcagtggagagctatttcagtgttgtaagcactttttattattattgaaaaatcttttattatagaaatttaaaaaaataaatctattttatttattcatttattttgataagactggttaattttgtatttttggtagagacggggtttcaccatgttgctgaggctggcctcgaacttcagggctcaagcattcacttgcctcggcctcccagaatgttaggattacaggcgtgagcccctgtgcccagcctattatagaaaatttttaacattcataaaactaaagaggacggtaaaatgaattcatttcatccagcttatacaagtatcaacatatggccagtcttgttttattagtactcccattaactccttcctcctctattgaattatttttagagcagatcccagattattatttcttgtgaatatttcagtatgtggccaggcatggtggctcacgcctgtaatcccagcaccttgggaggccgaggcggggagatcacctgaggtcaggaattcaagactagcctggccaacactatctctgctaaaaatacaaaaatttgccctgctgtggccagcgccagtaatcccagctacttgggaggccaagaattcagcctctcccttcaaggagaatcacttgaaccaggaagtggagtttgcagtgagccgagatggtcccactgcactccagcctgggcgacaaagcaagactccgtctcaaaaaaaaaaaaaaaagaaagttaaggtccctctattttcaaaagaatgttatcaaaacacttttattacagctaaatagtagtatttattaatatcaaatatccagtctgttcaatttcctagaatgtcgcaaacatttcttccttaccagttggtttgagtcagaattccaaacaagatctgcatataaaattatagagtctcttttaatctctagttctccctctctttttcttggccatttatttgtctaagacaccaggtcatttactctgtagaattttctgcattttggattttgttggaagcatcattttggtatgtttaaacaggttcctttgtcctctgtatttcctatataaattgataatttgagctgaaagcttaatcaaatttattttttttcttttgggcaagaatataggtggaacctatcaaatcaagaggcatatgatgttagcttgtctctctatgatgttaaaattgatcagtaggttcaggtgaaatgtgtgtttttttttttattttaaagaatatggttgcggagaagtaatcaggaggttgcttttgatgggatttagtgattggatgtgagtgaaaggggaagagtctgaagacatccaggttttcagcttgagctggttgaatgataaaaaggaagataggaagaacaggttgggggagagaagtggttgctttggggcatgttgaaattgacataaagatgtgttacagtctggagcttgggacaaaaatctgggctgcatatcctcttatcagtcagtaaaacataaaataaatctgggctgcagataaatattagtttttcatatatggagagttgagagagtgagtagaatagagatctttggataggactctggaaaataccactggatttagttatctattgcgttatgacagattactccaaaatgtagcaatttaaaacaacagtttgttacctcatagttttcgtgggtcagaactttgagttctggctcagggtctcttatgaagttgtagtcaatatattagccagtgctgcagtcatctgaaaggcttgactggagcaggaagatcagcttccacgatgactcacatggctgttgtcagaaagtggcagttccttgctggctgttggaaggtggcctcattcctcaccaggtagcctctccattgagctgcttaagtgtcatcatgacagagcagctggctgtgatccaagtgagagcaaagaggaagcctcaatcccttttatgacctagtcagagaccaccacttctgccttattctgttcattagagacaagccattaaattccactcatgctcctggggatgggaatttcagacatgaggagggaaattaggctttatcttttgaaaagaatttgtggacaaattttaaaccaccacaatcacaatttaagggattggcagaggaaaaaagcttgcacaggagagtgaaaagggatgccagagatgtaagagaaaaactagaagaatgtggcagtcatggatggcaaggtggaagtagtaaattggcttgaatactgctgaaaggattaaatagatgagatctaaagcatatccattggattgatgaacatcattgatgttcttaggcagagcagtttccatggagtggtaggtatggaatgcaggttggagtggcttgaagagtaaagaggaggcaggaaatatatgaagcgaatggaggttattcaagatgtttcattgtagaaagggcaaagaggacatggaatgtggaatggaggggaacagtttctaaaataggaatatgcttaaatggtgtagggatgggaagcaaggtcaatgttaaaaatgaggatacagtcaggacgcaaggagtatagtaaagatttaggacaatgacagtgggaactggaaaaaggaatagctaaggaatagctaaatatgatttgtttagtcattacccacaaatgtttaaccctctttcttgatttgtattgcttttggagagagggttagaaactgaattagtaagttacctgggctactcaagatattccttgtaaaaggagtcgttagagaaatcatatgttctttgctgttacacactgtctggaagagacttgtaatgactttgcattttaaaaccactgctagtcaaaacacatttaagtgttatttggcagtctttagcaatgtttagtagatgataaaaaaatctaccatctaattattagattttagatttttgaatagcttaaatgtatatatttctcttgcaaacatgtaaaagtagtctcagattctcctggaaaggtatcagcaccactcccatcaaacatttaaaagcaaatttattcttttctaagtaaaccattcttgaatatatcaaatatgatttttattgagcttatatatggtacttttttttttttgtcggagtctcgctctgtcacccaggttggagtgcagtggcacgatctccactcactaccacctccacctcctgggtagaagcaattctcctgtctcagccaccc

SEQ ID NO: 33775 - DNA, 2050 bp, Homo sapiens
aactaggaatataggcatttgccacctctcctggatgccacttcattctttttttttttttccctttgagacaaagtctggccctattacccaggctggagtgcaatggcatgattcagctcactgcatcctctgactcctaggctgaaaccatcctcccacctcagcctcccaagtagctgggactacaggtgcacactgccacaccaggctcatttttgtattttttgtagagatggggtttcaccatgttgtccaggttggtcttgaacttgtgagcccaagtaatcctcctggctcggcctcccaaaatgctgggattgcaggtatgacccaccacacccaacccaaattgtcttacctttctaaaattgtgaaggctgggcacagtggctcatgcctgtcatcttagcattttgggaggccaaggtgagaggatcacttgaggccaggagttcaaggccagcctgggcaacagagtaacactccatctctactttaaaaataaataaataaataaataaataaaattgtcatttccaaaacacatctgatccaaaggtcttgggataagggatgtggacatgtatttgtaatctagtgacctaggaatttacatgctagagatggttcagaagtcagcattaccgccctctgaggcactgctgagaggctttacagggtgacatactcctctgaattcagaaagatcactgattttacacccagcctttgtggttgagaaaaacctttaaggaagacttaaattaaccaggtttatagtgactgtggtacaaatgtacctttggatccatacctaggttcaaatcctgtttctctcacttgctatctgtgagtctgtggacaagttactccaacctttctgtcactgattcctcagttataaaatgagtataacatgccaggcatgttggctcacgcctgtaatccaccactttgggaggctgaggtgggtggatcacatgaggtcaggagttcaagaacagcctgactaacatggtgaatcaccgtctctactaaaaatacaaaattagccgggcttggtggcgcatgcctttaatcccagctactcaggaggctgaggcaggagaatcagaggctacagtgagccgagatcacaccactgcactccagcctgggcaacaagagtgaaactctgtctcaaaaaaataaataaataaaactaaataaaatgggtatgataaaagaaccaatatcataagatcattgtgagaattaaataaaatagtatttaaagcactagcacagtgtctggcacataagtgctcagtaaatgataacaaaaagctaaagtttatggaggtgtttgacatagtaatattcactaaatgtacacagtggtcaccattatatgaatcagtattccaatttattaattcacaacaagaaatataacttaagaagactctacatttaggctatctaactgatacatttattctctgaatgcaaactctttgggatgccaaattataagcagcatcagaccaaagttatatgttataggtatttagtggcattagatattgacatcaagatgcagtatctccatgttagagacatacctattaccagaatgtaacaggtttaatctttgggtcaaaaaaacttctatccttgccttctgatattagttctggccttctttctctagttctaaaatacttagtataatgatctccaggctgttccatctcttaaagatgatcttgtatatatctctgttttgatatatgtctcttttctttaagggaaggcagccttgttcccaggatcttggagagacccccaaaatcaccattaccttgtttactgatatatttttgtatattgaatcaatagacattaaatctgatgctcaaaatgagaccatctgtaactgacagggaaaggagggaaggatgagatagttatctatgataacttgaaggatgagtgatggggaaaatttctccattattgtgagtctgtgactactcaagagtttttgttggtgtagctttctgga

SEQ ID NO: 33776 - DNA, 1850 bp, Homo sapiens
tatatttttggccttgctttagtttctttcctgaattttctaacaggcatttttttttctttctttcctttcattgacttactcaaaagttgaatgatgtgtaatattcttcctttctgaaactcttagccttggtaatcaatgggcaggtatttttgaagttctatattttccctcatgaattgagatttagctttagcttcttctaattacctcctgtcattcttctttctcttttcttccccagaatatgttaaagatatattttacattttggctttccctggagaaggaaggttaatattcaataaaacctcttttaataagattcttgcagaggtcaagtttaccaaatttcaggattagttgagtctgagactcttccagccccaaataaaattttggtaacctaccacctcctaatctgattttcttcctgttttctctatgttataaaacagcacttcatttacccaattagccaaatttgaagccttctgtttccctaagtctacattccctacattcctctctgtatctgatgagttaccatgtccattggattccatcttttctttatctcctgtcaatgacatgacccaggttcattctttctatagctttttaagcttcctgttctccctttttctggattcttttctgccaaagcaacctccttattgacatttgagtgaattctctaaaaccatcctatttctaacatttttgtagtcctttcggtattatattaatgtatcttaaagattaaaaactcaaatcctgatttttctagatttcaaaattaagaaataatgacctaagattaggccttctctgaagcctagagttaaaataggaaatatttactgtaggagctacattttttaggatatatttacagataaatttggtgaggctttccattgactagtaataatttaactaagaagcatgtgattttagaatgaactgaaaagaacccattaatctacatttggttttcattgtctgctttgagtgaatcactgatacctggttgcccactacagtgctgactttgttccagagactcacagcattgcctcatattgtcgaagtggaagttgtgggggaggaacacttgtgtaaatatttgcctgcattttatctgacagttttggagacttcagctaaaactattcataaattgttgaaagatccaattgtggcagctttaaaaggatcattaagcaaaaataaagatttcttaggaaatctaattttagtctctaaatataataatggaaccctgcactgaataataaattagtggatcatcattcctcattcagcaaatatttattgagcacctatatgggtggcattattctaggggcttgggatacatcaatatataaaacagataaagatccctgcctttgtagagcttatatttcagaagcaggagggagaaataaacatgaataagtatacaatcatgtgttgcttaatgatggtgatcggttctgggaaatgcgtcattagacagtttcatcattgtgccaacatcacagtgtgtacttacacaaacctagatgggatagcctaatgtacacctaagctacatgagatagcctattgttcctaggctacaagcctgtagagtattactgaagtaaatactgtagatagttgtaacacaatgataagtatctgtgtatttaaacatagaaaagatacagtaaaaatatagcataaaagataaaaaatggtatgcctgtatagggcacttaccatgaacggagcttgcaggattggaagttgctctgggtgagtcagtaagtgagtggtgagtgaatgtgaaggccttg

SEQ ID NO: 33777 - DNA, 1952 bp, Homo sapiens
ttacaatcttacaggaccactgtcatatatgcaatccctccctccctccttttcttccttttcctttctctctctccttccttccttccttccttgccctccctccctcccttcctttctttcttctttttttttttttttccaggttcttgctatgtcactcaggctggagtacagtggcatgatcatggctcactgcagccttgatctcctgggcttagcaatcctcctaccttaccctcccaaagtgatgggattacaggagtgagccactgcaccccgcctgcagtctgtctttgactaaatgtcattgcagtccatgactgtatatgttagaagggataagtacaatagagaaaagaaaaagatagtgcaggataatgggaattgagaatgctcggttagggggccaggttttagtctatgctgtttagaagagttcattgagaagatagcatctgaaaaggtgacaaattatcacttgtcctataattatgactaccaattagttgctaagaaaatgtcaggctctgaaaattaagaaaatatggatcagcctgagtgtgatggctcacccctgtaattccaacactttgagaggtaggaggataggttgagcccaggatgtcaagaccagcctgggtaacataccgagaccctgtttctacaaaaaataaaaaaaattagcctggcatggcacttagctgtggtctcagccacttaggaggctgaagcaggagggtcgcttgagcccaggaggtcaaggctgctgcgagccatgttagtatcactgcattccagcctgggcaacagaatcttttttaagactgtctttaaaaaaaaaaaaagagagagagagagaaaagaaaagaagaaaatatagatcagattttatcccaaacctcagggatagctgagcgagggaagggaaaaaaatgtaaacaaattagagcattatagtgttgtagatgctttgacagaagcatataggaggcgtagtaaggcacacagatctttctaatgtgatctcacctctgttcttaatatgatagcagtttatttaaataatgactcagacttcgtggatatcaaagcataggcttagattactttaatctcagtcatgtgaattggtcattctctctcctcacctctttttacctttttaaaaaataccatcttaggttgaattaatgtgagctgattttaattctaaaaaatatatataccatctgactactcagcatgtcccaacttgttccaaactatagtcagttgcattttgaaccatctgattatctaagtggaatatttgtattcagcatccatgctgctattcgtagtgtaactacccacagatacataatgagcaagacactaaaatgtgcaaggcattttggaaaatgccagagatacagccatgaataaggctgtcaagcttctgctttctaggagcttacattctgttggaggaagcaatcaagtaagatatcacatgtattatataccagcagttcccagactttttggtctgaggatccttgtacactttttaatgttatttaaggactttaaacagcttttctttatgtgggttatatttattaatttgccagtttagaaattaaaactgagggattttgaaaacatgtacttatttatttaaaaatagccacaagaaacccattatactaacattaatgagaaaataataattttcccaaacaaatagtgagaagaatggcatcatgttagatttttgcaattctctttaacgtctgacttaatagaagacagctggattctcatatctgcttatgcattcaatctattatgatgagttgttcggattgaagtatatgaaaatgtagcctcaacagatacgtggttagaaaagggaggaatattttaatagcctttttagataactgcgaatattctttgatactcac

SEQ ID NO: 33778 - DNA, 758 bp, Homo sapiens
tctaggtaaacattattgggctccctagcagaaaaatttttgaaagtagtacatgaattctgtataattaaaattttcttttcatcttaataggtataggtaataggcacggcctattttttttttgctcaacagtctaaaatagtaatttaatcacctaatagccttagttatatagttgaaagaagagttggaaatctgattcatgggttggaaatcacctgtcacatatgagttttaggcactggtcactttattttgaaacagctttggggttttttcctttttcaactcataataggctttaacagcttttagttttgtttctgtttttttaacagcatgagttgccaaatttggttatagcttcttggtacaagatgggtaaatttgctttgtgttgtgtaattactttttattttaaatgctacctcttttatgaacactaactttacactaagattaggaaaatgagaattgcatgtctgcaacaaatagctatctgtagtattaaattgtgaaaatgtagactttggattggagctggcatctcttaatatgtaattgtaacatagagtaaataagtattttgtcccttgtagggtcaaacagtacagtgcatgggcagaattagagatgtaggcttttttttttttttttttttttactggcttagagaaccgtttgatcagctaatatggaattaagtccctagggctgcccaggcacaacattaactgctattaaaggaaaattta

SEQ ID NO: 33779 - DNA, 1797 bp, Homo sapiens
gtgagccaccgcgcctggccagcatcgcgctgtttgtgcagtgtgccctgtgctaggtcttgcagtgggtaccagtagagacataaaagtacaaaagataattggacgtttagtagagtcctgaaagggggcgggataggaagatacctaaccataagaaaaaccagcaagagcggaaaaggagctagtcctccagatcaataagttaatcacttatgtttgtgattccctgcattttgggtgattctctgtcgaggtcctcttaagtccagacttttgatataatctgcagtttgcgccatttggattcctgaagcatctttacaagccacctacattccttatggagctgtggcacaacagcaagcccacgatgtctcaccggattaataaaaatataggcgctcacgcttttgtttaccgatatagtatctcctcctcccctcactccatcaacccccacgcgacacaactttccggaagtaagcaaaatccgttatcaaggtgaaactccggggaccaggctccacagctgccataaactggatggcacgttagaagccggtgggtgtaggtgaggcacgctggcgcccgcgggcccttctccagccgctacccagtgggaatccgcggggctgaagccccgaaaccaggctgagcgtcccagagcgcaacctccctttcccccagcagcgccggcgccgcagaagccgcgtgtccccaggcgcactcccccaaggtgaacccccgccccccacggaggcggctgggtcgcgggtctgggcggggcgctccggacgccctcccgccgctgcgcacccctcccgcgagctgccagctccctcggcctctccacccaaaactggcccaaccgccaatcgtctgcctctcacctcctacagcaggtgacccatggccaatcgccaggggtctctttgccaggagccgccagggccagccaatcggggcgacccctccgccggggaggggacgggaaaggggtggggggtgaagggggtgaagggggtgtcccgggggacgggctgaacctcagtcaggaccgcctgcaccgcagtccggggatcgggtcgaggggagaagaaaaaggggtgctcgggagcagcccccggctacctcccctggaggcacagagggcgggggccttggcgaatggctttcttgctggccacttgcggagtgagtagaccccgagggtctgggagaggggccggcccctacccctgagtccccggggtcccggccgccaggccggagcgcgaatgtcgtgctcaccctgcctccttcccgccgccccctggggtgagtaggacgacgtggctgcccgggcccctcttccttgggagttctcagttcctcagcctagatggggtggaggctgaggtcagggcctccagttccaccgagagggcattcgcccccaaatgagactttggaggaggtctctttttttctattcatttttgtggaactctgttttccttttgaaagctgtctcagaatatgattttaagcagaaaagttaagctttctcttatgtgaaagcttaattttgaccagttgcccattaatagaatctccagttgcaggccaagtgttttttggtggtggtttatttttggcacggtgttcgtgcctggccctgtattttttgtgtataaagtaattacggatgctattgtttttgagtatgtgtgtcgggaaggaggtgattttacgctttttgggtagcttgtgcaaaaatactgaaaactttggtatagttttatggggttctta

SEQ ID NO: 33780 - DNA, 2237 bp, Homo sapiens
ttcaacttaggccaaatatgatgcaaagttactttactgaagccacaccatcctctggtaactttcgtccactagtttcacctatcacttaagtgtccctcaaatattttggatagtgataatatgccccttaaatatcctgtcctccaaattaaagtatccaactccgtcaacctttcctggtaacataataccaagactccctcaccattcaggctgcgttcctcaaagaaaccttcattcttgctttagcgactgtattcaaatgactcgaaaagcttctcccattctgacgtcttacaacccaagatctcccacttgcccagctgacaccacagggaagcctctaatcacgcttgccacctccacccaaggaagcatttggggtggaaagtgtgccctgttgctccattgggagacatggagacaagaagtgacggcggcaccgacagagaagccggcacactgttcgcctccccattgcaagcctcctccctcaccggtattgcttggggtcgctgggagacttgacgatctcagggtccccagcattactgagagaccccctccgtccctcttcctcagattcatccgctcctagacgggcaacccggctgttctcgcccagatcctgtccattgggctgcaggtcagggcagctgcaggtagacttcgccttgttccttccaggcatggccagaataggaaagggtctggcagcagcagagtcttcgcaccgaccccgcgtttcgattccccagagcgccgcgagctcccgcccggcctcacacaacttcctccgggtggcacagactgcagcaacagtgactctcctcagcattcaccaccaagctggagcgatggacatcccgcttcccaggacccacctcctccgcgttctagaggcggtggcggccggccctggtgctgccgcagccgcggggaacaggcctgaacccctcccccaacccagtctccctctcgccgacttccctcgtccctccgccctcccggccgccgatgacgctactgatttcagccaatcatgaggcaagaaagtagtcacgctcacgtaagcaaccaatcagaacaggaaaggagaggcaccaacgtgacccggactgattctcggaacagccagcgaacatttcgaaacccaaagtgggcggggcgagggagaagaagcggagagagtggcgcggaggacgacgggagaagggcccccggcgcgtttatgacgtacgagtgtgttttgtggaaaccactgagtagtgctccgcgtgtcaaagaaaaatattcccctaatgagaaaactgagaaacgagtgcagagaattaattccaaagttttaaattttcccattcgtgtcatagtttgggtaccctactcctcagacccggggcgagccttcggctgtgactcagcacataaaaaaccagaacgccggaagtattttcctacacccgccggatggacgctgctcccgagcgccgcaaatactaattggctcttctctaccctacagtcggcccgacagtggtggggtttcatcctcaagccctaagaaagtgctaaaaagaccagtctggatgtgctaactcttctgtgtgaaaacgttttttagctcctccagcctcctgttaaattcggccaatttttatcgagcagctgcagcgtctgctgccttcaagtctcctttcccagtttttcccgctagcagtggtctttggttagcaatgtaaaatgtgacggaaatacaaacataaatgaaagctaaaaagcagctgaaattagtaagatgcactatactgacaccatggggtaagagatcatagctcatacatacgaatgagcggggaaagacgtgaagcagggagatgtgttgatagttactgtatcttcaaggttttcgaggcctcttctgagttccaaatgcaaggaatacaaccatgaacaaaacaaaacttgccttaggctgggcgtgatagtgatagctcacacctataatcctagtactttgggaggccgaagcgggaggattgctttgagcctgggaatttggtaccagcctggacaacatggtgagacccccgtctgtacaaaattcttttttaaaattagccaggcttggtgatgcgtgcatgtggtcccagctactcaggaggctgaggcaggaggaacgcttgagtccaggaggtcgaggctgcagtgagccgtgattgcaacactgcactcca

SEQ ID NO: 33781 - DNA, 3110 bp, Homo sapiens
accacgcccaaccaggtcttttatatgttactaacagatgctgtagtagtcagaataatagtctcccaaatatataatccctaaaatctgtgaatatgttaccttacatggcaaaagggatttttgcaaatgggattaaattaaggatcttgaaaatgcaggattgacctggaatgcctaggtgggcccattataatcacaagtgtttttataagagacaaggaggaggttcagagaggttggaagatgttccactgcagctttgaagatggatggaagaaggggccccaagcaaagggatgtaggcagcctctggaagctggaaaaggcaaattaaagatgccccccagatgaggccctccagagagaacacagactgaaaccagccaacaaattgattttaacccagtgagacccaccttagacttccgacctccagaactgtgagatagtaagtttgtgttgtcttaagccactaagtttgtagtaattttagtgcagcaacaggaaactaatagagaagcctattagacagctacccaatctcatataataatccatgactgtacattcttaaattctagggaaaagtctcttgatatcctattcttcttcccctaatcagaacaagagagctatggtattcatttattgggctcataatttcagtctcattaattcctggagagcagggaatgtcacatttatattaatatctctatccccagaatctggcacagtaaatatttgttaaatggctgctgaagagccacaatcctccttcttccaagtttctggtatgattacctttcccacattcctacactcccttacatttcagctattcttatattactggccctaagatacagatccttgacattcccagatttaatactcactagctttaatatttataaatgactccaaagccatgttgtgacctaacatttcatggaggctgctgtgtggacataaggcagatgactgataagcgaaccttgctgactgcccagcaccccatctcaccttgaccttgttctcagttcctgtttatatgaggagttactcacatcactgtggaattcagattcccaggaaatctcttaagactcctcttgtttgtcccattgtttgtcattctgtctaaccctcctttggaacccatggtcactcttatctatgtctttaattatagtaagagctattgggcaggagcagtggctcacacctgtaatcccagcacttttgaaaggcctaggcaggcagatcacttgagctcaggagtttgagaccagcctggggaacatgacaaaaccctgtctctacaaaaaatacaaaacttagccaggcatggtgtggcacacacctatagtcccagctactggtgaggctaaggtgggaggattgcttaagcccaggaggtcgaggctgcagtaaaccatgagcataccactgcactccagcctcggacaccctgtctcaacattaaatacatgaataaaatgataatttaaaaaagagctgttggaggagggaccctcctttctctgtctatgaggaaggctgtccatggagacagaggcttctcctacagacctgagtggaatgctttaggccttaaatattagtaaatctgggccacatggactttgactttgagtgaatggtgtacgggctaattatagccagcggcccacgttggcctatgactgggtttgtgtgtctttctgactccagagtaaagtatgagcaagctgcacttgccggaagactttagccatggcttcatcctcgctttaatgagtaataaggcttttttttttccattacgccccatctctctgactcctgcatctatttctcaatgggtttaggtggggaagaaaaggaatgctatttatcaatctccctagaaccttaataaaaactacgatttgttgagtgtttactctgtgccatgcactatgttagtgctttatgcacattatctatgtatgtctttagttacactaagagcttttaaatcatcaccaacacagcaatagatccaactagaggccacttactgctgggtgctggttgcactcagtctctacaagaaatacaaaatttattcaggcatggcatagccaggcacacctgtagttccagctactagggaggctgaggtgggaggatcacctgaagccaggaggcagaggttccagtgacctgagatcgcaccactgtactccagcctgggaaacagagttagaccctatctcaaaaaaaaaaaacccaaaaaacaaaaaacaaacaaacaaacaaacaaaaaaacaaaaactagaatccaggacccagagtcctaggtgagctcaatcctctggattgttctcttgatcagcaccagacagcctctgcaatgggccccacatagaggtggtggaagccccctccactcttctattcccacaaggtctccaggggttgcttggcaaccagcacccagcaataagtggcctctagttggatccgttgctgtggagttaccaagtctcctctcacacctgtgcatgctctcgctccctaataatgaggcttctctcctatccctacctccccagtaagactttcttctctgatccacaatcattaacttctcaggaaacaaagggagctctcagggacctttgtggtgaggggctccaggcaataaggcactcccaagaccctcatcccccagagatgacagaaattcctattgtgggtggccctgctcagcaatgctcataacctcctcttcttgtgtctggaatcccctaagagagatcaaataggctggaggaatttaactgaacacttcatactgtgctagtgagtcactaaatgctgttcctacactggaaccacagatggaaaacttcagaaagcaacccagtggctgggcacggtggctcacacctataatcccagcactttgggaggccgaggcgggcagatcatgaggtcaggagaacaagaccaccctggctaacacggtgaaaccccgtctctactaaaaatacaaaaaaaaaaaattagctgggcttggtggctgggacctgtagccccagctactcgggagactg

SEQ ID NO: 33782 - DNA, 814 bp, Homo sapiens
ccagatctgcagtttcacccgcttctcgtgacggtagactgtcttcaccttgaagtcgatgcccacggtgctaacgaaggctggggtgaacgtgtcatcagcatagcggaagaggaaggaggtcttgccaacactgctgttgccaatgataagcagtttaaacatgtagtcaaaattctggtcagaggcatctttgactccagttttaccatctgtcactgaagccatctgcaagagagacctagagtcactcaggaacagaccttcggtgtcaccctgagtcaccatccttctaatggtcaccccaccattcacacactcactccttactccagcaccactgaggaaatgcacactactcagaatcaccccatcactacacctgccccaaatgttgtctcagcactgaggtggaacccagctcctcccattcattccttcagcaaatatttactgagcacattgatctggggcaagccctgtgctgggcatggggcttacaaacatgagtcagacatggtgcctgacctctaggtggacaaaaactagaataaaaggtgggtcaacacagagtaacaaagcagtagataagtgataagacagaggagtcctggctgaggaagtccatgagaagcatctcattcagcctggaggcccggtgatcaaggagaggctcctggaggaagcagctcctgagctattttggggaaagaaaaaaaaagccaagaacagcaaacacatgcacatccaaggaaagactcagtaaagggctatcattctcttgcttcaaaaactattatgactcaggaggctg

SEQ ID NO: 33783 - DNA, 1552 bp, Homo sapiens
gagatcagaagccatggcttcccccctacctcctctggtcagtgcaggctctggctcaaatactgaagaaacatgttggccagttgcggcaagttctcattgttgggatgcattttagtgtacgaaataaactggcgacgaaggcgactcagttctgccatggtcaagggccgggtaaaccgcaagtgctctgtggtaccaggaagcgtgagcaagtccccggggacagcgctcttctgcgcttccatcaatccggccagtacttgactcgtgacctggtccaactggtgcagaaagctgccggaggcgaggggctgggactgcgtagactgatggggtggtggggcccggttctcaaacagggcagagcggatccccgccaggggcaacggctcctctaggcccaccaaagtgaataaaggccggtcccagcgattccgagaatcgggagcctcaaagcgcagcgttagggcctccaggagttcgggagagtaaaaggcaccggacccatgctttgcagatttctctgaatccggagtcacaagagctggagactccgcagccccggattcttctcgctccagttccttgggtacgtcggcctgggcacttccatttactacagagtccgcagtatgcagttccctgaggacgctgctgcccgccgcctgggctctcccgtcctcctcagcgcgtggccgccaactcacactgacgttccggccagggttctcgttcgcgcccgccacctgaggtcccgcgatcgggccgccgggccgtacgcagtagaccaggcagagcggggtgcgcgccgcccgtgccaggcagtagagctcgtaacggaaacctttgatgtagttaagcgagtccaggatgaccacgtcgtggcgactcaggcgccgttccacggaggctcgcagagctccacgcaatgccttctcacgggcagaatcgccgtacaccgctgggtcctctgcgcccaggacagctgcgtcgtccaccacgtacaccgcgcggccctcggcagccagcgccacgcgcaactcttcagcacgccggctcttgccgctgtacggcagcccgcaaaacaccacgagcggcatcctctcagggagcgaccattggcaaccgcgctgcgccaacttccgggttgtacgcgtctccgacgtaagccggaagtgcaaactgctcttcctgtctcccttgacttttacagaccctcttgtttctatggaaacaggagttctacgccagctaggcccaggttcagctttctcagaaaggagatacagagactataatggcatcagttatttatgccaaatgttataggcctcaggagaatgtgatcttcctgcagcgaaagactgcccgtccattttattaataaggcctaaggggcattaaatattgtaagcaatcagcactatatttagcatatagaaggcaattaataaatgctggttctccttcattcctcctcttaaacctactggctctcagtaaatgtttattcaattaccatttcaatcattcaacatctccaaggttg

SEQ ID NO: 33784 - DNA, 2813 bp, Homo sapiens
tccattcataaccactgatcgctcacttacaaaaaaacttcgctgaaccacagcaaggacaattgttggggacccttaaacagcagaccttctaccattcgcttggctcttcttatgcactagatacagctacctgggatgcaggtgctgtttcccaaaggcaagcaagtggcagtaacctagctcttcgcggaagaagtaacgagagaaatcttcagacccagaacagggtcctctgcatatgcaggtccccaacggctctatttctcccaggtgggaaggtgaccgttcctcaggacctcccaagtgctaggcactatgctgggctcttaacatgctttccttaatttacgggccattccttccccccaatccaataatttagagaggcctcaagtacaacttctccattccccagacccgctactctctaccccaagaaatcttcaaactccaggagcggttggggaagataaaaagaaatctggagtggcctaagagttagaatgggaggggaacggtgctagggcaagaagagattatactgggatcagtatagtaaagatcagtaaagagaagataagaacgcggtctgaccctttccaagcccattatgtccatcagaagagatgacgaggagcaggaaactgaagcccagcaaacaggtggccccgagacgaggccgcgtctccatggcagtaggtgcgcggggccacggggctgagcggacgcagggccggagtcccagcagacggtccacacagttcgccgagcgccgctcagcacaacacctctacttcccagatttttttttttcaaactctgaaggaagtgatgttagacggatgtgggtggtgcctccggggtccggtttgggatggagtgagcttaaaggtgcagatcacgtagaagggtacgagagctgttctcgagcgcgagttgcttttcgtggattctgggtgtccaggtcccgggacggagcgggaaaatgtaggccaagatagtaggggcgggggagaggttcgggagaaccgttgctcctcgcgtccgccacccagtccagcccctccccccaagaaccgctgcacttcctagtcaaaagcaaattattgattcgtgaggtcagtcgctcccaacagtgggcggattgcccactggcctcggattctccttacccctccacaaatcaagactggacaactggatttcattgttaggttcctgcgagggtctctgaggagacctggcaagcctgttctgcggtgcgtgggctcgtgccgtgcagacatgcactttcccgctggagaagctctgtaccttatttttccttgcaaccgcaaatcttctactcagggatgatgcaaccaactgatgcaagctccaagaaaaccaaacttgggacctcttattgcaaaactgacttaggtggacttaggacaccaggatataagtcactgcaggctaaagtgtaaagcttctggttatttttcttgtagcttgaggatttcttcccaatttttccccttcgctgtataacaaacaggtgaaaatgtccggtctttttcttcctggtactagttgagtcctaaagtccgtacttaatgcatagcgaaaaagcgacctaacaaaagtacacacccaaataaaaacataccgaccacccttttattaggttccctaaaattgtaggcagggacacaacagaacgctcgggagactgcaagccccaggatgccgcgcggccacctgcacctgccgccactagcactaagagggatgcgcaaagcaggcggggcgttggagttcagatgttcgctcccgggataggctgccccggagagggagaggcggggtcggctgtatcacgtggatctgctcccgccgccgccgccgccgccgtcgtctttctctgtctcggctgaggcagccatctttctcttgccgcgtgctggtgttggaggaccctccctgcttcaggtgagacccccggcggtcccgccacttcacggccataggccgctgcgcacggtctccccccgccctccccttccgacacccgccaaccgctcaggctgccacttccgccgtggtgcggcgagcgggggcggaggcggctggcttggcctgtcggttaccggcggcgcagctgggggtcggcacctgtgggaaggtccccagcaccaccgccccctgtgggagcgagcgggcccgccctgttgccgcccagaccctgtcccaggaggcaggtggacgcccctcctctgttccattactccttgctcacaacagcagtgttgtgtgctttgagctttatacaggctctctgttgtcatctcatttgatgctcccagtctacagatagggaagctgaggttaccacttcccgcccttgagtccagggaaccgaactcagttacagcactcttcaccttgtaatggcagtgtttgtttacaagtcggcgtcccttgcccatctttataacccccctcccactgcctgctgaccgacaggctcagtgttgcacagctagtgaatggcggtttcaacttccgttcccacattcttgcagtttaccatagttgtcccctcgggagtggtaacaatagttaccagtaactgtgtatcttctgtgaaccattccctgtggttgataatgttttaaccctcaaaacaaccctgtgaagtacgtggtgttatacctttccaaatgcaggaggaatacaagttcagagaagaaaaatacctttcccaactggtagaaccttggtctttctgattccaaagcctgtgcttgtcttagagaaaccctaca

SEQ ID NO: 33785 - DNA, 2236 bp, Homo sapiens
ccaataaaaattgtaactaacatttattaagtatcttctatgggccagtctctttatctccaatcttcaacaaccagcaaggcaggcaggagaaaactgaagttcaaaaatgttacataacttccccagggtcataaagctatatatacatgacagaactggaactggtagtgttggtatgtgtctgacaccaaaatcactacacattctagtataccactctgttaaaaaagtgtatttggaaaatttagggatcagaggatttggagaattttctttccctacttcccctctgacagtcgtgtttgtttttggttctgatgtttgcaccctagaggctgactgggatcaaatatggggcatctgtaaacagaatgattccatagcccccactgtgtaataatttccttccttcagagccttactaggatttgcctgggatgaggggtggaaaggtgggagagaagaggttgggagggagaggatgttagtaaaagatgggtgattctttgcttacctttaagttgtttatgaatttcaggacaacccgttggctattctcttctctggcttggcatatatatatatgtatgtatttttttttcatttttgttttgtgggggtggtggtttaggtgttaagggtttggttgatatctgtagaaaatttcttaatgatctacacagtagataaaaaaacaagttaaggtcaaagacaattccttcgtctgttttgggagacgagtgtgtatgtttgaaaaaaaggtttgttctgggtcactcttctttcatccagacgcattaaaggaattagaagggggtctccctgccacccccgaaaccgtgagagtcaaacggagattcccttatattcctgctctcaggtgcgggtccgagtgacaagaacgttcacgtatcttcgggagagaacgaaaaggtgctcgggtctggcgggggcggggaacgccaggggttggtgggaactgaggggcttccggttcccgggaagcggagtcccgggccggccgcgggccgcgggctacgcagggagcacggggccctcgccgcccccaggccgcgctccttagcgttccctgcggctcgtgcccagcgcggccgccgcagtcccgacgccgtagccggacgtggggtccagggggcgctgtggcccagcggcgccggcggcaggagcggccacccgacgctggaggcttcgctgaggatccccgcctgccgcacctcggtcgtcccgccgcagccttgcgcccccggcccggctcggcggcgctcctccgggatccgcgtggctgccgcggcccgggcgccgatgcggctgggcgggtgccgggccttagcagcagtagcagccgcagctgcggctaccgcagctcctacaggagtgggaggtttcgcggcggcgcctggggccgcgccggtgccctccggaggaggctttcggctcagggacgacccccgtggccatgctgaagcggaggcggccgctgctcgaggtgagtgtggcgcggcgtggtccggggctcgccggcctcccgccgcctgtgggggccctggcggcagaccgcgggccgggcggacggggcgtcctgccactgcggtcgcctcccccaccctgcggtcctggggcctcagccctttctccccgcgtcccccgggaggctgaaggccgtggggggcgattaggccccgcgccgttgggaagccctcgctccggcctcggttccggcgcggccgggtgtgtggagctgggggccggcaggagcacggccgcctttcgggtttgcatgggcccgggccgagcgcagcctcttagcccgggccctgcacgtacatcccggagggaggcagatgacgcctgtttgcaaacaagctttggcttccacgcgtcccataccgagtccctcagaatcccggttgtggcggggaaagggggaggagaggaaggccagggtgagaattgggggtgcagagagtgcgggaccaagagagcccctgctactcctggagtgtcattcatggatctggcttgctcgagaacaaccttttgcgtcttatttgaggtgaaatttcatcacctgccggttgctcattcctgcctctttatattatatcttgcctctaagcgtggtctgccttggagaaagccccatcgcatctttgcgatgctaagttttgtagataaacactcacagttataaaaacgtcttttacaaaggtct

SEQ ID NO: 33786 - DNA, 647 bp, Homo sapiens
gcttcttcacctgcatgccttccaaggagctggtttccttcttagtgtggggtaaagaggggagcatgtggtaggacctgccaggtcctgccttgatgtttacaaattgccagacctctctgttccctcaaccctttagctccgagtcacttggaacttgggtgtaggctcagcttgatcccccttccccactgagtgagtgttaattctgcccagcaagctgcttctggcctgagtgcttatgaggagaaactggttcctgatcacagggttgtgccattatcagggaatgatgaaaggttctgtgtctggccccagttcctgactagtcatcaatcaacaaatatttattttctgcttaacggcttgcccaatgctatactaatgaagtattctggtcctatctcacataaaacaaagaacaagcatttttctgctaaatatgtgagcctcttgagggcagggccctgttacattcatctttggatccctgcatttgtagttgctcagaatggtgcatggatgaacagatggatgcaagaacaaatattcagttcctactaggttagggagctgtacattgtgtatttctcattttaattttcacaaccaaagattaaggtattatttctgatactccatacctt

SEQ ID NO: 33787 - DNA, 2140 bp, Homo sapiens
ctaacaagcaaagttgtgaccctatctaaggaacctttgagagcactgaggtcccatcagaacatcctaaactttggtgattcctgaaccctctccccacttgtatgtggaagagactagtaggagggtgtctaagggctctgccacctccaggaggcactgctccaagtctctgaactaatgggggaactacatgtgatccagtttgcctaagttgtctagggacccccatccccaaaccgacccagtagcctagaaggctaagttccatacctgcttggcagcggccaccccttggcctctggcctgagggcccttccgaggtcttggccctggcatcatggcagcctagatacctatggaagagttacagagattcaggctggagtagcccataagccacgcccccaacagtgctacccgtggtaaggtgtggatagtaaactcccaaagaaggcaatgctgaacaccaaagtatgggttacctttaattaaagcactgaagcagcacaggccatgggagggatggggatcacctgttaatgggtttactgaggaatgttctgaacggactcaaatttaaaaagcacattcagggaagtactctaggttcagggtgggtggaaggctgggtagaattcagaaaggctctaaagctgtgcttatggaagccacagctggctatttaattttaaatttcaatgaattaaaatgaaataaagctaaaaatccagtccatcagccacaacagacacattccaagtgcttaacagccatatgtggtgaggggctatgaccagacagcacacacacagaacattttcatcatccaaggacatgtcatcaaagttccatctcacagctgagctctggagaaagctggctcagcattctgattcccataaagatctcacagttattcacaggacctcctgtgtcagaccttgcgctgggcactgggagcgcagaaatgaacctaagacggtctcagccttcaatgaccatttacagggtggaggtggactacacggggttgccccaggggccatgggtgccctgaggtgaccccttcttcagccctgggagaaaaggctcctccttcgaggcggtgacgcctgagctgagtcacgcaaagaagttgggggaaagagggaaataggattccaagacgagggaacacttgacggctctgaagtggggagcagcttggcctgtacaatggaacctgaggcctggtatgactggggcataagcggtgaggcctgaatgcacaagccgaggtggaaatgtgagcaagcggcagaatatgaaaacctctaagccgaaaagcgtttgggcattattctgagggcgctgggaaagaagtggcgggatcgtatcggtgtttcagaaaccccattctggcaccaaaggggaggtgcacagaaggtagggggaaaaggcaggaagccggcgcatctcgccacagcgctggcggggagaccagctgacgggcgtggaggcggcggggagcgggcggaggagctggcgggcgctccgggggactctgagtgtcagatttcgggagtgactccggctcaggtgaaagcgaggccagacactccaaggctgcggccccgatgacacagccaggcctcacggaaggtgggcaacggagtccgtagggggaggcgacacgggacccccactcccgcgctgcgggacgcgccgccctgccccgcccgcgccgcctccatctacccccgcggtccccagaactccccacgccgaggggcggggacgcggcatacctcgcggtgaatccgagccaaaccccggccttgtctcacccggcaccgccctgggctcccgcgggccctgggccgcagcggtagcgacaggaagcgccagcaggggaggtggctcgcgcgcaacacgtgaccccactggccggcggccggcagtgcgcatgtgcacggctacgcgggcggggggctccaacaggtgacaccggggcggggttcgcagcgcgcaggcgcgttcgggtaggtagcgcaggacaggaactctgggcggttccgccggggcgtccaccggccggctccaatgaggtcgctgcgcccagccctcgcccacttgcagcctctccaccgaacctcct

SEQ ID NO: 33788 - DNA, 1612 bp, Homo sapiens
aagaaggtgaatgacagacagcccagcagttaggagctcatctgaaaaaaagatctgggtaggagcccagactgcttagtcacgaaaagcgacctaagacacgtccctccctgggcgcaatttacgtccgtaaaatggggtaataacctctgctccgccttccctgtagtggttcctacactatagctcaaagaacgaaacaagtagagtgctttacaaatgcagatggagggaaagtcatcactgagcatcagggtgcggagggcaggaatgctcctgcttctaggctgttggcttccgccttcccccctgcaaactcagttccctgcagcgcgggaagccttttaggaatcggagtgtggaacagaggaacgctcttaacagttcagaacagtgcctggcactgaacaggcgcttggtacatgtcagctaaaagaatcaatgactgagtctacagagaacgtcctcagtttcagaggttccgatgcgccctcccccgagtccctcgcagcccgctggacgccacactcacccggctccaaagcttcctccggctagccgcaagccctccgtttcctaccgcctccacttcgagagctccgggggatgcggcacctctaacctgcaccagcagggctccttctacaactacgggccgaaagccaggaccaaagcgtgtgtctcactagaaatgaaaagaaggtggaaggagaaaagaaaacttcgcgccaatcggcgtggccccgcccccagaccgtcccttcgttgcgacaccaactagctcgccccgcccactccgtacacctaagaggggcgcatgacgtacatccgctaacatgcagccgccatcattgattcgataggcgacgcggggagcggaagccctttacactacggtgtttccggcttcaagatggtcgcctaagctgtttagtgaaacttcttccacctttctccattcctctaggtgctttttctgaacctggatgtgaggcattaaaggatccgacggaaatagaattgaaggcattctaaaatggctaaccgtacagtgaaggatgcgcacagcatccatggcaccaaccctcaatatctggtggagaagatcattcgaacgcgaatctatgagtccaagtactggaaagaggagtgctttggacttacaggtaagtggaagcgcgcggagcgcctctcagcccccttgtggcccatttctcctgaccgagcgcgggtaggactagcgactggcctctgggggtggtactggaacggagtatgtcgatcattcagaaaaattttgagtgcctgctaagtgcctcgtcttgtgttgagtattagaggcacagatgaatctggtaaggtcatattctgaaggctgtctcagttgggtgttgtgagttattccgtatttaatgatagcaggctgggttgcaacagtgttaagctcagggatccggatataacactttgacacaatctgttgaaggtctttaaggacctaacgttaatatgcctgaaaccaaattcatgatcttactattcttagatctgggccggttccagtatttataaatatcagtgcttcagagaagtcttccaggtaatcttccga

SEQ ID NO: 33789 - DNA, 2222 bp, Homo sapiens
atttctggacacaatttaagatcacgatagggcaggtcaaatgtgtaaggaactactacttctatcaaaatgaagaagcagatatacggtatctaagatctcacgcaaaattcatctaagacttcgaaatcttctgaaaagaaaatgtgtaatcaacgttgttaatacaacagtaattcatcccattcaagtacgactagaaatcccgctgatgtgcttctttcaggtctaaacatctcattctttcgcaatccagataccaacaggagtctgaaacccttcgcagaggcgtgcaacacactaggagagcgctatctgtttacaaatacgaatctcagttacccacgtcaaaaccgcgcattaccacctttcgactggggggcgggggagagagaaggcgggcgagcaagaaacaaaatccacacagacacctctgccttctccctacaaggacgagcccggggaaacattcagtatgtattatatgcgtgtatacatttatatacattatgtagtcacctatgtctaagcaagggtgaaagaaaaaggtacacatgacagggaatcgtaactggacccaacagaaatgttcaaaccaatcccgttaactcaaaatccgccccgctggtctacaacaggtttcggtccgggaccgggagccccagccacagtgtggagttcgtccccaaagcgccccaatgccctcctcaggccgcccaggccgccgtccccacctcccttatctcagccttcccctgggacacccgaagcccgttccaggaaagaaagaagtgtcaggcccccagggggcggctgagacgctctcaggccaggcccccgacacctgcgaagcgcggcacctggggagggcgaaccgggggccgcccggccttcccgagcacaccccctcggtacccgacgctgccccgcggccggaacctcgtacctgcgaggcccgcgagctacaggcgcgcgcgacgcctcctcatctcagtggctcctgctctccctccgcctcctgctgccgccgccgtcgccgctgccgccgctggaggccgggacacgactagctcaggactccaccgccatgtccgccgcgccgcgaactgcattgtgggggggaagggatggggagggggaggaggagggagagggagagggagagaaagaggaggacccgctgaggggagggggcgagggagagcggttgccgggggagagggggaggggagaggacagagcctgtaatggggtcctggcccgggagaggaggagctacgcgcagagggaagggttcaggggtgccccctcccttcgttcggggggccccacaggcaccgtttacaccggggcgggggaggggggaaacagcactggggggaggggtctcgtggtggccgcgaagaaacaatggggagaaggccgaggtaggaggatcgcgcactcacacccacgcggagggaagggagcgcgcgagagacactcgttagctcgcgaggagggggcgggccgctggcagaggggaggagggagccacccggggctcgcgggcaggggcggggccgccgagcggaggtcgcgaggtcccgcagcccgcctgggcgccgcgggttagccgcgctgattcgcccgcttgccggagtgggtgggggtggcgggcgccccagtgctgccccagtctggttcctagtctctgccgaggcccccgagctggaagccgagcccgagggccgcctcggcgcctcgctcccaaggctgctccccctggggaggaaggccggcctggaatgggtaccctctggcctggcactcggactgggcgtggcccgagcctcggcggaccctcggaagcccaagcgggcttcggagcaacggtagggagcggggcagaggaagccgccagggtcgacccccacccactcaccacggcctccagcccaccgcagctggaccttttttcctttgaaaaggcaggcagttcaggaatgaaggagctcgaagagaaatctctggagcactccatctcccacccccaaaagaggttttagaaatcatttctttagctgcaggcgggcataaaaccatctaccatcaatgggccccctcatccccttgcttttaacgtattacattcctctacataattatttaaagtcacgggcggaacggacttaaggttttgttagttttgttttttgttgtttttttttaagaccccagcc

SEQ ID NO: 33790 - DNA, 1294 bp, Homo sapiens
aagtgtttcgcatccgtttttctattacttccatcctataccgactagctccacttaacatgtggagaaactgaggtcggagtgggggcgtgaccaggccagcctaaggccgctgcactaatgagaagctgagctctcagatttttgcctccctgtccctgccaagtcgctgtttcctgggacaagagggagcctcactgaaacgaactccggtctcaggggacagaatcctgaaaccctggctctggggtccggggcaggggtgcgctgcctcaggacagacggtgaaactgaggtccagagccggacatccaccgcctgcggagggaacgagaacgcggcgcgtcctgccttgcgggccgagcggcgccagagccgcctcctcccgccccccgcgctagatccccccgccccgtctttgccctcgcgacgccgccacctccggaacaagccatggtggcggcgacggtggcagcggcgtggctgctcctgtgggctgcggcctgcgcgcagcaggagcaggacttctacgacttcaaggcggtcaacatccggggcaaactggtgtcgctggagaagtaccgcggatcggtgagtgcgcggggtctggcggcgccgctgggcccggcctcgccctggcggggcctgctggggacgccccgcagcccggtcccccgcgcggtgtggctccgaggacgctccagccgcgcggccgccaaaccccggcccccgccccgctcggccgtgacctctggcgcggcgcccccatcccgcgcccggcccggcccggcccgcggctacgtggcacggccttggcgcggaggaacccgaagcgctcgcagtcggcgcccacttcgctaccggcacctttgggcagcggggtccagaccttcgccgggaggccgggcaccactgcccagcctttgccattcacgggtgaaaaaagtaaccgtagcatcgtgcggcctttccctctcccgtcctcattttctgcatctggaacggggagtggctgattcggagtccagtgaagaacactgtggagatcaatgtgcagggcagagagagagttatttcagatgcacggagacctcacacggatcatccctgggagagggcacaaaggcccagagagggcaggcattcgcacaaggtcacactacactagaaagacggggcctggaagagaaccccaccgccacatccggggtcctctctaggccaagtccttagatggcagctcaggggcacacataagagtcatccaggctaattgccccctcattaccaagag

SEQ ID NO: 33791 - DNA, 1452 bp, Homo sapiens
tatttttagtagagacggggtttcaccatcttggccagaggctggtcttgaactcctgacctcgtgatccacccgcctcagcctcccaaagtgctgggattgcaggtgtgagccactgtgcccggcccaacaatttttgttttctttttttttgagatggagtctcaccctcttgcccaggctggagtgcaatgttgccatctcggctcactgcaccctctgcctcccaggtccaagcagttctcctgcctcagctggctacaatattgcaaaggttttacagggaccaagtttcttctctttgagctagaattatatcagttccagggggtaattaacataggtgctctcctgctgatcagagctctttgattaatacagaatggaaaaaattagtacttaataaatgcagtctattatgtagacagaatccttcagaacttggagttcaaagggaaagaagtagaaaaattaggccagttgtattttctacaccattttatgaagtagtaacagatctagagaggtgaagggtttggcacaaagtagcacaatgatttaatatcagaatgaggacttgagccaaggtcttgtaactcctggaagcccaagggattccccagagccctggctggccagttgctcagagccccataatgtgagatggactttgaccaatcagatgatcagaggcaggtgactacttcagatctgggaaccaggtcatgtgaggattaggtaaagagctggggatagttggccttgaacagaggagactctgggctcacagcctagggcctcagatctctgcaaggttgttctgggacaagaggatcagacatttttatgagaatcgagagaacagagctgaaatcagtggggaaagccatagggagatggatgttgagtcaataaaggtagaacttatttagagtatacctgaaatactgcaaaaagaactccatcactctgggccatatttcactcacaaattcgtaatcctttacaaatttgttttgttttttaacaaacaagtttttttgttttgttaaattgttttgttttgttttttaaaaaagcacctctatccatggaaggtaatcaggaaaaggctaaatatgggattcagctaaggggattcttgtattgaagagaaggttgaagtaaatccctgtacaagttggaatgccttaaaatgaaagcttaaataacaaagaatcccaaggagtctataaaacgtgcacaaaataacctgttagaacaaagtgtgtttgggccgggcgcagtggctcacacctgtaatcccagcactttgggaggcccaggagggtggatcatgaggtcaggagattgaaaccatcctggctaacacggtgaaaccccatctctactaaaaatacaacaaaattagccgggcttggtggcgggcacctgtaatcccagctactcggg

SEQ ID NO: 33792 - DNA, 491 bp, Homo sapiens
cgcaaaggaatcttagggcaagatgctgactgtcagccctccctcctggctgctctcctaactttggcgatggcttttaggcttcgccttcggaatgcaagacaaggactgtggagacgcagctcagcagccaccaaaagcagctcttgacatttcagacagtgacatgacctgctgctggatttggcaacagtgaaagagtcactcttagatacctgtgcctgaggccagccaaagggtacatgatggggtggcaagacagggtgagtcacccacagaagtgttctaggctggaagtcaagagattttggttctggtcttgcttcatttgttgttgttggtggtggtggtggtggtggtgtgtgtgtgtgtgtgtgtgctcttttatttcagcattttttttttgagacagtctcattctgtcaccaggctggagtgcagtggagatcatagctcactgcaacctcaaactcctgacacaagcaatcctt

SEQ ID NO: 33793 - DNA, 954 bp, Homo sapiens
tcccaaggggctccaattgtcagactgttcaattctgaaattttctattgttaacatatgtggtgctaaaggtctgtaattgtggaatcttgagcctgattctaatcctgtgaaaccagaatcctgtgaatctgacattctgtaactctatccaagtgggaggtcaaggtctgaaggccagggcagggtggggacagaggtcagcaggaggatcccactcccctagggaggagcagttgtccccgatgtcttctacctgggctcacccttggagctacagcctcattatcattcagacttatcatgagctcatcacccttcctccaaccagccctccctggggcctcattgtatgcattatccatattcattacacatttttcttccattaagtcgaattaagccactttgccaacactgcaggaaccaaaatctccctcaataagtatgggccctattggggcccagaggaggccctaagttaggacaaatctacccatccccacctccctcccatccttcttctcaagcaccatccccccccacttccctgtaccccagatcacatggaagctgcagaagcactcctttctgcaagttctggtacatggtgttccctccctgatggcctcacaggcagctgctgactcaccccaggttgctaatgcatcaggtagccatgtattccgatggagctgcttcataaaatgtagcagcgtgtgcatgtgtgagctcacatgtgtgaacatgaccagagcaccggccctgggctgtggacttgagacctggattctaggccaccactatttacagggttaccttgagctaatgccttcctctctgtctcaagagaatatcccagcccttctggcctcactaggttgtttggatacttacgaagaaatgtgttaataatacattgttctacaatgtgttatgaagtaaagtgatatc

SEQ ID NO: 33794 - DNA, 1683 bp, Homo sapiens
atttaaaactgccctcctgccctcctgacacccttcacccagtcttttttccacggcacttactactttctttttatttattttttttgagacggagtctcgctctgtcgcccaggctggagtgcagtggcgcgatctctgctcactgcaagctccgcctcccgggttcacaccactctcctgcctcagcctcccgagtagctgggaatacaggcgcctgccaccacgcccggctaattttttgtatttttagtagagacagggtttcaccgtgttagccaggatggtttcgatctcctgacctcgtgatccacccgcctcagcctcccaaagtgctgggattataggcgtgagccacggctcccggccggtacttactactttcgaacacgatttcatgaattacctgaggcttattgcccgactccccgcactagcttggaagctccacgagggcagggagtttcatctgttcaccgatggatccccagtccctaacccaaaagccccagcacgtctcttcctacccgccccggcctcctggctcggtcttcccgggacacatcgcccttcccaacacacgcggtcaccgcgatccacagaccccgtcccccgcccgccacgtgattccttctccagcctctcagaggtcgcagaccagacctctccgggcacgtccctccccgacgcgtcgccgggctgcgctggagccgctcaccgtccgggtccttctcgtggtagcagtggtagttgcactccacctccatgttctccaaaaaggacttgacctgctcctcatcctggaagtccaccatgccggccatggttcgcgccggcccaaagacggtcacgtgagccggcggagggggcggggcggggcgtggggctgacgccgacgccaaccgcggcgctctcccgggatcccggggcgagccaagcgagcctgtgcttcccagcagccatcgcgccgttaagggcgctggcagccacgcttccagggctaccgccttcctgaaactgggggctgtctctctgcagcaccttacctatgctcgctttgtagccttagtgattttccacctgcagtcatttatctatgtataatccctaagcgcctactgtgtgcctcaccagtgcattgttctagggatatgacagctaggaatatggtccctgccttcaaagaacttggagttcaataggaagacattcgcttatccattcagcaagcatttagaggagcttctatatgtgccaggtgtagctggacaaagtgcagtgagcagtctgattcatctgtcttcttcccagacctgtcttggccaccaacatgaattacctaagcaatgaatggctatgggagatgttgactggcacacagtagcagtgaagggtgtagcaacgtcactgttataacacctagtactcaaacagtgctgaactttgttccaggctctaaatgctttatatgaattaactcatttaattctcattatatatcatgtcactgtaaaaacactcacagtgacactgtgggtaggtattattattatccccattctacagataagaaaactaaagtacagagaaattaagtagtttgtccaaggtcacacagtaagtgagggagttggtatgcaataataattttttttaaaaaaataaaagaatgaatgaggccgg

SEQ ID NO: 33795 - DNA, 825 bp, Homo sapiens
cccagacacaacaattacacacattcaaattagatttagatgctcccattttggtgttccacaccacttggtttattctggtatagtgtagtaggaaagaaagaactggctttggagtggggacagatcttagttcagaatccatgttccatgtttattaaattgtaaccttaaaccaatcatgtttgtgagtctgaatcctcttctgtaaatgcagatccatttgtaatggctgtcagaaggactacaagttcatgtatgcaatgtgcttggcagagcgcctggctcaaagtcattcctgttccaggaatgtttcttgtcatgccaataatggcatgaaagtctgtgttccccaccagactgtgacctctgtgtcctgtatgctggtcacagggccaagaatagaatagggcttgatgatagaatagagcagggtgatgtcgattactaaaatctgggaatgtttccctttattttctgagttgaactgcattgaaatgagatcacctgagcggtagagggcacaagagagttagttggtgatgagaggctcaaccaagtaagaggtcacttttttttgttttgctctttcatccaggctagagtgcagtggcgtgattttggctcaccgcaacctccgccttacggtttcaagcaattctcctgcctcagcctcctgaatagctgggattacaggcgcccaccacaatgcccgcctaatttttgtatttttagtagagatggggtttcaccatatcggccaggctggtctcgaactcctgacctcgtgatccgtttgaactaactgttgcctctgccctagag

SEQ ID NO: 33796 - DNA, 1719 bp, Homo sapiens
gttggcatcttttcatgtgcttatctgccatctgtgtatctttgatgacatgtttgttaaaatctttcgccccctttttattggattgttttttattattgcattctaagagttatttatatattcaagtccgttatcagaagttttgcatatattttctcccagtttggcctgccttttttgtttttataacagtgtctttcaaaaccaaaagtttttcattttaatggtgtgtctagtttattgatttttttcctcttgttaatagtttgtgctttttctttcgtattcaagaagtctttgccaaacccaaagtcactaagattttatcctatattttcttgtagaaattttatggtttaaatcttatatttagaaagcctatgatccatttcagattaatttttgtatgaggtatgagataacagttgaggttcactttattgcatgtgggtttataattactctagcaccatttgttagaaagattatccattctcggcctcccaacgcgttgggattacaggcgtgagccaccgctccaggcctcgggataggtcttaatacctcctttttataaaggaggtccagataagtaaagtgatttccaccaggtcacacagcccgctaaacctctcccaaagggttacacgttggtaaaggagccgccccgtgagagagaccggaccaatcacgtttgctgtgaggtcactttggaggcctgagattggtgctcgtgtctaaacggacccgatctttctgagtggctggtgcagctgagggaggttccaggtggcttgctcgggggctgcccagctcgccgtcctctgcagatcccctcgggactctcagcattttgtgggttagccgtggagacgccctgcccttcctgctttggccagtcaaccccctcaagcccgtgcccgtagagcctgcagcccttcctcacctcatcactccccatccccccaagatatagaaaggccgtgacagctgccagccctgcacatgctcttgtttcaacagcggcgattgcacatcacgtagtccccacgtgacctgtcgggcctagggcaagcgcaaagctttcggaaacccgaattattgcaaccttgacttcctgcctgtctctgaggctcccgggctgtgctttaagctggacaggcacctgctttacagggaaaaggaccaaggtccggagaggaaaggggcttgtcccaggatacgcagcaagttagtgacagcgtcatactcttccctctgggcaggcacctgtagtcccagctacttgcgaggctgaggcaggagaattgcttgaccccaagaggcagaggttgcagtaagaagagatcacaccactgcactccagcctgggtgacagagtgagattctctctcaaaaaaaagggccaggaggccggtgtggtagctcacacctataatcccagcactttgggaagctgaggtggatagatcacctgaggtcaggagttcgagaccagcctggccaacatggtgaaaccctgtctctaccaaaaatacaaaaattagctgggcatggtggcgggtgcatgtaatcccagctacgtgagaggctgaggcaggagaatcacttgaactggggaggcagaggttgcagtgagttgagatcgtgccattgtactccagcctgggcaacaagaatgaaactccatctcaaaaaagacaaagaataaaatta

SEQ ID NO: 33797 - DNA, 2199 bp, Homo sapiens
atgagactcacgtgccagagcacaacgggcatgtgttcaccacctaagctggctggctcggcttctgattatagccattcccataatgtgtgtgtggacccagctcactgcagcatgctcatggaaatccaaatgaggaagaagggttgcaacaccaaggacaaggaagggatcaggttttaggacaaatcatctcaagtcaggggtgagatttactgccttctaaaaaaagctcacaagatttcaggctgtgaccccaaaagtctattcctgagccctcctgcctgcacataaaaactgacacagtgaggtgctcagcccatgttgttgagtgaaaaaactaatctggacttctaaatgtaaccaaatactgactgtcagaaaaaagcagttgtgccagtagagaactggaactaaatgtcacatggcattaaagtctacgcccctaacctttggccacaaaccttgctatccgccccagcctgcctttccagcttgttctcttccctcccatacacactctttgaacctcatcccaaattatttgttgaccctataaacatcacctgctttcacgttccagtgccttcacacatgtgattccctatgcctagaatgctcttccctctccgttaattaaggtaattatttttccttcaaaacccaggtcaaggccaggcacggtggcgcacgcctgtaatcccagcactttgggaggccgaagcgggcaggtcacctgaggttgggagttcgagaccagcctgaccaacatggagaaaccttgtctctactaaaaatacaaaattagcagggcatggtggcacatgcccataatcccagctacttgggaggctgaggcaggacaatcgcttgaacccagaaggcggaggttgtggtgagctgagattgtgccattgcactccagcctgggcaacaagagcgaaactccgtctcaaaaaaaaaaaaaaaaccaacaacaacaacaacaacaacccaggtcaagtagtgcctgtttcaggaagcctgctctgaccactgactgcccccaccaccaggctggttgcctctgtgctttagcaagtgctctgcttccttttttttttttttcttttttgagacagggtttcactacgttgcccaggctagagtgcagtggctattttacaggcatgaccatagtgcactgcagcctcaaactcctggactcagtctatcctcccgcctcggcttcctgagtaactgaaactacaggcatgagccaccacacacaaacatgcttctttttataagagtacttaccatgttctttttctgttgtcttccttcccttcctactagacttgagtaccttgagggcagggcctgggttttatctatttctgtgtcctcagtgtccagcacacagcatgacacaaaggagaggtatttattgagcacatgcccagtgaaaagaatgtgcagtaaaagagttatcatcagttagggaatttactcccacactgccaaggaattcctagtttaggaaaggctctttttgttggagaataaattatttacaagcatctgacctcctaggaaaaggctagaacagtgaatagtagatgacaggtgagaatgactagggaagtataattttatcaccattccaaaacacacatacattgttcctggtagatgcataatctgtaggagatggacacagcaccctcttatagaagagtcccctgggccgggtgtggtggctcatgcctgtaatcccagcactttgggaggccgaggtgggcggatcacctgagttcaggagtttgagaccagcctggccaacatggccaaaccccgtctctactaaaaatacaaaaattagccaggcatggtggcacacacctgtagtcccagctactcgggaggctgaggcaggagaatcacttgaacccaggaggcagaggttgcggtgagccaagatcatgccactgcactctagcctgggtaacagagtgagactcaaccctgtctcagaaaaaaaaaaaaaaagtgggggggtgggggccagaaaagagacaagggcataagcattggatcgccatgcctttcttggatgtgctgaaaaggttcagccttaacatagattgatggtggacaatccaaagtgctgaacagccctacaagattcctgctcgatgccaggcttttcaaaaagaa

SEQ ID NO: 33798 - DNA, 1504 bp, Homo sapiens
ttcatattttgaagggatgctaggatttgggggtgtgtggctcctttaagggcctgggagggggagaagctggaggtcgggctggggggggcgggaccccctcgtctgagtctgcgcattgagagcggaggcgggtccaggcgcgggctcgcgcgcccgggcgggtcctcgcgggggcggagtctgcgctctggttcgggctgcggctgcggctgcggctgcggctgctactgctacgctcctagcttgagggaaagaggccgaggcctgggccaagcccggagccgccgctcgccggagcctcctggagcctccgcgccggctcagcctgggggcgggctccggtccggcccgccgccgcacccaggacggaggctgcatgcccgaggaccaggccggcgcagccatggtgagggagcaaggcctgccctagccgcagccgcccgccaccctagcccccgcccgtcgcgctggcccctgcggtcttgcccctccctgtctctggtgtcccctcgggctccctgcctttacctctctccctcgttaccgccccctcggtgttcagctcctccttccccattcacctgcttcggtgaacccctttaggtgacaccccctgaatctcccttctccccgatgacatcctttttatcacccccagtgacagcctttttcgcattccctttgtcgcccactccttgtcctttaaccctaacccttcctttctttctcctctatcattttgccttttttcctcttatgtgatttttactttcccccctttcctccctagttttcgctgctcttccttgctcttctcacccctcttcaccattttatctccactgcccccttctctccgtgttccttctccccttcgtcctcttccatccacgtttcctcttcccttatcggatgtcctcgctcggttcgccgtcgcagctgtccccatttccttctacgggcttcaggggtctaagcaggaacaatttgaggactgttgcttcccgggagctgtagggcgggcagatagggatttataggtttgcttcttccttttcgtttttggaggcattgaagagatcctggaagcctattcacctagtgtcattgcaaaatcgaagtggtggtgtgttacagagcagtgaagtgagggccagcatgcatactgtgacctcaggagagatctagtcttttgacagaaatagctaaaaaatgttttgaattttttttattttgagcatcttttaatgtggaggtgcagttggagaagtttaaaaatacttatttacaagcttggctattattactaaaaacaaatgatttgttttcatttggaggcagagaccaagggcatttgaggactgacaatcaggttggcaggttgtgacagtctctttaaaccttctaaagagttcatttgttttgccctgtctgcctttagttgggagaaccttatatttgcaaattttctttctgtctgaaaataggttgaggcttcagt

SEQ ID NO: 33799 - DNA, 482 bp, Homo sapiens
gctaggaatttgttctatgctcttgaaatacaaaaatgaacaaagacatggtgtctgcacacaagaattttatatccttgtgagggagagtgaatgtggatcagataaaataccgttatgccaaatgtccatagaatgttatgaaattaaaggtgaagcccagtggggtagcacatacctgtagtcctgggaggatcacttgagcccaggagtttgaggctgcagtgagttatgattgcatcactgcattccagcctgagtgacagagcaagactccaaatgtaaatacacacacacacacacacacacacacacctttcagaggaagtgagttgtgacctgagtgttgaaagataaggagaggcaggagatttttaggaagaaaaagcatcgtattaatgtaggaaggtctaaaataaaatgacacattgaaggaattagaagtagcaccagatttgggccaggcattgtggctcatgcct

SEQ ID NO: 33800 - DNA, 1224 bp, Homo sapiens
ggtcctcggggaatatcctctcaagccctgaggtgcagggctgggaaggagtgggtgagcggctgggtcgtggcaggttggtctggggaggctggggaggctggggaggcgggaggagaacggttggccccggcagcggcgtgtcggagggcggatggggctaggaggccgcccggggggtggggtctgcggcgggccggcccccgcgtgcgcgtcgcctcgccgggcatttcaaaagctcgccggcagggcgcggcgctagctccgtgtgcctcgcaggcgtggtgggcgcgtcctggcagccgcccgcttggttctcgcgggatccgggctccggctcgacgccggctctctttttgacgccccgccgccggggttgccatggttcatttcttgcacccgggccacacgccccggaacatcgtccctcctgacgctcagaaggatgccctgggctgctgcgtggtacaggtgagcaccggggtgcgggcggcgacgcggacctcggcgccacgtccagctccggcgagcgcggcgagtctcctgggacgctgccgaggcacttgctggggagtgtggcccgcgcggggctgcggtctagatgccgagccccttccaggcgcaggcgtcgctgcggaggtgcgttgtcgggggaggcggcctgggcgccgcggagcggggggtgcttttctgcgcccggcgaagcgcgtggaacttgcgccctgaggcagcgcggcgagagcccagtcccagagaccggggcgagcctcctcaggattcctcgccccagtgcgggctgctgtgagcttagacgtaggtgcagggcatggcactcggcttggcccgtagtggacggtgtttttgcagtcatgaacccaaacgccgcaaaccttgaccgtttccccacccgtgttgtggacgcagcgccccgcggaggcggtgaccctttggccgttaccacctgaggcctttgggcccggggccgggcgagtagcttagtccggctgggggaactggaacccgaagtctgagattctttcagttccgcgcgtccgcccccgtccccgtcccgtccccagcctttgccgaatgcctgttactcttagctctggacaaaatgcaaacccaaagaatgtgtgtttagcgcctgctgtgtgttaagtgtcgcctttcttttctttctttctttttttttttttttttgagacggagtctcgctctgtc

SEQ ID NO: 33801 - DNA, 2274 bp, Homo sapiens
agaccagcctggtattttggtgcctggacacctggtcagttccttctctttgacctgcattgtgtagacagaagctactttcatgcctggagctacacatttttatatgttgctcctggggtggcaggagagagcggtggggggagaagggaagacattcagactttgcctaactgcatccaagaaggctgctcctaatcaccaggtcagtcacctgagaaaatgatcagttatcttctttatcccctcccattcttcaaacaaagctcaattgctcagaacaagtaatgcaaatttggctggtgccagtattcctgcccaggcacctttgtgattagctcagccattgacaaactatccctgaggctcacctttttccgaaacatggtcgataaatctgacttggacagaatgggaagactggacattgctctttgacctccttggctcgtaacagcaattgctctgaggttggtcaaatattcccaaaatgaaggaagcaggttctgacaggtcacagatactacagcagctaatggctgcaccaggaggggaagcagcttctgcctgagcaccctctgtgctctgccttgccttagttttgcttttggttggaagccaagaacagtggctgactgcagaatgtccagactcaccctgtttcactcacccctgactccctagccccaccccctgcccccagtcctggcccagtacctgccactcggaggtcacaggccagggcaagctctaggcctccgcccaaggcaaacccatccatagccgcaatggtgggtgcagggaaggctgctgtggagaggaagaaaggctcagcctgcaaagccctggtgggaccaggacagagactcaaggctggggaggggcaagctggttgggacagaggcctcagtggacccaggtctggggacattacatggaacctcagccaggttatcttaattcttttttttttttttttttgagacggagtcttgttctgtcacccaggctggagtgcagtggcatgatcttggctcactgcaacctctgcctcccaggttcaagtgattctcttgcctcaacctcctgagtagctgggattacagatgtgcgccaccacgcccagctaatttttttgtatttttttttttttttttttaagtagagacgggggtttcaccatgttggccagactggtcttgaactcctgacctcgtgatccgcccgcctcagcctcccaaactgctgggattacaggaatgagccactgcgcccggcctcttttttttccttttttctttttttttttttttgagatggagtctcgctgttgttgcccaggctggagtgcaatggcacaatctctgctcacgacaacctctgcttcccgcagccaggttatctcagaagccaattttccctttagggaaagttacagaatcagccagggaagaggaatgggaggatgggctggatgatccctgttcaggcctaatccgctggcctccctggggcctccctttctttgtgccaagccctgtgctgggtgctgggaactgggaacacagaatgaatcagacatagcctttgttcccatggggctcagtctcatggggaagacaaatgtgtatcaggcattattgacccaggatcatcagtgctccaataaaaagctcagagggtgggttgggaaggcttcctggaggaggaggtactggagggcttgaaggacaagtaaaagttcaagtaaccaagaaggggtatctcaggcaaaggtaacagcaattgtcaaaacttgaaagcatgcttggggaaacttaactgctttggaatggccaggcttgaaccctgagggtggggcgggacacaaaagctgaagagccagaactccctctctgagagaactgccctcggtcatcctcctccatccccctgggtgagtcatctgtcttatcacagaactccaaacagaaagaagactctccttagatgctggtgggggtagcgggactgtcatcggcagggacccccaaaccccctcctccaccccacacccagatcctcaccgatgtcattcatcaggccccggagtcgctggacaaacacccccacctctgcttcactcatctgttcccgctccttcaggtctgcacctgcagatggcgagggttggtaccagcccttaggaaaatggcactttacggaatcccaggcggttaaaggatccagcaaagaagacctgaggacaggcagccagcgaggaaggagaaacac

SEQ ID NO: 33802 - DNA, 1197 bp, Homo sapiens
ctcttgttaccttggctcaccacaacctccgcctcccaggttcaagcgattctcctgcctcagcctccggagtagctgggattacagcatgtgccaccacgcccggctaattttgtatttttagtagagatgaggtttctccatgttggtcaggcttgtctcgaactcctgacctcaggtgatccacccacctcggcctctaaaagtgctgggattacaggtgtgagccaccacacccggccatttctttataattttatcacccaggtgtgcatccttaggtatcatagtttagacttgctaatttctaaaattgccgtgtatcttttaaatcctggtacaacccccacatgctccccacaactctgtctttccctcagagattatctgtggaggagcctggggtatttgacctacagggtttctcaaagcctgggttttgctaactgcacaatcacggggacagatcaatatgctcctctgtcacaataaattagcaactaaatacagaggcttagtgttctgtcctgtttggcaagacagtaatcctggccctacttgtgtaatattctttcaccagcaacagccaagcttcttggtagttttctatactcatttagtcactttcttaccttccattcgctcaaaccttctccaatctaggttccagccccatcactcagcagacattattctcattaaagtgatgaatatagccacatcactaaccaagggacacgtttctctccttgcctcaacctcgtggcagcaaaaacctttgctgacattaacacactccacttgatcgttttctgctttggcttcttagaagaatatttatttgtttataaatagatgattttcttagagcagttttagggtcacagcaaaatggagtggaaaatacaattcaatacagttcacctatactccctggccctacacaggcacagccccttccgcaatccccatcccccaccagaggcacgtgttgcaactgacgaacctacactgatgcactgtcgccacccgggggccctagtgtacactggggttcgctcttggtggtgtacactctgtgggtttacacagatgcataatgacacgtatctgccttggctttggcaggcccccattctccttcctcctacctttcaggtgatgcctctgcactccttcactgcttctcttctgccc

SEQ ID NO: 33803 - DNA, 1220 bp, Homo sapiens
gagtgacccccggccaacaatcagcaagagaacaggacttcagtccaacaaccataggaggtgaattcaggtctcagcaacctgacgaccttggaagcagatctttcccgtcaagcctgggatgagaccacagccctggccaactcccgactgcagcccagcctggcaagacctgaagcagagaactctgctaagttgtgccttgacttctgacgtacagaaactaaaaaatgataaatgtgtgtgactttgagtatcaaagtttgtgatcatttgttaggtagtaatagaaagctgatatagccgtggtatcctgggactggcagacactcctctctctgctttcctgttctttccttccattctctctggctgactgtctctcatctttcagcttcatctcctgtctccacctacatctccctctcggaatactgactgtcaactcttacaagcccttagctcaagccacaactcagccacacaccagccccatggccttgggcaaaccactttacccttctggccttcaatttcctgatctgtaagagaaataataaaaaggttattgttaggattaaaagagataatgcatttaagtgtctaaccagagtttgtgtaaaacgcccagatactagggcaagtctcggacctaatacagtatctgaactttaagctgggagccccccaggagccaggcagggtgtctttggctgccgacattcaattgtgcaacatttaatttgcactaccacatgccaggtcctggagaaatggacagtaatcagccaaggtccctgtgttcttagtctagccccgatgctgggaacattgcccttctgaccccaacagcggggatggggctgtgctgcacccttcccactcttaccaaacctaccataccactgagcagctgacctaggatcacttctgtccagatggcttgggtcacaggcgaggtgttgtgggtagaagtcaacagaaaccactagaagggccaggcgtggtggctcacgcctgtaatcccagcactttgggaggccgaggcgggtggatcacctgagtcaggagttcaacaccagcctgaccaacatggtgaaaccccgtctttactaaaaagacaaaaattagccaggcgtggtggcacacacctataatcccagctacttgggaggctggggcaaagaatcgcttgaaaccaagaggcagaggctgcagtg

SEQ ID NO: 33804 - DNA, 3438 bp, Homo sapiens
aatttatcattgaagaaagaaacatttgtaaagcaaatttagtgtagcctaggtgtacagtgttatagagtctatagtagtgtacagtaatgtcctaggccaggggtccccaacccccgggctgtggacccatcccagtctgtggcctgctaggaactgggccacacaacaggagatgagcagcttcatctgtatttacagcagctccccatggcttgaattaccacctgagttccacctcctatcagatcagtggtggcattagaatctcataggagtgcgaaccctattgtgaactgtgcatgtgaggaatctaggttgttgcgagctccttatgagaatctaatgcctgatgatctgaggtggaacagtttcatccccaaaccatctgtccgcccgcaagtccatggaaaaactgtctttcatgaaaatagtccctggtgccaaaccagtccctgctgtcctaggccttcacattcactcaccattcactcgctgactcacccagtgcagcttccagtcctgcaagctccatttatggtaactgcccagtacaggtgtactatttaaaaaatcttttagactgtatttttactgtgccttttctatgttcagatacacatttaccattgtgttacagttgcctacagtattcagcccggtaccatgctgtccaggtttgtattctaggagcaacaggctatacaccatgtagccttggtgtgcagtaggctaccccatctaggactgtgtaggtgcactctgtgatgctcccacaatgaccacaatcacctaatgatgcatttctcagaatgtagccccgttgttaagcaacacatgactctatgagaaataaagccgctaagaacagtgaagaatggtttaccacccaacctcaagctcaaaggcagcaggtaaaatgtaacagtgctcttgtgccatcagccccagtggaaggcagaacctgcagcttctaatatgaacatcaaatgaccccaactcattccctgtgagggctccgtgtgtgatctcatccccatgcctcctctgcactgtcatcttggtttctgtctctccttctctcactgccttttcctgccctttgagccctctggcaggggcagaggcttaatctgctgatccttgtcattcttttttggataaaatgattcccgatatttgcaagtgagcctaaaggtctttaacccatgataattttgtgtttacacatgtacaagtctgtattttgagtcactgaattactagaagagccagtgattacctaatggttgagaacacaggctttgaaatcagacctggttcaaataacttaaccttctgtgcctcagttttttaatctgtaaagtggggagaataatcttgactgtcttaagagctgttgccagttgggtagtgaactaagcatgagattgggggtataaggttcagcaatattaactgttcaaggaaattctcaccaagtggtgcagtgggactctaggtggcctgtccgtgtccactgaaggtggtagatgcacacttgggaacagtgggcaacagcagggagcaaggaactggattttatggcaaagccccgcttcaaacttgttgtcaagccggtaaaaaggaagcaatactgctggggaaggggcggcaggcgccatgtccggccacgaaggtggcaagaagccactgaaacagcccaagaatgcaggccaaggagatggacgaggaagataaggctttcaagcagaaacaaaaagaggagcagaagaaactcgaggagctaaaatggaaggccacggggaaggggcccttggccacaagtggaattaagaaatctggcaaaaagtaagctgttccctgtgcctaaggagatggtgaccctttatttcatcagtatttaaacctctctattccctgccataacatcttttgccacctatggctggaattaagtgttgtcttggagctgttgtacatttaagaataaacttttgttaaaaaaaaaaaagaagcaatacaacgaaatgtacagtacaatgccatctgtgtatcaaatgcaggagacaggggatgagatgcggggaggagacccaaggcaggagaagcgcctagccctgatggttaccagcagaggactgaggagcgttatcagcaccactgaatgctccagaagttcaaacaacaacaacaacaaaaacgcaacacgcgatcagaggcgttttctgccagtgacccgcgaactttgccccccacccctcgtccccgctccatactatccttgatcttggccaaaaggcggagaaacagcgaacttttccctggagccagaaggacgcaaaggttcgctagcggcccagggcgggcgcgcggctggagaggcaccctcctcactctgcccgctgccgcactgggcactgggactggctccgctgcctccgcccccgaaccgggccaggacccttggcgggggaggggaacgcgcacttaaacgctcctggcctgggggccgcggggcccagtcctacccgtgcggaccccgctcccccttccacacagtcggaagaccccaaagggcctttgaagagaccgaggttgccagaggccccccgcccccagctagagtctggagccactaaggcggccgcccacctctcaggcctggagcggtttggggcgcctagaactgggagggagggactggggatcgaatccttcaacgcactgagcggcccacctgccggtcccccgctgcctccggcctagtcccagtcgcgtcatgcgccgccccggaactgcacatttaccttggtccggacccgccagggcgcgcacttggatctctgagcccccggccgccccgtcggaagcgcagccgcgggcccgaaggggcctccaggggcgcaggaggcacagaacgcgcagcatcggggcgcaggctgggagtgaaggtgcttctccggccctgcaccgtctcggctcccgctgagagctcgcagttccggcgtcgggcgaagccttcgccaattgctccacctatgggccaagcgtctgttgcctccttccgcacctcccggggacagggagacttgagcggaggaggtcgggggaagcccagctcctctgtgtgatttggtgtaactctgtcaacctcccagcgtcagtgttttaatcctgtaaaatggggataatagtgactaccccgtggtggtgtgaagattaaatggggtgtgtgaaccttgcttgcacatatgctcaatttcattttttaaatgaaatgacatttaatgagtcccttgagcgtgtctacacttgcgaacctcactgcttcacctcccatttgcgcctcactttttttttttttttttttttttgagacggagtctcgctgtgtcgcccaggttggagtgctgtgccttgatcttggctcactgt

SEQ ID NO: 33805 - DNA, 904 bp, Homo sapiens
cctactcaaatctcctgataaacttggttataatagggcttcatggggatccaaacatttttaataatgttttgaagcatcttggtgtgggacaaacagctcaggctaccccagagccccacatccaatgacttagaaaagtctgtgttttatagtgggaaaagtttggattatttagtccttcacattggaaagggaagtgttttttctcagtcttttcggtattaacaaataccttttatattactatctatcccctctgccctctatggactcttattttgaaagcaatatccagtggacagccaggatttgttacataacaattaatcttgaccttaggacttgttgttctattaggttggtaactttgtctgatccaccaatcatattgctgtcttgtcagtccatcagtttcaagaaacaactgtacatgtcagtgccctgatttgtgtttgtttttcttttttttttttttttgtttcgttttggttttttagagacgtggtcttggtatgttgcccaggctggagtgcagtggctattcagaggtgtaatcatagcacatttgtagccttgaattcccaggctcaagtgatctttctgccgaagcctcctgagcagatgggaggcgtgcatcactgagcgcagcaattttactaagttggtctagtcctagctcagtagttctttacttagcacagagggggcttcttagaatctcctaaacttgatcttagccaaatggccaagaagcaatccttagaatcttctaggagagcctttctaaatgctgatactgcaaaccgaaaagtatatgaaacggatctcaattaatttagaagttaattttgccaagtttaaggacgtgcatcatctttggagacaggtccgtgcctttctc

SEQ ID NO: 33806 - DNA, 1884 bp, Homo sapiens
tctactaaaaatacaaaaattagcggggcgtggtggcgcgcgcctgtaatcccagatactcgggaggctgaggcaggaggattgcttgaacctgggaggcggaggctgcagtgagccgagttcgcggcattgcactccagcctgggcgacagagcgagactccggtctccaataaacatggaaggctgtttctccccggtttgctggaataaagtctctgtcttccaaattccttttcggagaacttttgttcacaagattaaaaaggtcacgcagctggtgacggagcctgggttttttgatttagacattgtatccatgtgtgagatcctgcccatccccgctttcttggtgtcctgtgagtttaaattcatgaattcactctcaactgccaccgctaacaggacacaggccaattccaacacgaaccccaacggctctcctcagggtcacctttcatgagtccgctttccggccaacccctcctctcagtcttaggccccactgcaagcctactcccgctcaccgtacagaacctaagcacaggatcagagatggggacaggttgactcagtcccatgcccaagtccgcaaattagggattcggctgcctaagggctagagaacgctccccgccccacaggacgcgccccaccccgccccctcctcctgcccctacgcacgcgcactctcacgcgcctgtgttgccgcccgcggccctggcttcgggcttcagggagctctggtgcagtctccgcctgtcagtgccggcagtcgtccgcggcgcccgccccggtcccgcactggtgcagccatgtcctcttccccgtgggagcctgcgaccctgcgccgggtgttcgtggtgggggttggcatgaccaaggtaaaccgagcagcggccctgctggccctctgaggctcgggggcggtcggtgcctgggtttctctgtccctccggtctcctagcttcgactgctccgcgcgtgggtcatcggcgtggcgacttggtggcttgtactctgcggaatctctggggtcatagcgtctcgggctggttcctgcggccttctgcttcctccttcccttttcttctggtcagagttcatgaagcagccccgagataatccaaggatctcacctctttagattctgagcggagtcccgaggtgtgtgggctggcttgccccggagggaggcaggtcgcgaatgccgcctgctcggccctcccaggaacagcccccacaggagccctcacagagacagctccagatgtggatggcgaggagaaacgctcctgatgcccagcgcctcggcccgagtggcagattccggcctccctctgtccctccagtgactgcttgggacccggacgccgcaggctcccacggccgttttcccctcatcgcccgcatgctccttaatgccaaactgcctttcgtttctccccggacgcagttgtctgatgcctctgttgctttgcttctgttctgtttgtaccgtgtatcttcacctgttaacttttgtgcatcctgaaaggatccgttcagatcggatcttctccaggacgcctcggatcctcctgactttcccctagagccttgcactgtgcttacctctgtcctgcacttactgtgctcggcagtaccgggcagtactaaagctcataggcgtctgcgcgccctcttagcatggcagctcctctagactgggtacctggcttattcactgctgtgcccctcgccctgaacgttcctgatgcttgaagaccctcagtgaatgttagttgaacaatactaaatggatatgctttgtgaaagagttcctagggagagttctatttctgagaaaacagccctaaaatgtttattattttaccagtgggct

SEQ ID NO: 33807 - DNA, 1118 bp, Homo sapiens
aaataaagatgtcatctttatcccccccaccaaaaaaatcccacaactcttccttgataccaccacattcctctccagagaccacctcattttactgttccactaagactaatgtctcaaaagagccacgctgtgtctatttccctcttctattcactcttcaattcactataatctgacttccaccctccactgaaaactgcttttgtcaaggtcaggtcatctgtactctccatgtgcacatctagtggatacttgaccttgtggcagcatttgacagtttgcccctccctcctggaatcttgctcccggctcctatgacaccatgctggttttcctcttgcatcactggctgctgctttcccttctgtccctgactctgagtaatggaggtctaaagggcattgtgctggactctcttgtttctctataattctgttacagtccctgcccagggatttaaatgctttcactatgctgatgatttctccattttatctctagctggccctctccactgagctccagactctcatatccatggctttcttgttttataaaatagtatacttactgtgccttaaacagaacttggatcccctctattcccactacattcctccttgtcctcgtaatggcctctccatcacccagttattcaggccaaatgcctggataatccttgccctttcctctttgtatctccctcacccccacagcaaggcttgtggattctatttctattttgaatctattcccactctctatctactggcagactgcctctgtagtccaggccaccatcacctcctatctggattattccaacagcctcctaactagtgcccactcctcttgctcctctctccatcgtcattcgttcagcacactgttgtaagaataatcacaaatcaaacaatttcacttccatgttatcatttctatggatttccaaattccctactttggcctgcctgcatcatcatttggcctgcctagttctccaatttcatttcatgtcactctccccacacctactgtattatagagactctggtcttatttgactttcttttaacatactcctttctccctcaggatctttgcagtttcctctt

SEQ ID NO: 33808 - DNA, 1164 bp, Homo sapiens
tggctcctcccaagcccaccctttggcatcattgaagcagcttcttggcatgcagctgtgggttccacaggtccccatgcttagaagggttaggtttggtttaatcctctgctgtttctgtcttgaaattctttataggtttgttttttgtttgtttgtttgtttgttttttgagacagagtcttgctctgtcactcaggctggagtgcagtggcgccatctcggcttactgaaacctccatctcccaggttcaggtaattctcgtgcctcagccacctgaatagctgggattacaggcacatgtcaccagtcccagctaattttttcttttctaatttttagtagagatggggattttactgtgttgcccaggctgggctctggaattcctgggctcaaggaatgctcctgccatggcctctcaaagttctgggacatataggcgtgagtcatcatgcctggcctttacagtttttggactgggttccacattttcatttttgaacactggaccccacaaattatgcagccaggcctgtgctaatgagtagggcactcccacagtgccaagcggggcagtccccagccttctaccctggggaagggactcagccgctcaccctgatccctgctgaccctgaagtcagcccctcccagagggctagagctagaggcaaagtccactcacagagcccagtcaacggcaatgatgagggtgatgtcatcggtgggcagtcccacggaggtgagcacgatgaccatggtgacgaggccggcctgggggatgccagctgccccaatgctggctgcagtggctgtgatactgcagggggtgggaaggggaagaggagcagcaggaggggcagggtgcattgtcagggtctggctccaaggaagaggttgagtgtcagggcctctgggacagccatttggtgcggggggtgggtaggaatgccacaccagggagctctcggggtcaagtccctcctcacagtcctgaagccccatggacccccattcctggcctcaggagaatccctgggaactgtgcaaacacctgtgtctggagctgtgcctctgtgggttccaggaagctatattgctatggggctgcccagggactctgactgaccaccacatggctctgcctgcctgcctctggg

SEQ ID NO: 33809 - DNA, 721 bp, Homo sapiens
aagcagaggcttgagaaacatttgcatgttttgatttcctctcttgctcctctacctttgttattaaaaaaaatgcctgggctagctctctcctggaatcctgtcgccaccatgaaacaaatctaggctggcctgctggagtacaaagatcacagagtatagctgaatcatctcagccagactcccctagaccaactgttccccagttgagccaccagctgcctgcagacatgtgagtgagctcagtccaaaccagcagaactttccagctgacctatagacttgtggctgttgttttaagctgataaatgttgggttggtttgttatgcagcagtaactagctgatacagggaacgagagtttctttagacagtgggtgggagcctgtgtatgggcatctatccccacgggggaggaaaggaatgcttctccacaaccttaagccaagagaactattcagagaccttggcttgagtctcttagaatttgaggaatgtaggggctggtgcctgactcatgtccaaaggccctgggaaaggccagcacttccaatagggatatgtatgcttcccatgggccagacatgacccaacagggtcacccagaggggtgaggtgaccccagcagaggagtcaaccagagccctggtctaggggatgttgtaagtagccagatggaataaattgcctgagtccaggggacagcaggtgagagatgcga

SEQ ID NO: 33810 - DNA, 1200 bp, Homo sapiens
agggtatattggcaggggcagcggggtgctagggatagcctgaggagcaaggtgttgtataatgggcagcaggcggcctcagagatgcttctggggaggcttgagctggacagactgagatgctatggcaaagaagagacatggtgttggcgaaaatgaacgccaagtcacaggtgcagctgcctcaccctgcagaagcaggtgtgcagttgagctgttcttcaccgggccctctgcttgggttatgctgtggggagagcagcaggggttgacttatttgctaatgattaatgattaatgattcgccagggctacaggcagggccaacccagcctgggaaggcggggataggaaggcttcccagaggagacgtggtttaggcagaggcctcaataagccagggaagggggtgctggtcaagggagaggggagacgacagtctgatttaggccggaggcgtgacagcagggcctcccagggctagcagtgcatcggtgggctgcagtggccatcggggctggggccttacaccttccaccatgtgtcaaaatgagtttaggtctggccgggtgagctcccatctgggtctgtcgtgacgacagctcggggtatgttggctgctttccagagacataccagaggcgccttaatctccctgacacgtcttcccagctcgctggaagctgggcccttccgggaaggttttctgtgggcaacaaatgcagctgatccagctgggtgtggattcctgcgagctttagtcaccgaggggctgtcctgacctcgctgagggctagtcctttcccacatttgcctcagaggatgggagaaagtgactctgtggtggcaactcagacacacgccttcctttttcccttccagtcccccgtctaaatctgtcacttaatggaaatgaggcctgggcgcccataagcccctgagccgctctgtgttgagcaccgactgtgtaccaggctctggctgggtactctgacaccttcacctagaagggccctgaccagggggagccagggacccctccacattcactgggtcagtcaagcctgggggctctaagtctgtgcagtacaattacatagcatccattacactacttaaattgaaattaatcaaaattaaataggaccaggcccagaggttcatgcctgtaatcccagcactttgggaggctgaggtggg

SEQ ID NO: 33811 - DNA, 556 bp, Homo sapiens
aggacactgtgctgcaatcatgctgcatagtcagagtgaaaaaagactgggttagggagtcacagagtcacagcatccagccccattggccattcagcaattctgtgaccttccatctctggtcagtttcctcatctgtaaaatggggatgctaatgcctgtctcttagggccactgggagaatgaaatgttagttatttttcggcttttcagttgagttattgcatcagctacgttcgtagtttacccccttggtttattaagtaatagttgtaaaagtttataacaggtcacgaattggcggcacctttgtattgattggcactcaaagtgacttacaaaaacttggcttaattgccaacatttaaaaactagggatcttacataaaaatctggatttgtggcttcattggaaacatctgcatgaccacaactgctggagctgagagtcagctgcttgttcctgatcccaaaccccatgactcctggacaccttctgcctcctaccccttatctccctggattccctgagtggcttgctgctggaggctgtgag

SEQ ID NO: 33812 - DNA, 746 bp, Homo sapiens
caagtaatactaccaaatactgctcctctagcatttgccctgtgctgcgcatgtgctcgccctgcaaccacctttggggcaggtactatcgtatcatatcgtatcatcattggctcagggtataagtatcttgcttagtaactcatggctcgtgaaattagtcatttcataatctcaagttgctgagcacttgtctggcgcagagtagagagcaaatatttgtctaatggaagtgtgtttgtgaaaatgctgggctgtgtaaactaaacagaacggaataaaatcagctagaggggtttgccagggaagacttcaaaagcagagggcatttgtttctctcttgccaccactaatgtttctcagtgtctggggcgagagccaggagagagaagccaggtagtcccatcgttggaaaaggccacagcgccttgctgccacccactgacagcagcatggagctctgcagttccaggactgcctgtgcagggggccatccctggtaccatgcccctctcccttctgtgtgccagctgggctgtctccctttcctggccagggctgtccctgctgaatgccaaacatctgcagacagggtttgcaaacagctggctcaaagttctgagcttttgtgatctcatccaagtgcctggctatggggaacaggcttattttcctgggctaccagcactggagtggtggaaattacattagacttggattcagaggcctgcatttgattctgagcc

SEQ ID NO: 33813 - DNA, 1950 bp, Homo sapiens
acatccaacatacaacctcccttccaacctaactgattttccacagtgtttctcagcactgtcatagaactaccgcttatggaatgtatgaatgacattattacaagatatttaaagagatttaaaagtataaaacctgaataaaagccaccacaatcacttggtgtgtgcaaacaacaccccggttcagacatcactgacaggacgtgtcagggatttcaccttaccggctaaagtggcgccaccgtgtggcaagaatgtaaacgctatttgcaatggacttggataggcagcttcgaaattacgtgagccttagttctttttatttaattggtgagagttgcattattccaaagttgtaggcatcaagtcagactttattagtatcgcgtgtcacacgatttctaattcctatcatttaaattgggccgatagggacccctccatgccgtgtggtgagtgctgggatttgggcatgtgctgggcatctggacatgacagggcctagaggaggaggtaaagtgtagggaggctcccagaggaggtgacctgtgagtcagattttgagagttttccaaaggaacgcacggaagtggacagcagagaaaagggaggacgatattccaggcacagagagcagagtagagaatgccataacatcacagaaggacatgaggtattggtgaaaggttgggtgtttagctgttgttttgattggtagttaggctcatggactagggagtaagacagtctgggttcaaattctattccatcacttcccagtagtgtgatcttgggcaagtcatcagctctgcatcttatttccttaagtcttgagaggggagtggaggtggagctggggctagagaggagggtcagggccgggtggaaaatgccatacggtgccatgagaaggagcctttctcctgcaggagtggaggtcactgaaggacaggcaggtctgtgtttagacagattaccagtagcagggtggatgttggactagaagagagaagaaaccacaaacaggggaactagttagcagactgttgaagaagtctcccatcccttcatgaattctacaaatactgaatgcccacactgtgccagcgactgttctgggcattagagatctataagacaacaaaataaagactgttgccctctgggagcctacaccttactagggggagacaggcaacaaacacataaataatatgatatatagtgtttcagataatatgaaaagcaatgggaaaaaaataaagcagggaaggaggatagagaacgtgggcagggttgcaattttagataaggggatcagcgaaggccctggtgagaaaaggattaaaaggcctaaagggagtgagggaggaaagcattccaggtcccagggaaagccttccaggcagagagaacagcaaaggcagagcctgaggtcagagcgttcctggtgagatcttgggaaagcaaggaggccagtgtggctggagcagaatcaaggcaggcagggtgggggccaggggcaacatcagagacaggggaggaggcaaactgtgtagggtggggttggcaaagcttatctgtaaagggccggacagtaaacataatatttcagactttgtgcaccacgtggtctctcttgcaactgctgaactctgcccttgtagtgtgaaaacagccacagaccaaatgtaaaagaataaacatggctgtttcaacaaaactttacttacaaaaatgggtgatgggtcagaatggcctgcacaccatagtctgtcaaccctgatgtaggacattagagacactgaaggtcttagttttacttgaataagatggagagctatcacagggttttgagtaaagaaggagcacaatgtaactgatgttgcatttggatcattctggctgctgtgtgagaatagactgcatgggggtccggggtggaag

SEQ ID NO: 33814 - DNA, 672 bp, Homo sapiens
ttccatatggcaggggtcaccaacccctgggctgcagacccctgtcagtggcgtgttaggatctgggtcgcacagcaggaggtgagccatgagccagcattacctcctgagctccgcctgctggtgcgagctccttatgagaatctaactaatgcctgatgacctgaggcaaaacagtttcatcccaaaaccacccccaccccccaacccccgtccatggaaaaattgtccctggtgccaaaaaggtctgggaccactgccatatggactatgcccttgactctcccaaaggaacatttccccattcctcactcgctggggtacctcgctgggaaagtatgagaagccccagcggccaccgtcacgtggggataacaagatatacacaaaaaagtgagcttccgccacgggaattcaggcctgatgcagtctgtgatgtgaggatgtctcaggcactgccatgcagatgagtgggaaatgaaggggactgatgggaagtgccctgaggtgacaggagggagcagttcccgagggagccacaatggtcagggagggcttgggggattggcagatagaagtgggccttgaaaggaaaataagagttgtacaagcaagaaggagatagaaacggtattccaggtgatgagaaaagtatgcccaaattttggaagc

SEQ ID NO: 33815 - DNA, 3521 bp, Homo sapiens
ggagatggctcattttcagaaagagttttatattctccctctggccttatacactacaggcaaatggcaccgatgttttggagttgggccagttgggccttttctcccctcaagagaggaggattcgatattcagtgtttctgaatttcatgcttagttcttaagccatttcccatttgccctaagaaataagagctggcagcaagctgcgctgtttttttctaaacgggaaatgggttaagcatttgtgatcaccactgaatgagtgccagagctggttagtgatcttcctgttcaatccgaggtcacctaactagataacaaagagctgaaactaaaagtccggtctcctgactcccaatccagtactctttctggtgtgctccagcttctggctctgcttagccaattatggaacagacagaatgtacttggctgccccaaacggctaaagggcagttctgttcccaaaatggaattctgttgtgcctcaagctaggcagcataattgtgtgtcttttggtaactccctgtcttcttctgtaaaatgggagtagagcctacttaatcctgcagctacttctaagatcagggattggggcgtggtgggctgttctgcagctgttttgtgatggatgagggatgatagatctatgttcaagtagcggaatcttagagtcaggagttggaaggaatcttggaggtggtctgtggtgacaggaagcctcttccaatagactgaacacggaagacttcctagagccggaggacaagggtttctttcctcttagcagtgagcttcttgtttttggaaatgctcaagccaagaatggatgttcaggcagaggggattccgctcggaaggggctttctgcactgaagtggtggccagcgggaaactccaggtttccaactcctgcacaaatcctttctaatatccatccactcaggtgagctggcagggcagtagctgtgcagggttcagggtcattatatgtcaatgaccttcagcacggattactaacaacagtaacatccgttaccgtttactgctttcctattaagcaccatgcactgtgcataacatgttatctttatctcatatctagaattttgggaggtactttgaatcattacgatctatctacttcttaggtgaggaaatagaggtttaaaatttagtccacagtctcgcaaggatggagcctggatcaaattttgggttatcagattccaatcacgtttcttagcttttcttttttttttccaactccagtttctgtcttgctccaaaaaaggggaaggagcggctgcggcgctcggtttcccgcctcctagggaagggaagggagacgagcagcgcggaggctggggcccccttccgggcggggcctactagtgggcggggcctgtcagtgagcggcccctgcccggaaggagccagtccggggcggagccgatggccttacaggggccggaagtggcctgcgggcggagaagtgcctcaggagtcctgacgcagtgtcttgggcgctaacggcggcggcggccttgtgtttagactccagaactccccacttgccgcgttctcgccgccgcaggctcccgggacgatggtgccccgcctgctgctgcgcgcctggccccggggccccgcggttggtccgggagcccccagtcggcccctcagcgccggctccgggcccggccagtacctgcagcgcagcatcgtgcccaccatgcactaccaggacagcctgcccaggtgagcctggcctccgggtccccgccgcccgccgccgtcccaggatcggccccaacctgactgcagtcactcatgactcctctagtgaacccgtttccgcccccaagcccctaccatggaggctgccacagcccctaatctggaagtcttgggacttttcacaatctcctagcacaggaacctcagaaccctcaaattctcttccagaacccctcgatgctatctcagattctccatcttgaacgcttctcagattccctctcctttaacctaacttccagccagctatcctgagtcctcttctccctgaaaaatgccagacctgcatatttccagcgccgctgtaatccctcgactatggtgtctcctgaagtactttaatgactgcctcacattcctacccggaatatgggtaggctgattcctaatacatcatggttaccattccttaacttctcccagcaccgccttcacccctgtcactcaggaccctcagccccacctcccatttctccagtactctgttctttcaccccccatgagcccccacaagcacagccctgaagtgttcacccttgtcctcaactgaccctcccccatgtttttaaatctttaatctcctaaatccagtgttcacccggaaacctttcactctctccaagccctcctcaacaggttcctcccctcaaaatatccttcctcacccacagtaccccttgtaagtgcagctcaccctcacagaattctagacaccaccctcagtaccccatccacactccatcatactcagatccagggtccacccaaatttctcttctcctcctcaccactggctaccctgccttcgaaacacttcacccagaatcgacttcccctctgaaaagagccctagtaaatcctcttccccttccctcccccagtactttcttaaatccagcttccagttcttccagccttcgaactccgctttcgtctgagttgccagatctccttcttcaatattagaaattttcttcaccctctaaaccaaacctaaactaacttctaacttactgagtgagtaactcagttcctggagccaagttcaaaatttgtctcaaagacccttctcaccttatttctcaccaaactgccctcagggattccccacactccaagagctagaggccaggcttcttccccatgtgtggaacattgtgtcacaggcctcacccgagctgctgggttgtttttctctgcatctgggaccacttaacccaacgtcatcactacataccctcaccctctcaggaggatcgagtgattcttgtgaaattacattttgtgcaaacatctaagacatgaaaatgagattatctacacgtggcaggagggaggaagaaaaaggggctttgtgcctgtggcataagcctggtacatgcttccaccctgtcaacctgtgtgtatgagctgagccagtatatgggtgaaaggtgaggactgacagaacctgtcttcacttgccaagttcagagtcagatggtcactgactttcaggcaggcctgggccccacccaggtttaagatcagagggattttctgcactttagaattggaaagctggaaagaatattcaagattatttattccaaccccatccatagcacagtctgtaggaatctggaggtaccaattcaaactccagttcaaatagtaccactagtcacctacgcataaccttaagcaaccaacctcccccagacctccattaccttat

SEQ ID NO: 33816 - DNA, 2256 bp, Homo sapiens
gtgttctatagcactgtaggatgactatagctgacaataatatatagtttcaaatagctaggatattaaatgctcccaacacaaagaaatgatacacgtttgaggtgaatatgctaactaccttgatctgatcacaatacattacatttatcggaacatcactatataccccataaatatgtacaattctgtgtcaattaagaaaaaaaaagagaaatggcctcagcaggcccccgacccactctgcttggttagctttatgttcccacaggccctgtatgtcactggtataagcacttatcactctattgttactctatttttctgtctccttcactcgattccgcttcttcaagccaaagaacagattctcccaagtaagccctggtattcaggcttcaaaatcctgggaaacaaaagtagtccggaggcagcttcccgaaaaacagggcttttgagaggtacagaaggatgctgggatttttgaccaggagtaaaacagagcagaagctctgggatctggaagagtgaagagcctcgaactgctggggaaggggaggcctctgtagaccatgccactagggtaccagctttaccagtgtgggagggctaaggaagggtggattacgcacaaaattaaactatttcacaataaagaaaaccaaatcaataaacgaaaggcgaactattcaccttattaaataatcacaagcgtcccttcaagtagcatttcgtttagtgtccatttacagaccacgaaatatttaacacagggaagaactacaaaatgaagctttccaagactgccaattagagataaaccaatacactttaatagaaagcaaacgtaaaattctaactaggaaaaccccgaacacttaatgtgcctggttaaatattttctcatactgccggagagaaggctccggttcagcactgagatcaggacgggcctcctctccccgggccccgccccggccgcaccttcaggtaccaccggaagtcctcgcccacgggccggaggttggtgatgttctccagcgtggctttgagttgcagcgcgattttctgagggggagggccagagcgactgcgtcagccgtgcctgcgcagccccacgcctgcccgaccctcccgcattcccagccgtgggtgccacagggagacactccttctgcctcctgctccttcagcgcgcacccactcgcttcatctcctcctggcgcgagctgttgcctcccagaccctcgccacctcccctccgtgtccccgcggcgggcggcctcccctcacccccatggtagccctctccgcccggtgctggctgcggcccttgccgttgctttccggcgcgtcgtaaaaggcgggtgccgtctgcgcaccctcagtagggcggggccggggccgggccgcggggcagggacttctgcgcgccgctgctcgcctggcccactgggcttttcgcatctggggatctggggccagtggaggtcagccaggtccgcgagcaacctgtgctcaggccagcggaagcctgactccaggattcggtggtgccacagacagttactgaacgccaattttgtgcctgctttaagcgaacaggacagttcctgaccctcagttctttccaggctcttcactactctgcctgccctggaacttctcagatcacgtcagctccctctgcccaggggaaaagctacaaaaggaagagttccaagactgccaaataaagataaaccaatacgctttaaaaagtagaatgtattggtttatcagatttggggatgatgcctttcttcaaactgccctttcctgtttcacccaagagacctggtttctaggcccttctccagagtttgccctgtgtccacatccttctcactgtggtccttgcgactggacattccccttcagctggctcttttttgggagcccacctggcttatccttctctcataacgtttattgaactttattttacctggcctcctgtccaggctacatctgagaccatgcaggagctgtggagattaacggtaaaaggaacagcacattcaagactcttctaggaggtggggcaagatagccaaatagaaccctccagtgatcctcctcctcctcttccctggcaggaacaccaaactgaacaactatccacacaagaaagcaccttcatgagaaccaaaactcaggtagcaatcacagtagctggttgtaacgtcacatcaagatataaggcaatggctgggt

SEQ ID NO: 33817 - DNA, 1479 bp, Homo sapiens
tccaagtccaaactttttaccgtggtctataaagacctaagaggtgccgctcctacctacctatccgacatcatctcctgctatctcccagctcaccactcttcaaccacactgaccacctgagacacgcctagctcattcccgccctgcagccttgacatctggtattccctttgtgtagaatggtcttccttatgagcttcacaaggctgagcccttcttgttaattaggactcggctgcaatataccctttacagagagctctctaatggccaacctatctaaaagcagcccatccagcaattattctaccatgttattttttgaccactcactgctatctggaatcatctttttgtttatgatctctctcccggcagtaaaacacaagttccacgagaggggaagtttgtctaccttcgctgccgtattcccaaagagtggaacagagcctggcacacagtgggcgttcagtcaacgtttgctgaatggatagaaagaccccgtggagcagacacagtggcgttcctttaagatctgcactgcacaggtctcagtccctccctcctctagttccccacagatttccgaccctcggcctccccactcgccggcccccaggcctggtccccgctcccggcgggcggcaggctgcttttaccgtccggtcgaaactcaaactccaggaactcgtggccgaacttgcccttgtgccccacgtagtaacgcagataaaagtcactctccatggctcccaaaagacaaccgagcctgaacttccaagagcaagccgcactgccgccgtctgcgcccgacactgacgtttgcggcggcgcgcggaagtgacgtcaggtcccgtcgtcgctgcgtggaggggttccttctcgctaacctcttcgcccggaagtggcaacaagactgcaacatcccctcacgcctagtctgtaaagaactttgtttaacccggaggcggggccagccagctccgcccctccagctggacgcgggagcgaggttgaggttcatacccctgggttctctccaggcctgaggcggagagccagccgcctgcctacctctgggctttgaaccccgggtctggtgacttcgcttaaagacctcgggccgaaggcccgccaggctcaacctcggttcacaggacccccgacttgtgtgagtcgtacaccgctctttaccgtctctggacctaggtcatctcggcagtaaaatggggtgaaatgacccgacctccccggaggatgccgcgcacgatgtgtgcctcaagttggcttccactgacctgaactgttaagaaagccctcctcagtgacgccttccctgaatccacagtggagattgccgttttcctggaactaattcacccacacttacccatttcatccctttccaccttttatttctacctttctgccccactgatctctagaataggtgctgggagacgttagagtatttga

SEQ ID NO: 33818 - DNA, 1937 bp, Homo sapiens
gcacgatggcatgcacctgatgtcccaaatagttaggcggctgaggcaggaggactagttgagcccaggagctcaagaccaggctggagaagatatcgtatctctattataaaaataatttttaaaaaaattttagaggccaggcacggtggctcacgcctgtaatctcagcactttgggagaccgaggcggatgactcacttgaggtcaggagttcaagaccggcctgaccaacatggtgaaaccccatctctactaaaaatacaaaaattagctgggcgtagtggtgcgtatctataatccccgctcctcgggaagctgaggcagaactccttgaaccctggaggcgggggttgcagtgagccgacaacgcgccattgcactgcagcctgggcaacagggagcgagcctccggctcaaaaaaaaaaaaagataagacttacggacccaaaagtttttagtttggaatacaggggagatggcagtgcactgggatagaagcacttttccaaaagggatctttctcctctttctctttgcactccagagaagcgatgtagtactgttaattccgtaactttaaggaggaagtactattccactcagctcagtcccattctaccttacaaagaacacctgccctgcttactggaccctaaccccagcctctactaatgccacatttctttccaattccgtgcattccttcccacttcttaacgaaacaaattaagttatttattttgcacctactggatacggtacccttgcgtaaaactccgcctcactccctattccaatttccattcagtccatccgtcccactctgaccagcttccttccactcaggacccctctcctaccccgtaaccaacttccactcaggacttcccacaaccctgcaatcagtcccccaagtggtgccttccccacgcgttctctccacgctgccccgggaccggccctcccccgcccagcgcgcacgcgcgatcagagcttgcccgcccggcccgaccctggcagtgcgtgccacagtgcacgccgcactcacgcgccacagtatgtcccgcgacctgccggcgcagggccggctcacggccgtggccatggagatggcggcccctagtctagggcgtacaggagaccgtgcgcccgcccgccaccgcagttcaaaggcaggaaggccccaggaggaccctgctgggtctgcctcaaacgctgcctgagcgaagcccggcccaggctccaacccatccctgcgaggcttcgtctggacaagctcaacaggccaggactgccgcgcagacacgtcccgcaaacgcggctgtaactccaggaaccgccctctggcgaccaaacggtcccttcgaagcagggtccagcggggcgccagaagcaggtggcggcgctgcatgctgggaactgtagtctcgacggccccctgagaggaagtaggaggaatgttgcattctgggactcggagttccaaagtacagaatgctgggagtcaaggtcttcctggaggtgccttgaggcatgctgggaatagtagtcttttataaagccgataacagccacagtattgattgactggaattcttcagttagagctagcaaaatgatctgccctcatttctccctattactttataagtcacctaaaagtgaaaccaaaggatgtggtggtcttctccacaataggtacgcagtaattttactgaaataaaaaaaaaattctctagagatgcctttggtttcataaaatctggtttctacttccagatctgccacttgctaaattgaatatttttatcttctctgagcctccatttcttcaacagtaagataaggatgaaaataaaaatatcctggtgatgttgtgaggatgtaaataatatgctatacaaatgttatcattaatatactgccagtaagaa

SEQ ID NO: 33819 - DNA, 1374 bp, Homo sapiens
gatctctgctcactaccccagtgttcccctccacaagtgtacttacggaaagtaatggtctgtttgcctgtttcccccaccaaggaagaggccatgtgtcatttacctctgagctgtcattgcctgacactgtacctggcacacagtagacagtgaataagcacataaacaagctttaaaaattgtttaaaaaatatctcaaagacaagttcaaacctcagttttgtcagagtcatcatttcccagtaactcatcatcttcttctcttcctgagcctcttggggatcctggctgatgttttggggtttcaccaggatcctcaatgtttactgtggtggcatctgggtttgctgtcagagaagtggctgcattgccaaattctgaaatcaattagagcacacgggcctcagaaaccttacccacactagaaatgctatactttgaatttaaagacaagctgtcacaacctcagctttgctatagaccctacctgatacaaagggcaaaagctttgaaaaacaaaaaatctcatcaggagatcaatctgatatagaaaaatgactatgaagacaacagaatttggagtcagacctagattttggttctggctcagctagccacttactaaatacacaagcctgagtaagtaactaaacccctctaaacctcagtgttttcatctgtatcatggggagaataacatttattttaaataattttgggagaacaaggaatataatctaagtcctaaactttacttctttgattcaagtccaaaaaattttaatgaaggttattttttccagtaagtctacataatcactacagaaaatatgggaacaaaaatgaaagtgggatcagctgcgcacagtgactcacgcctgtaatcccagcactttgggaggccaaggcaggcggatcacctgaggtcaggagttcgaccagcctggccaacatggtgaaatgctgtctctactaaaaatacaaaaattagccgggtgtagtggcacatgccttgtaatcccagttatgctggaggctgagacaggagaatcacttgaacccaggaggcaaaggttgcagtgagccgagatcacaccactgcactccagcctgtgtgacagagtgagactatgtctcaaaaaaaaaggaaaaaagaaagtagaaatcacaggataaaaaccactcttaggccaggcatggtggctcatgtctataattccagcactttgggaggccaaggcaagaggactgctcgagcctcagaggtagaggctgcagtgagccgtgatcataccactgtactccagcctgggcaagagagtaagactttgtctcaaaaaaaaaaaaaaaaacccaaaaaacaaaaaaaca

SEQ ID NO: 33820 - DNA, 1885 bp, Homo sapiens
ttcccttgcctcccttttcagtggggtttaataggtttatataaagataaccactaagcatcaggtattattaaatattaaaactgtaacaaagaaactaaccccggggatccaaaggttccaattcaaccttatttggttgtgtatgtaccaggaatgaatctcaactcactgtgtgaatgtttagagagcaggtgcagcctagagatgtaacgatgaggaaggagaggctgaggtttgaaagaggtgatggggacagtgaagaacaaaggcagttcagcctagccagtggttaaaggcacaggctctggggtcagacagagctgggtttgattcccgattctgctgcttctctgctgtatgcgcgctcctcgcggcctcagtttcctcatctgtaaaatgggtgcataacgatacctagtcacacagtgcgggggtcattaaatgggagtgcgtgtaaggagcctagagcggagtcaggcaattagtaggcaatggggtgtcggcgaccctgcagcccgggacaccgcgaagcagaggcagtgtttcagggagaggagctgggccgcggcggcccgggcgggcaggagatcctgaacccccttagcctcgtacaggtcccgcaaactcggcagcctcacctcgcggggttaggcgtcccccgggtcccgagaaggctcgggcctcagttgctccgcgccggtttcggtccagcccagttgccggaagccggagatccggggggcggaacctctccgcctcctccgggaagagccccgcctccttaaagagacagcagctcccagagaaacctgcgtgctgcggcgcgcagagcccgctcccgcccgcccttctcccgaggctgagcctcgagttcttaaagagacaggcgagggcggagtggtggggtcgctgagtgtgactacttgggctggccttgctccagggaacgtagaaaattctcgagtttagggttttcttactgtgtgtttatacctcttttcctaaggaaatataaaatcgggtgatgaaagacgattgtgaaagaaaaaattaagtcacccgcgtcaccagtccctcagtttcttttggccacaaaaatttcactggtgagaaagtacatgatgagtcaattacattctgaatgagtgatcgaaagcgcgatgtctgttcgtatgagcacccccagtaagtgagcgcttggaaagactttacatctaataatagccatatatagtgtatttttttccccaagatgatcatgatcaggctttgtacatgcaggatctctaattctcagaacaatcctgctatcttggggtgattatcctcattttacaaagagaaagctgaggcttagagcatgtgcagggcacttttggttgagtatgtaccaggaatgaatctcagttcatgaattcagctgtgctagtatatcagccacctcttatgtcccatttcagatcatcttggcctcacctgctgcttatttcaccgccactcatcttattccagcgtcagcagatataacctgagtgagcttgcctccagtctatgcctcaggcttctcactttctgcttcgaggcttgtttcttcatgcgatggggccatgggaccttgctggagccaatcagcacccagacaggtgcatcccagaagtgtaggggtagagagttgttaatgtctcatgaggcaaatctctgaccaatggggtcaacacttgatgaatatatgcttttcctgtttttccccctcaggcgccctttcatatagctttcaaactacctagcaggattaagcaaccaaatgcctttggaagtgacgcatttgacaatgcatcttcgcaatgggtctccttccttccctgatatacaagccctgtac

SEQ ID NO: 33821 - DNA, 879 bp, Homo sapiens
gcactccagcctgggcgacagagcgagactccatctccagcaacaacaacaaaaaaccatggatgtttgttgggaaaacaaagatctttgttgggaaaaacatctttcattagtaaaagaagagtttgtgtataaagaataactaatagccaaatctactgacttgtgagagagcatctaacaggttctctttaagtgtggtctttttaagtacttgttttttaaaaaattaatcagagggagaatttaagatgtggaatctaccaatccaagaatctctcaaaagctcaggcaaagaattggaaatgataatgattaaaacagacctttgtgcacctggttaggaattttctatctcatgacagaaaggcaaacatcttctgacctgactccttcccctgacccggggttggctgctcctaccctgcaccttcattcagctccgcccagtgttgcctggctgcagcctctctgcccatagaactcagagcttactctggctttgccgagatggggctgccccagccagggctgtggctgaagaggctctgggtgctcttggaggtggctgtgcatgtggtcgtgggtaaagtgcttctgatattgtttccagacagagtcaagcggaacatcctggccatgggcgagaagacgggtatgaccaggaacccccatttcagccacgacaactggataccaacctttttcagcacccagtatttctggttcgtcttgaaggtccgttggcagcgactagaggacacgactgagctagggggtctggccccaaactgcccggtggtccgcctctcaggacagaggtgcaacatttgggagtttatgcaaggtcaggaggctgccacacacttgaggggtgct

SEQ ID NO: 33822 - DNA, 368 bp, Homo sapiens
aactagaacttcttgtggattgtttctctaagtaacatcaccaccttcccaggcactcaaatcacaaaccatccagtctggcatttcagcccctggaacactgctcttactgtacaggctgatctgcctgggctgctctttgcccacctctctgcctggttaactcttgttcaatcttcagactgttgctcaatgacgcttctttcgagaagccaagcccaactctcccatactaggctaccctctctcatctgcctgcttaacatcctaaacttttctttattacacctgtcgcggtttgtaattatgtacggctggctaggattcatgtctgcttccctcactagtctgcaaactcaatgcaggtc

SEQ ID NO: 33823 - DNA, 914 bp, Homo sapiens
taaacaaatccttacagtcctatgaaatgggggaggctataaaaaaatagaacttttgcctggaggacttggaagttttcctggaggaggtggctctggaactaggtcttgaagaatgagtcagatttttgtagcctgacaaggaaaaagggaagagtgttttagaggggaaggcaggagcttcttttgttttgctgttcattcataattttaaaccacagtgcacaaatgacctcagtttattcaacaaatgttcactaattccattggtagtaagagcaatggtaataactaacttaccacatgcccatgtgccaagcactgtaacagaaccaggccaatttgctgaatgccagtcatctgcagttcagttccctgaaagccagcttgcctcatggccaattcatggaatgtacttgcatcatgtaactgtccactttcagtgaggcagtttacattttaaagactgttgaatttggtctgagccccgtggctcacgcctttaattccagcactttgggaggctgaggcgggcagatcacttgaggtcagaagttcaagaccagcctggccaacatgatgaaacctcgtctctactaaaaatacaaaaatcagccaggcatggtggcatgcacctataatcccagctactcagaaggctgaggcatgagaatcacttgaacccaggaggcagaggttgcagtgagccgagatcgcaccactgcactccagcctgggtgacacagcgagactctgtcttaaaataaaataaaataaaatataaaataaaataaaaactgttcagtttgtctctgctccctgctgctgcagctgagactgaaaattggtaggagtgaccagttgcagtggcccatgcctgtaatcccagcactgtgagcggctgagtgggagga

SEQ ID NO: 33824 - DNA, 1725 bp, Homo sapiens
cccagctccttgggaggctgaggcaggagaattgcttgaacccgggaggtggagtttgtagtgagctgagattgcgccactgcactccagcctgggcaacaaagcgagactctgtctcaaaaaaaaaaaaaaaaaaagagacatgttgtaactactttggaaacccaccaggccaccaaaaagctctgttgtatgctttgggtataaactctgaactcagagccagagacagagagacgtgaagaatctttactgataatctaaagcaaccgcttcgtttttgagatgcaaaagtccagagaggtgaatgactcgcttagagtcacacagtgagttcttagaagagccagaactagacttctgactctcagctcgtgcacttgctgctactggatacgacagcaggagctcagggaaactctcagccacctccagccctctgtgcgtccacacacgcacacacacacaatatacacacactcttggacacacacagaacaaaacatcgagtaactggcatggtgtggcagaaggcaagttctggatgatttactttctggatacctgagagttaatctgaaattggcttcatttcagcccctgtttaaaatcttctaacgtctttccagctgtacttacaagtgttgtccaataactataaataggatttctctgctgacagatcctgacatgggggttaatttactggtctgggctgttttcccatttatacaaaggagttggacttgatagtcttcactggattctcgaaatggtgttctctgcactgtggtctgtggacatgggcagggtgccagcccccatgcacccatcctttacctctctgctgctgaggaaagcagagagcttagtttaaactttgccctcaatactgaccactgtacccaaccacactataaataattaaacaaatggctctgtctcttccagggtctgaatcagtggatgttgagtttttttcccaattaaaaacaaaatttcatacagctgatacttagagttgatcatgaccataagtcttttgggttctttattttttatttttattgagatggggtctcatgctgttgcccaggctggagtgcaatggcacgatcgtagctcacagcagcctcattcctgggctcaagcagtcttgctgcctcagcctcccaagtagctgggactagacatgtgtcaccacgcctggataatttttttttaagagacagggtcctgctatgttgcccaggctttttgggttcctacctaaagagtgacagagtgactctctggggtcattggaggccagtgaccagccacttggccacaattgacctctgagctgccctcctgaagcctgggcctccttgtcacatgggtgagaaatcatagtgcagtcaaccagcagagactgaggccactcaatgcctcctcaggccttttaagaaaaagtctgacccaaggacaaggagaggggcttcgtatgtccagtgaaactagtctgctttcctctcatatgctaaaaattgagaatataagccaattttgtttcttcttttacttggccaccaggaagctcagagtcaaaatatagctcagttataacaaatgcatgggacctatggcctgtgtgtattccgttttcccctcctgttctacacctcccagaggggcatgattaaaaaaaattctggccaggcgcagtggctcacgcctgtaatc

SEQ ID NO: 33825 - DNA, 460 bp, Homo sapiens
ctctttagacacagttggcttggcctcccttaagaaggtagaaactacattttaaagctattgaagggatttcaagccttggagagcagatgaaaccaagtatgtggatgctcctctgtccacagatcaagatcaagctgaccctacctattcagataaaacaagcaaaaacttgcaggcaaattcccaaggtgcaagggtcacagtagaagaatgtgggtccttcatcctttcctgtaccttgggacatggttcaggcatgattgaggcaccctgggcactgaatccctaccttgggttaggccctgtgcaaatactggaaacacaaaaatgaattgaaaatgactcatacctagccgggtgcagtggcttacgcctgtaatcccagcactttgggaggccgaggcaggctgatcacttgaggttgggagttggagaccagcctgaccaacatagtgaa

SEQ ID NO: 33826 - DNA, 793 bp, Homo sapiens
ttctctttttgaaagactatgtcactttatgtcctctagtttttctacttctctgtccaaccttcctgttaactgctgatgccactgtacacactttctcaaccacctcacggttgcatctgccattgaattagccatgctgatggctcctacacagacatcatttgaccacctcttgcaactaacctccagacctacatgttccttacaacttggaaatccttacaagttgggaatgcctgattcgtttctcttgcagggtaaatctggcccttggaactacaacccagaggaagttcgtgctgttctggaaaagctccacagttaatctggacagatacctcaattctaggtgaccaacgggagggcttctcaaggcttagctctccctgagacccagctggcttttacccttgacctgtgtccctagctgaatcactagctcagatttttctgatctaagcaaacaactcccagctgaggaatgcaggccacagcacccaatcaagacaaattgttattatcagaaaatgaagcaacacttgagctgttcaggccagttccctgttgaagaaacagttccctgttgaagaaagtagagcctgacactgctcccactttggagaccacattccctgcacacggtctttgagagagcagttgcactctacaggcacacttctgaggtacggtatctctctccagccactctgataccaagtaattcaagctggcattccttctattagggaaattcattttacccaatttgcatttatggaattgatcattt

SEQ ID NO: 33827 - DNA, 2254 bp, Homo sapiens
ttctttccccaaacctcttcaggtcaagtccttagaggaccttctccctgaccagctcccttggttctggtgctacagctggactcctcacgctctttcttcaagcatcatccattgggaacgtggtgtactttagaaaacacggacccggcctaaggcttctgtctccgaggggccagggccacggcttccaaggcaaaccagccctggcaccaccttctcacctccatcccaaaccctcctcctcagttcaaggccctaaagcctcagacttgtggaggcccgccccaaattatgtaaagaatatataaatgcccccgaccttaggtacaatttatagctagatgtgttacgttgcggctgacagcttacattacattttggtagactaattaatttcgatttacaactggttttcccttttggggggtcaagacgctatttctggcctcaaagagtttcgtgggctggtagtggcgcttccagggtctagaggaaaaggcgggcccgcgtcagacctcccgccgcggcccttccacgcctcccgccgcgcgtctcttcaccacccctccactgttgctcccttcccaccaacatccccgtccttctgccttgcccggccaggcccccataccctctggtgccagcctgcctaccccgctacccgctcacctgggactcccgttagctctgggcgccggaccttccgggctcgaaacctcccttgcgccccgccccacgcagagcgtcccgacccgcagctccgcctgctcgccgcggcctccgtggagtccggggtcgcgcgcgctccaactctgaaatcttcgcgccacgcctcccacaagccccgtcccaccctcagccccgccccttcgccgcggccaccgctgagtttccgggcgcgcgctcctaccccgagctctttgcgccacgactcccacaggccccgccctgccctcagccccgccccaccccgccaccgcggcctccaccgagttcccgggcgcgctcgctccaccgagttcccgggcgcgctcgctcctaccccgagcttttcgcgccacgcctcccagaggccccaccccgcctcagccccgccccctcgcggcggcctcggcccctcctacccctagctcttagcgccacgcctcccacaggccccgcccacaatcggccccgccctctccggctcccattacttcgcgggccaagatgcgaaaccactcctgtgcgcctttccccaggccagtcccggggcgcgcgctgcctaccctcccccagctcagctctatccccggggcccgcaggacccaggggacccaccctcccgcgagcacgcacgcgcagggcccacctctgcgagttccaaaccctcggccctcgggtcgcctgccctgggcctggccccgcctccaggtccggccccgccttcgtgccggggcccgcgcacgcgcgcctccccggcccagccttgctcccgcccccgccggtcccgcggtcccacggcgcctggttgcccccagccccctccctcctcccaccttcactgtgtcccacccttcctagctttgtgcccggggtgctgagcccttccccgtcagccgggccgcgggaggagggagccgtcaccgaggagctgccgctcgctgccccgggcaggggcacaggtaggtggcggccgcgggccgggccgctcgcggggccccgggttgcgtgtgggagcgggggcggggtgttagggaggggcggggtgggggaggggacgccccagagggacggcggggcgcgggttgaggggaggatgaggtatactggtgggggcgatgggtttaagggtggcgtaggggtgcgggggcaggctatggggacgtgtgagaattggggttcggggcctgggtgggacagggagcaggattagcctgggtggactcggggagaggcatgcttggggagagagcgggaagaaggaagggggaagggaatgggattttaggggttcaaggaggaaacgagataggataggaatagagagggtggggtcttgggggcagggaagaaaagttgggggtgtggaatgccaagttggggatagtgaggcgtgaaggaagagggtcttgaagattgagaacagaaggcaaggaaagggatggagagattggggtcctaggagagggaagcccctagagtgggaagaagggaagaatagatggtgaaggagaggagtggggggtggaggagtgtggggaaggaaggg

SEQ ID NO: 33828 - DNA, 1320 bp, Homo sapiens
tattgcttttccactgtactgttccgaaccctttaagggaaaatttggaagactggttgcaagcaagaacctagagctttgattatgtcctagattagcacctagtaatgtctgtggcctaacatgtttgttcctcaaccttgagtttcgtaatgtttcttaatcacattacacagtgttatgtcctttgcagagaacccttgtttcagaattactaaaaatcttttggttaattgatcaaagtatatgtgttttcctttctctgattgccagtaatcctctaaatccccattaacacacttcaactctgtgattggaaggtggaaaacagcagctttatttacaatgcaattaaaatacatctgagtaaataaggctcttttgtgtacccagctgagctcggtctccaggcaccttaggttccaccctttaagggggtatcagtgcctcagaccatctgtacctagctgtcaggctggtgattagtttgagtacatctttttttggttggaagtaggaagaaaagagattaactcctctcttgccctctgattattccatcctgtttttggcagttgtgatcctgctgatggaagagaggtatgtactcttttaggtgtaaccccactgatcctaacacaccatcttgctgtggaaacttccagacattcaagaggaaggtggatgagagaggcctgctcttgccacaagtcagtttccctgtcctcttaggttcctctcctctccatttcctgtcacacctaatccctttcattttttctcactgacctcatctgagatagatgaaccactagaaagcagggtggaggccccagcctgggctgtggaatgctgttttgatctcctttccctctccagaggcttccctgatgcttcctgataacaacttggcaaggtgctgcaatgtaattaagttgctcgtgctcagggtttgtcttaatatccatctagactggagtgagtccttgtagcagtcttgctgtacatacttttggagtaaagttaggataacaggcacaggggagtgttcaggaaagataaaatgtgatgtgccaaatatctcttggtatgttcttggggacatgcagattggaaacgagagttcttgaccttgctccagttttcaaatcactggatgttgagcattagattaaaagcaactttaaaagaattagtaattaaaaattcgagtatcctaaagtttggaaattctcaggtaaggtcccaacaccaatgccaaggtctgcctgataacaaagcaggtgtttcacttgtgactttcctttgctaatatacatt

SEQ ID NO: 33829 - DNA, 1264 bp, Homo sapiens
tcatttttgtggcctttagtgtgtgtcaagcattgtgctaatcactttatgtacatgatctcatgtatcttcatatcacccttatgaaataggttttgtatccctctagaggtgattaaacagaatctcagacaagtcacttacccacggtcacttctaggaagaggcagatctaggatttaaatccaaatctgtcagactgtagtatgcctccaacctgtgccgccatgcacaccacagcgacctcacagggcactcaaggcaaaatgcaatcaatgcagatatcaccctgtttgggcctttgtcatatccctgggtttatcctagactgatgagggaattagcatatgccagtgtagtgaactcatcatccctcccttctgtcacagatgggaagcggtctcgagcagaagccccactgaagtgtcccctggcagacacccacatgaactcttccgagaaactccagttctataaagagaaagccccagattgccatgggccagtgttgaaacacgaagctatctcaagccaggagtcaaagaagagcaagaagagaccttttgaggagtcagagacagaacagaataactcttcacaaccttcaaagcagaaatatgtatgtcttgctgtggaagactgggacttgttaaattcctattgattagtagatacaagttgacctttctctggcccccagctctagtgtttgagtaaaggagactgaggatgatttactttttgtttgaatttacctatggcattagcatagtaagcagatatttctacttttgtggtgtgggaggggaatgctatggaagtatgtaataatttctaatgtatattttcaatacatagtaattttttcaaataaacatttttgctgtccttaagttctgcttgtggattatagactggagccacaggaaataacacggtttgggatggaaggccaggtgaactaacaaggcagcttagcataactcagagatactgcaggtttggttccagaccactgcagtaaagcaaacactgcaataaagtgagtcaccagactctttcatttcctagtgcatataacagttatgtttacactatatagcagtctcttagatgtgcaatagcattatctccaaaaagaaaaaacatgtatataccctcattttaaaatactttattgctaaagaaaatgctaacaattatctgagcctttagcaagttacattcgttttgttggtggttggggggtcttgcctttgttggt

SEQ ID NO: 33830 - DNA, 602 bp, Homo sapiens
caccgtgttagccaggatggtctcaatctcctgacctcatgatccgcccgcctcggcctcccaaagtgctgggattacaggcttgagccactgcgcccagccctatgttttaaataagcaacagtgctccacctccaacaaaaatctgatgtggcagatcccaggactactcttttgagaaactgggtgatgacggactgaggatagcaacaatcctccaaataaagtgctctataaatggcgatgtgctttgcggttgggaaaaacaaggctcagcagtgtggaatgtgtgccgggacaggctggaggcaagtgtaaatcccagattgacctcaggtccaggtatttccccttggcattgagcaggctaaatggagaattttgcaggccttgatctcattcactttcatcactcccacctgggcggaacaggcggctcaaatcactgcctcagtctgctggtctataaaatgaaataatggtgattgggcctgtattctccacgaatgagggagaacaaatctgcaaagtatggacccccaggactgagtggggctggaacactctggagaaagctgctatggactaaatgtttgtgtccc

SEQ ID NO: 33831 - DNA, 1385 bp, Homo sapiens
ccaacatagtgaaaccccatctccactaaaaatacaaaaattagccaggtgtggcggtgcatgcttgtaatcccagctactcgggaggctgaggcaggagaatagcttgaacccgagaggcggaggttgcagtgaactgagatcgcaccactgcactccagcctgggtgacgagcgagattccatctctaaaaaactaaataaaaagaggaagagacacagtgctctcttgctgtctcctcctccacccacctcctcctcctccttcccccctacttctctccctccctgaatgcttgcaccaaggaaaggccatcggaggccataaccaggaagagagccctcacgaagaacctgaccatgttggcaccgatctcagaattccggcctccagaattatgagaaataattatttgttatttaagccaccaagtgtttggtattctgttatggcagcccgaactaaaacacatgactatttgctcaaaggattcagaaagcagccaagaaggaataacgggggtcacattcaccctcctgcctggaaaaaactgggcagaatgtatgaagcaatagtttcaaagtgctagacagcaggcaacaaaggacagtgatcccggagaaacaggaagcaaacgaggtgagccccgcgatggctccagctgcctgcgggggaagtttccaggctgcagcacagggaaggggagcagaggcggagcccaacagaattcctgaattgaagcagcaggagctcccaggacagcatactggagaggaggagcggcacagagacatctccggagataatgcgcagagagagaacttcagcggagtgctgctcagcatgtgcgtgtgagcaacccactccaggccagggtaggaaccacccagaaggatgagaggaatctaactttgatggtcataaaaaacagaatagcttctgttcccaccagtcagacaggaaagcctcattatccatggggtattggatagggcactcgggagagtcttgcctcagtcatggggaataattaatcctaggtaataattagcctagacaaaacatggctctgctcccacccaataaatcttaaaagcaagaatttaaaggatcaaactgtttcaagtaacttaactgcagtcccaaaacagagctcgagaatatttacaggaaatcaaaaatacctagcacctgacaaatgaaaaatcttaatgtctggtccagtaaaaaattacttggcatggtctatatataaaccctcactttacaaacaattgacttttgacaagggtgccaagataattgaaagggaaaagaatagtcttttctgtattttttcttgttttagagatgggatctcgatctgtcacttaggctggagtaca

SEQ ID NO: 33832 - DNA, 884 bp, Homo sapiens
agggcattccaggcagagggcgtggcaggagtaaaggcccagtggttgcaggtgggggagcacaaatggcctggggtggtgggactccaagatggatgtgtattgggaggggagacaatagcaggagaggcagcataaatctaaaacctgtcatccctacagccctagttggtggctccttggccatcagcaaacagggtaaactcaggtaaccagggaggcagcgtgactctgggcagggagaggtgtcctgatcagccaagcagctcctcaaatatttgtgcagcacagaccatgcacaaggtggggccatgggagaacccgcagaaccaaggctcctgcccaggtgaagctgttgcacttcaaagccagaaagcccttaggtgccagtcctctccctgtaccgatgaggaaaaggaggtgattctttccacaaccccgcccatcatgagtcaggacttagaaataaacaaacaccagctcggagcaacaaaagccctggggctttgtaaccagagagacctcagttcacatttgaaccctggccctccaacctccctgctgtgtgaccttggcctggttactcaacctctcttagtttcagctgtctcatctgttattgccccataacagggcccctgtctcagagctgtcctgaggattaaagagatcatgcagtgccaggcacctaactggggatggattctttatagctggtattttaatctacctctctgagtgtgtttcgtcattgatcaaatgtgggccaagccagggcatatgcaaagctcagtacatgtgtgtttcttccttcttctattttcagaagggtaaagaggactgtcctggtcacaccatgggccagtggcacatagtagggctaa

SEQ ID NO: 33833 - DNA, 2375 bp, Homo sapiens
gaaaatactcgccaatatggaacatcctaagcttcactggaactgtctccgtagccactccagttttagagagcaaggaggtccagccacaatggttaagcaaatagcatagaggagatgaaggaaaaacgaagaggaaaccaccagcaacatcaacaaaagctctcataaaacaacgtgggggagggcatatactcaaatcatacatgggaaaggtgtggtgggaatcatcaagcaatttagaatgttgagtaaacagagttcttaggctgaaaaaccaacgtgaagagggttaggtatgtaattaaaagaaaggggggaagcatagagaggagggccattcctctctgtaagctgcgaaccccctcctgtccacagtctcatttcttcacccactccacgaattccccgttttctgcactgagtggtcagtttctggtaggcagacacctaattgcctcttctctaacccagtccctcttggcagcgtcttggacacagtaactcaacataggcagacagcattcctgagcgtctcgctactccctgagctgccttcgtgacgctttttataccacagtggaatcgtctacttgtctgactccccgaagactgcgctcctggccccgagaggcgcttagtaaacaagggttatcaatcaatcatttgtggactcgcgtatctgcgcctccctttctacaatccccccttacgctcccttaggtgaggaccccgcattaatcatccatatcctcccctatcctcctccgagtgctcgactcccctgcagcccggcaagctcccagaggaaagggatcgcgtctttctcatctttgtgtcccccagcctatcacagggtagtgcaggacaaacttccggtaatgacagcagaaatggggtgcaggcaggattagggaggaaaacaggagctacacagatgggagacagcgattgaagggccgatttaacagccaggttgccagagccgacatacgtgtggggagccgagaaatgggctgcaagggaagggtcgcagcccgctccggacgggccctaccttagggtaggtgtgcaaggggtaggtcaactgacaggcccggtggcaagacgccgtatcacccaagaccgagtcaaatgcttcagccgaagcggtccccgaacctccggccaaggccatggtcagcagcagcagcggcgggagccccagttgggtcctcacccagaggctccccttcggcgccgccatcttgttcccctctgtcacagcagctcagcttgttgctgttttctcggaagggtttcctcctcctcctggggccagcccccttctccgccccaccgaccgttgcttccgcctccgctgtcacttcagctccgccctcacccgccagaaactgccgcctcctgcctcacctctgggactacgaacttcttctcctaggctggcgtgaggaggggaattcaaccatcgcaagcgttagcgcgaagcggggcctcctgacttcttcccttcgcggggcaggctggggcatgtagttctccgtaggcgggaggcgcacggtgctgtcgggaaagttggtctcggaaaactacagccgccctcagcgcgccttccgcccgcatttcttcgcagtgcattctggggaatgtggttcgctgtggcccagaggcgcgagggccggcggagtttcttcagaggaactaccgccctgggaggaagcgtctgtttagtttcaacacagacgactgggcttgggagcctacgaggttgcagtctggagggcgccaacagcagctaccagggctgcttttcctggtgggtctcacgtcagaccgttgttgggtgcccctacccgggctcctgagtgctgggaacgaggaggatggggtttctccttgttcggggatccagagattacagccgtgggtagggtcctctgaccaccgagcagtttgttctaggggatgctgcgtattgtgagaccctctgctgagttctggaggtggttgtcggttgctgattaccagggcaacccttgggattatggctgtggtgaggtggttgttaagagggcgtcactgagcctaatgtaatcctaaccctttcacagcccaatcttatttggaagagggcttaggtgcacgctctagcggggattccaatattgggccaattcccccaatgttggaatcctcgctagagcgtgcacttctggaagctaggaacctcctaactcaggacgtagactgatgattgattacagtttcaattcttcggaagatctttcttttaaagagaaaatcttacttcctgtcaattccactcgaggccccataattcatgaattcttccagagaactcaattgtgttactt

SEQ ID NO: 33834 - DNA, 828 bp, Homo sapiens
acaggcgtgagccactgcgcctggctgagttattattaagaccaggataagcattgcctctttcatggtgttccctgacccctttaccagctgaattgactcctctgcccttttggccctccttggggttcccccttcaatactatcttaggacccgtataacacctttttgtgtgcatttgtttgtttaggtgttgtcccctgactttcctagagctccttgaatacagattagtctggattttccgggtcttgtcttgctcaacattctatcccaatgcctatgagtatttggtaatgtttggtaaatgagcaaaagactgcttcctgcagggaatttgtcttaacagtgtgctgggatgcagaaatcccctaaccttaaacccagggaacttgacctgggtcataagaccagccagtggcactgcttactttaaaacataaacttcatggagcaaataatgactttttgcagatcattaacttccttgatgtagctactggccaacttatgaccttggggaaaggtcatggagcctcatctttttcatctgaatcaggaggatgtaggactatctgatcaccagagggaatagtagagggttaaagcgtgggctctggagccagactgcttatatatgaaacctggtctggcttcttgttgtttttcgcaagttacctcgcctctcagtacctcaggtatctttacctgtaaaatggggaactatagcacctacttcatagggttgttctgaggattaaatgaattaatatatgtaaagtggttaacacaatagctgttattatgattattttataattttttta

SEQ ID NO: 33835 - DNA, 610 bp, Homo sapiens
aaactcctgcactcaagcgatcctcctgccttggcccccacaaagtgctgggattacaggcatgccaccatgcgcagcctgtcattattaatgttatcatgaaattccctttgtgatctgaaatttatgactctgctctgtttttgtctagtagagggtttcccagactccttctctttcttgccccagactgaattgcctttttgctgttagtcctctttggaaattcttccctcttgctgacaagtcgcatcccccactgggctcctttacagccctacctacgcttcctgggctggtttggctggtgttgacagaacactcctgaccagtctgggcatggctcttgtgggagtatctgagggatgtactgccccctgcaggccaaaagcagtgactccactgtccggacctgagagttgaagctttctgtccttcggccacctctcagggcctgtgctcttctgattttggaataccaagaatgtgaataacagtatctcaatagagccttattgaagacttcctgtgtgccagtccctaataacagagaagtataatgtattaggggttaagtgtgcaggttctggaggtggagtcaggctgcttg

SEQ ID NO: 33836 - DNA, 889 bp, Homo sapiens
gcgggtgggtgggagggcgactgcagcatgggaaatttcggtggagaaccagatcaggagtcaccaaataccatggagatggtaacaaagcctacagggaggcagggattgtgcggggagtctgcagcagcaaaacccctgctgggatgaggggccgggccctctctgaccccagaccaggcaaggctcccgtcgtccccactttgccacacttgctcgtctagggggactgaccagcccctgttcgcccaggacttttctcctttaaaactgagagtcccacgtcccgggaatccccgagtcccaggcaaactggggtaaaccggaacaatggattacgcctcgcttatctcagccttaaggtttgtttgctgtctgtctcccctagtcaacggtcacaggagggactaggggctgctttgggatggaggaggaaagccgcaggaagcaccttggatcttttcccggcctggaaaccggcgccactcggctgtggcgtctgtgggtgtgtgggtggtttggcctcccaggtctcccaggctctcttcctcatcactctttctctccagggtggccggcagctcccggtggtgccacggagccctccttgtggtcccacaagatggcgctgtgtccaacgctagccccggcctctgccagagaggcagggggacccggagcggagccacctctgagcccttcccagactcgggggttcagggacgcgcaggcagcacgcacaggccgcctctttctccaggcatagtcgtactcacacgcactctcccgcccacccagaccccagatcccccgacactcacagcacggcaggagcataggcagagccaggagggacccgagggagcgtcagttccagtcccctctagag

SEQ ID NO: 33837 - DNA, 852 bp, Homo sapiens
ctttgaccaccacacggatcagagacgacccacacctacagtctccgggagctacttgtttccaaccctagatctatcatcaacttactgtgtcaccttcagcatttgaatttacctcttaggcctcagtttcccctctacaaaatgggcaacacctctttctcaggacagatatgaggatcaaagggcggaatgtctggggaaagcactttgcaaattgtaaattgctgggcacctggacaggggagttgttattcaaacagcttcctttcctctcttggatgggagccaaaaattgtgtataccccaccggttccggctgcgtttacctggagctcaggtgtggggctgtttctgtttagggtttgtttgtgtttgatttcaaaggcagggaaactccctcgcgcaggtgatgtgggcggagcctagtcaacacagttgccaggggaatcccgagggatgggggccctgatcaccccccacggtgatcaggcagaaactcaccccctggaaggagaaagggcagtgagattgcactgcagggacaggatgtcctttggagtcaggtgacctgggtgcaagtctggcttttccggggaaccttaggccaatcaccttctctcgagggcttcagctataaagtcagtccgtaggatttataatttgggaagcctcttttaccctgggaggctgggggagtcaagtggagaccaggagctggtgtgaccatccaaggtctcccaggccttgaccctgctgcgtgggaagtccctccccagacaggccctgtccccacctgcctctctggcttcgttgcctccgctctctcctttccactctgtgctccagcca

SEQ ID NO: 33838 - DNA, 1979 bp, Homo sapiens
gatggtacggtagtgtgaaatgctaaagagaaaaataactacggaaaagggataggaagtgtgtgtatcgcagttgacttatttgttcgcgttgtttacctgcgttctgtctgcatctcccactaaactgtaagctctacatctcccatctgtcttatttaccaatgccaaccggggctcagcgcagcgcctgacacacagcaggcagctgacagacaggtgttgagcaaggagcaaaggcgcatcttcattgctctgtccttgcttctaggaggcgaattgggaaatccagagggaaaggaaaagcgaggaaagtggctcgcttttggcgctggggaagaggtgtacagtgagcagtcacgctcagagctggcttgggggacactctcacgctcaggagagggacagagcgacagaggcgctcgcagcagcgcgctgtacaggtgcaacagcttaggcatttctatccctatttttacagcgagggacactgggcctcagaaagggaagtgccttcccaagctccaactgctcataagcagtcaaccttgtctaagtccaggtctgaagtcctggagcgattctccacccaccacgaccactcacctactcgcctgcgcttcacctcacgtgaggattttccaggttcctcccagtctctgggtaggcggggagcgcttagcaggtatcacctataagaaaatgagaatgggttgggggccggtgcaagacaagaatatcctgactgtgattggttgaattggctgccattcccaaaacgagctttggcgcccggtctcattcgttcccagcaggccctgcgcgcggcaacatggcggggtccaggtggaggtcttgaggctatcagatcggtatggcattggcgtccgggcccgcaaggcgggcgctagctggctccgggcagctcggccttgggggcttcggggccccgagacgcggggcgtatgagtggggcgtgcgctccacgcggaagtcggagcctcctcccctggatagggtgtacgagatccctggactggagcccatcacctttgcggggaagatgcacttcgtgccctggctggcgcggccgatctttccgccctgggaccgcggctacaaggacccaaggttctaccgctcgccccctcttcacgagcatccgctgtacaaagaccaggcctgctatatctttcaccaccgttgccgccttctcgagggtgaggccccaggacgggcggcaagggaccgtgttcctctaaccagcaccgaccccgaccctctgtggctttgggcaagacattgaaactctgtgggtcttggtttcttcgtctgcgaaatggggccgtagtgattcccgtcttctgagggttgttagaattgagttgtaaggagctgggcctctgtgcaggagtaatagagagtttgcgtgtcagcatgaaaagagctgctttctaggcctagccctggctctctctctttgactttgggcaaatggctggccatcctgggcctctatttcctgggaagtgaatggttttgactggacagtccacattgacctttccaggtctgacattctggagattaactgtatattttaaaagtagttggagagagtttatagtggagacagcaggatgtttaatctccaggcctgtcacctcttaagcccatgactactcctctgtcactctcactagggacagatcaaaatgactttgccaaaaccagcctgtctatctagaacagtaccagaaattattttccagagtccatggagaagcttgtttatccctttctccattcttccatcttcctcaaatcaggatagggatggggcaggtcttgaaaacagaatggttgaggtaagtggaaacagtattttccaaggagtgattaggggggaaaaaaaaggcaaatctggcaagattgggggactaagccagagaataaatcctaggtttgagaaaacttaa

SEQ ID NO: 33839 - DNA, 4093 bp, Homo sapiens
atggattctaaggccctctttgggagaggaagtgtttcagggagaggttgcctgggagttaacttaggcagaaacaggacatgaacctgaccccatactgtggttccctgcacttagaacagtgcctcacactgagctagatgctggaatggcctctgacccccagggcagtgcctgggcccagagcccagcccagactcccctgaaggggaggttcctcccactgtggcatgagcttactcagggggtctatcctgatccatgtcatgccgaggcgtgttattacaggattctgctggaattctcttcctcaaacctcttctgctacaagggctaaggaatttgaccttttttttaaaaaaaaaaaaagggagaaaaacctcagtacaatttgctgagaaggtaggtggggacaggagcaagagagtccacccctcagtcagctatgaagagacaaaacaaaaatactctccagccccgcaggggtctccactcccatccccctatgaaggacagaaggacctcgtgggggcagagggagcagccacggtacagtgctgggagaactgccgacctgcggcagagcagcttccaggcacagggaaaaatcactccattctaagaaaacgcaaagtaaaaactcaggtccaaaggagaaaggataaaccagcccaagctcttaataagcatgaggtgaacgcagctactgacacccatccttccagtatcagatccacagaagccagagattcgggagtcagtttacacccccagtgagggcttcgccaggagcagcagcaagaacagagcccaggcctcccaagtccaagaggccagagactccttcccccttccctccctcaaaaggttgaagagaggagtgagagtcccatcctgcacttgggaggccaggaggacgtggtgtgtagcccagctgggctctgtagcatggggctggctctgcgttagggggcagtcaaggcccaagcagctgttgggtgctttgttaccgagcaaatctcccaggcgctgcctgctgatgcatagctaactgggcggcagacattgatttatgttcaactttccatttcatcagtgagagttacggcgctacatgtggagttcacgtttttcagagggggagggagaggcggctcaagtgtgcagacacaaacatatccacatgcgtgcacacaggcatgcgtgcacacaggcacgcacacaagtcagggccacaactttttttcctatttaagagggagggcgactgagctgagccagccgccgccgaggcagcctggcacgtcaggagtaaccttttgtccactgttgctaggagccccagtgccggtcatctgccgctgggcagacgtcaggcaccaggctggctgccgggcagggaagggagcacagcctgacctttgcaggggaggtgttggcaagcaaaaaaaggctttcttccctctcctctgccccaggcctcttttcactggccaggagattgtggagggcaggaccagcccggacccatgtgcttccaagtggccagcaccccccactggacagaggagcaagctaaggccaagagagagaaggctggctccccgaggacacacaggaatttggcagcagggctggtatcccagagtgtcccactcccaggatagggggcttcatcacagtaactagaggaggggctgccgctcccagagccaagtcagtttggaacaggtggggcctaggggtggggaagagcagtggttccccacctccaactgtggcctggagcccagcagttggggcgccccacctcctctctaatccttctcagcaggggtgaccctgccttctgtcagtctggaggcggacagcagggcggaggagctggagggggtggtgcttctgtcccctggaggagtgaacacatccacccctgacacagcacctctgtcctcttccccagtaggaggctgcatctatcagacagactccccccacctgcagggaagcagagagggccaggcgagacccagaatggggagggggttttatttccccacagacaggcagttatcaagaagctgcggatcccaccgccccacccaggcctgtcttcctgagcaactggccaatttgagcctcagtttctcatctatacagtgggaatgctattggttcttaggactatctcatagaatcaaatgaaatcacagcagggaacagcttttctgacttggagagtgcttccaccagcaactattaacataagagggtgtcagacagttctactctcaggcctgagagcactggctggggtgggtggggagggctaggctgggcagccccaggtaaggcgtctgctaagacagcaggcaccagccttggcttctcaccgtcacacctgcctcctgcccccaacctatgtgggcagtaagctgggcctcctttaggctccaacatccactagaggccaccagtcacaggcaggaaagctgccctcagtctcacccagccgccactcctgctcgggccatggccacctccagaggggaccgcagctggactccacactggccagccggccaagggcccagcccctccaggccatggaacctcttcctgggatcgcgttgctccccttattaggaacctttcatggctctccccaactttaagtccttcctgtgtctattcctggctccatccccacaccccagcctgcagtccaggcccctgccaccccaaacttgccccatcacatcctggcacaggctccctctcgcctggcacactcccccacctcaattcactgccaattgcctcctcctcctcagcccaaatgtcaccccctcggagaggcttccccagacaagccatactggctgtgccctgtgcctggccccaacggtattcttcctgtcaacctctccagcgtggcactcagtcactgcctgccccctccaccagactatgagccccttgagggcagggtccgtggctgcctcttgggtggctgacaggtccctgcccttacacaccacgtctgaccgaggggctaagggacgaccaagcaagcccgtccgggtctcacatgacggggactcagctccttcccttgccctgccttcacttcaccatctgtcagatgggtggggaccccagcgccccgccaccaagcttccactagtaacaggcttcggaaaccaaaagcaaacaaggtggtttaattcttcccaagtctccccttgtcacaaacttgtcctcgtcagcaaagagaggcctttcctgctgcagcagctttctggcaggaggaatgtccgctccctctgctggctcctgcttcccgctggagagcagggcaggaaatggacagcatttggctcagcttttgggaactgccccagttgctgccaggggtatgttctcatttactgggctttgaccctccctgtgaacacatcacccaccccacagctcacagtgcccaaggctctccactgggcatcctgccactgcttagttaccaccactgtcaaacagctcaccacttcatcattaatttggcagatgacagaaatgtcttccatacaatgattcaaattggcttcccttttctctcaaggacttggaatgtggggctgagagctcacaggggcatgtctgagtacatggcaggttctccgtaacagaacttcagatacttcaagacagccatcagagccctcaggaggctgcccttctcccagagaaaccccagctacttctgcaggagatggggaaagattttgggtcatgcaagtttctctcccctcttattgtctgggtcatatctccggcttttgggctacacacattgtttgctctttctcgttctctccccataaccaatgggaagagttctctagggacctcaacatctttctaaggctggtgggcctggctggcaggaatgaggactcaacggaaaggggatgtgtcaaatactccctactatccttcaccaaggtggaaagtccctgctatccttcaccaagatggcaagtatctagatgttcaaagcaggatgagctaagcttttggcaacaggagctgg

SEQ ID NO: 33840 - DNA, 2451 bp, Homo sapiens
ggaatgccctcctgatttctcagcttggcagacaggcctctcctgtgtcctgccacaggggatgggttacctgtcagtctctctgctaggctggctgctcctgtgggcagactatggttgattcagttcgagcctggaaccaagccccatgccttgcatatcagagacggtcaatgacagtcataaccacagtcctttctccttctgtgacttcatctccccatctataaatgagaagcttggactacatcagggatggcaaagaggatatgtaccaccaccgacacattcacgttcatggtagacattgccagtcactatctgttgagcctggacacacagcttcagaatcattctcacggtgttctcagcagccaccacacatcaagcagagctggcatttgaatggggacttctttgctacttctttagataagagttatggtttctctatctcctttcggtctctccctccttttatctaattctctactctccctgcttccgccatccaatcagatgtgcatccacatttggactttggagtgtttgtggaagagcaccccatgaggaaccaggaaagctgggtttagactctgattacagcccctggttaacttggggcaagtcattcacctttctgagtctcactttcccaatctgcatgccttctctgcagaaacactgtgatgaaaatgaaagtaagttgcatgtttaaaaacactatgtaactgaaaacaactattggaatttaaaaacaaaacaagaagaaaaacagcctgtacccaatgctcagttctctatgacccctgccctcttgtgagtcccgttttggacttagaaatccttactggacagtgccctccttaggaccaccttagggccaaggaacttagaaattcttactggacagtgtcccccttaagggggaactagggaacccacccagatcagtgaggctggccaaagccaagctgggtttgccagatgtgcagcccaaccgagctaagctgcgtggaaaaaaaaaatgccactgcttgattatgtaaaatccatctggatccaaagcagaaaatcaaagttggaagggccctcagagaccacctggtccagcctgctccatctactggtgagaaaactagggtccagagatggggagcaacttgcccaaggtcactcagcaagtatgcggccaagtcctctctgtccttccctgctgcaaaacaccagaacaccactcctgaactcccaagctggcttcctgttaggccctccctgatcagaatgttggatctagtgctttggggctgcctgggctcctgttctgtaatgtgagcaatacaaataaactcagttcaaacatttactaggtccttagtatatgccaggtgctggggatgccaatattagggctttttttttttttaaaggtgaggtgtggtcaggtcagtttccaagccatctccctgccagcccttaacttgctaccagagacatctcatgccacgggaccagacaggtactgcccgccttggaaacctggacgtggaagaagagaaagctgatggccaaccctcattgtgggtggccaaaacttctgaccccaggagctgaagcctggcagtcagaggcctgcagaagcaaggccctgtgttgcttaccgaggggctgggatggaggtgggcagctgctctctcccacccaaccctggaggcctggggcttctacatttaggaccaggctaggggtgaagtcctgacctgaaaactgggctggccaccctaggccagggtctggccatagctggctcagccatcccaagccgactccctggtgcaaagcctttctgcagcagagcttcctacccaggccttggccaagcaggggaaggagtgcaattgttggtaacagataaaatcctcgataccatctctatttcccttctaatatcagagtggccggctgcaatactagtgaagggcagggccagcaatcaatagctaatattcctgttgtaagcaggcctactccggaaatgggcagccagtacctccttccagagagataccctttccccttggcagtgtcccagcctgagcggttcagcatcatggccaggaaggatcaggccaggtacctggcctagcccatccccctgcatctgactgatggggaaatgatgccgggaagtgagagaaaggaatcacccaacgtcacccaggaagcagagaggccaagacattgctctctgctgtctactggatgaccacgtcagctcttgatggctcgccgtgcctgggaaaacagaggtgacctcaagtcaagaaggtccaaaagttacctctgtttgatggtggctagtaatggctaaataaggacaggaatcagtcttggctttctgaccacacaccccaaacgtcacaggggagggcccaagaagtatgtctggaa

SEQ ID NO: 33841 - DNA, 1042 bp, Homo sapiens
gatattggattagggtgggtcctgatgcaatgactggtatccatatgaaatgaggggaatataaaatgagatgcacagggaggtgccatgtgatggcagaggcagagattggagtcctaggggccaaggaatgccaaggattgcagcaacgctggaagataagagaaaggcatgggcagatgctcctctagaaccttcagagggcatggccctgcgggcaccttcctcgtgaactttcagcctccagaacattgagactaagtttctgttgtttaaagccacctagtttgtggtactttgttactgcgtctagaaaactaacaggtctggaaatcattcactccaaggctctcaacactctcagccacccaatcacccacccctttcctcactgtgtgcactgttgccacttcaggattatatgactccgtgcaaccaaccacgaccttctgcaaacaccatccggagaggtcagagtccccatatccatctggggacagagacacaaagtcatctttatcgggtggcggactctgcccctcagtccgccaactgagaaccgccaaggaaagtctgaggtaacccacaaggtttgggaaatagaaggcatggggggcgggggggggggggcgggtgaggacaggtggaaattagcagagagtgggcagaaagaaagagaaaaaggaaaaggttcaaaaaggagcctgcgggtcaagaggacacacaagcaacaacaggaagtagacatcctcctgccttgccccctcagccagtcacatgcttctaactttctccctcacacacctgaggtctgcctgggacagcctccaacagcctgccaaacaggtgacacccagagcactggctacccacacagctgccgcacttcaagctcccacagtgagaataccagcccacttccgtccaggggttgggctttatttgttttggatttccaataccggggacttgctggggccaagtcaatactggaaggccaaggagatggctgggcagatagatgtggtgcaaggttctacac

SEQ ID NO: 33842 - DNA, 437 bp, Homo sapiens
agggaaatgcagatggagaggccccaggcctgcacagaggggcaggagggagggaagaggggctgagaaggagggtcagcaacaagacaaaggcgccgaagagctttttttgcacccgcaccaggaaaacaccagacaatgtgaatggtgcatggagatgaagcaacatcccaaagttaaaattaattagctgccgtattgacagaggctccattgtgccatgcggtgaagcaatctaagagcgagggcatcacacacaatgtcgaaaggcccttggcagccacaggtacgacagggtgaggacatgctctatcgtgtcaccaacctggttccctgaagaaaggtgtgcgtgtgtgtgtgtgtgttggaaggctagtggttaagaagtgtcagtgttaagactttcttaaattaatttcaaaaatgcagtaaccaaa

SEQ ID NO: 33843 - DNA, 928 bp, Homo sapiens
gctcctccaccaccagcgcatcaaaggtagatattcaaagcagtacttatttacaaacggcgatgcaaatctgtcccgacaacctgggcacccttgacagacacttctgccactgcccatcccaggagtttctgtcccaactgaggcctaggggtgtggctaccatctgtcaccctgtgaccaagtcatgaccatgacaatgatgactcacacacaaagagcctggcccctctgttacaagtccaggtaagtttttaccagctttgaaataaaaagcattaaatgacaaagcttttctacagaatgagagagaggtaaggccctctctcacctccaggacacacagtcctcagtcaagggcatttaaaacattccactccggaaatgccagagggctggcaaagacactacggttaaaggcaagcaatcaataaatggggtgagggtgccacaggcctcatcgccattactgaaagcatacccctttcccctggaatggtttccccactccaaaacccaaaactgaaacccacggtgctcctccctttccccacaaggtctgcctccaggccctgcctgataagccctcaaggttactccgtaaacccgaagggcaggagtgctccaacagcccaacctcagtgtgctgagtgctgagtgtatacaggccactgggcacacacactgaatcctgagaagtgagctctaggcattgttgtctgcttcttctagatgaggatactgaggttgcagaaaagagcagggtcacacaggtggcttgaggtaggacgccagcagccaggctcttaacactcaggaagggtggtgcctccctacccatccccccagcatcatagcagggatctcagatctgctggagcatttccagcgacagacacctataagacacatttttacaaagccactg

SEQ ID NO: 33844 - DNA, 349 bp, Homo sapiens
aaaaggaaaaaaaaaaagaaagaaaaaagaaataaagaagtccctgtactacagtgtggctagaccctccctgaagaacagataagagccattcacaattagaagcaaccctgcacacagagaccacagctccaagccctaagccacccacactggaatcttgtttatccttggctaagcaaacacaagtcttcttagataatgcaaaggtcaactgtagacttgtatgacctgataaaatcgccaccaaccctgaattacagggtgttcaataataaaatatttctacagagctatgagggagagagagaaatcagaagtgggctattttccatcatcctccattaac

SEQ ID NO: 33845 - DNA, 927 bp, Homo sapiens
cccacctaggttcctcaaactcgcaagccactcgaccccacagccaccttgcctttcccgacccactgctcgctacgctctcgccagctttggaggtccgaggagactcggccctggactccgggtgcttggcgcgctctggagagggcagcaaagcgccaccctcgtcacctccccccaaacaactgtgccccaagcctggggccaagccggcaccaccgtcgctgcccagcccggcgtccgaggacgcggagccggtgacgaagccgaggacagggaagggagagcgctcccggccgaacaaagcccccggcacgcactcctcacgccgcgggcggacaaaaggaggcttcggggctgcagaagccacgcgccccctgcccgcacccggtgggcaaagtgcggccaccgcggggagcgcccggctggggagaacgtcgaggctcgctggcgggacctcgcccaccactcaccgcgggcccccgcgctcgacccgcgccacggccaccaagtaccccctccggcggctccccccaccgccccttccccgatcccccaacctccgccggctcccaacaatgggctctcccacgccgcccgccgcggcctcggggaaggggccaggcaggcggcgcctggacccggggacccgagggcgcagcagcctccggcccccgcccgcccgcccacctgcctcccaccgcccgcccgcccgcagcccggcggcggcgcggccgccacttgcaaaatagggcttacttttcccgagcctgcccatccgagggcaccgccgagcctttgcctttggcaaacatggtttgcagggaagagggcgccgagcctcgccgccgccgccgccgccgccgctaccgctccggctctcccgagctgcccctcgctcccggccccctccccggcgctcgctcg

SEQ ID NO: 33846 - DNA, 2766 bp, Homo sapiens
cctggaactccttccgcgccggctcggcctgggggtgccgccgccgccgcccgcacggccgcccgctctccgctcgctcgcgcgcccgcccggctccgcctgcgccgccctctgcgcctccagcaccgctgccgccgccgccgccgccgccgccgctggtctacttggagctcaaccgaacgtggctacccgggcgagggagcgaggcgggcggcaacgtcccgcgatggatggccgcctcggccaatcggcgcacgcgggggcgggcccgggccggctgggagggacgccctgacagcgccggccgcggcagtccccgctgcggccgcctccgcggagccgctgcctgctcctgcaggcgaactgggggcgtccgggggcgcgagcctctctttctgtcgccggggcggtgggcgacgtggatcgggctgggggcaccctggtctcctcgccccagcgaggagggggatctgacccgcgctccccgcggcgtggaccactggggggctaggggggcgctgcggcagcgtccgatgggagggggcgcagacccccaagcggtcgccgctcgctccctcccgccccgtccctctcccttatctgcccctcagctcccccccgccgcggcccgcaccagcccagcccttatctcgccctccgctcttggttgtcctccccctaggctccgaccccgaccccctccccagactccagcccggcccccagcccgccccgcccccgggcctccctctcgcccagtctggcttccgagcgccgggcccggggctccacgctgagagctgggcggctcgagccggcgccgaggcgcgcggctgctcctttactagatcattaaaatactttggaaaaccccaaagtggagccgcgcgaaaatggcccttggcgtgctttggggagccgggggggaggggggctggggacaggggacttgaattaagaggagggagagtgatttctcccaaatttccaaggtttgccagtcttggcaagttagcccctcggcttctgcacgggaaagggtgccactcggagatggggggcgtcacctgggcggcccgcgacgcggaatgctcgccacagaaatctgcaaacttcaaataaatggagctaaattggggagtgaggggacgagagtcaggcgtagggggaggggaagcttccattgtcagtgacccaggtgtacaatgggaaattgaggggggggctggcagagtgacccagctatttgctgctgactcctttctgcccacgccgagaacccagaagacacactgcgtgcccctcattagggactcttaagaccagataccggcgaaataggggaaggctcccccattttcagactgtttttagagagcggatctctttaaatgtgataaaacactgtcggcactgtctctttaaaagagtcaagcagaaaaagctgtgtaagcgctgattggctgcctgtttggatacatctttaggggagccttgaaactgttagcctaggttgattttttttttttttttttttttttttttaactgcgctgttccaataaacaagtaacgcccctccccctaacatgcctcgcaccaaacaattaaaggataggtcagtgtcctggggaaaacacgtttcaagtaggaaaactcagaactagatttcaacaaaataaacaataattccctaccattaaagtttgcttattttgatctgtagaagagagaaaaggggcttttaaaagaaatgccccgcagcaaaagaatctgcattggttcaggaaggagactctgggtgcatttttggaataatgttctactcaatgtaacaacctccctaaattagagtacagccaggccctgcggacacctctggactcactctgctcccttccaggacccagcgctcacaggggaaaggggcagaaaaaaggaacgctgagacctagtttatgggcgtctgtgcgctagtccctattttaaaggttgtttcgtgaatgagggaagcatggaggttgggagttggaatacaaggataggggagagaaggaaataattacagttattttttcccctaggcggtttaatttaatagggctaacttaaggtaccttagagcccacactaattaaattggcctgctcatacccttgccctggacttccttctattttgaatgggctaggaatggccagggatggcttgtcaacagactgactcacaagaagcctgactcatcttgtgtctgcaaggcccacaaattaggagtatcggtttggtcctggctaaaaaaaggaagacactgcccttctccggccctgctatgacccaggactcaaccagattggccatgcccttatcaacttcatggctgcaacacaagcatatctatttgagcatcagtttcttcacctgtcaaatggcaaagggaggttagaagatatacagtatctcttgataatctgatgtgctacaatgttaaaatttccctcctatatttttctctccctaccaccaccctggaaaaaggactagcacctcctttccaaacatgtggcaagaagagaggggtagggttcagagatcctgtgccaggcactctgtggtcagccctttgctggaacttgacacaacaaagctgcacgatggttggtagatcccttgttggagctaaaagagatggtgagagggcccgggcagagagagcagggagagtgtcttagccacccctcacccctgctggctagaagattgctgaggg

SEQ ID NO: 33847 - DNA, 619 bp, Homo sapiens
ttcaagcgattctcttacctcagcctcccgagtagctgggactacaggcacgtgccaccatgcctggctaattttttatgtttagtagagacagggtttcaccatgttggccaggctggtctggaactcctgacctcaggtgatccgcctgtcttggcctcccaaagtgctgggattataggcatgagccactgcgcccggccagaaatgtgtatatttttataagagaaattgcttttattccaggtactattgttgcataaccaccaccctgaacgtagtggtgtaaacaacagccgcttgactgtgctcagggattctttggaccttggacggggcacagcagggatgtttattctctgctgcacagtgtctggggcctcaactgggaagactacaagagttcagagaaagaatcttctggaagcttcttctctcacatgtctgatgcctgaattcggatgagttgaaagttgggctcaggtgggattatggcctctccttgtggcttgggcaattcactgcatgtcagctgggtttcaaaaaggagagtcctggcccggtgcggtggctcacgcctgtaattccagcactttgggaggccaaggcgggtggatca

SEQ ID NO: 33848 - DNA, 541 bp, Homo sapiens
gtggcaagtggttgccatactggatagtgcagctctagaaaatgggctcttcttggtcagggactctatttttcatctctctctttagtgactagaagggtgtcctaggtagaggacacagcatttgcagaaacagaggcatgaaagaacagagaatattcagggaacaacacgctgtttggtgtggccggcgtgtaaggtaaatcggtggggagaagtgagctgtggggctgcatatgtgcctggagccaggtgaagaaaggccaaaggaatttggacttcggttatgtgggcaactcaggtcatcgtttatttataagcagaggcatgttgcattcaggttaaggcttcagaaagagacttctggtaggcagcctggagggtaatttggaagggatagtgaggaggcaaggggaccggctagaaagctgatgtaacaatatacgtaggtgaggagtgatgaggcagcggggaatgcctggagagggagtaagaaggcagaacctcaggacttggagactggctgcctggaggtggagtg

SEQ ID NO: 33849 - DNA, 2431 bp, Homo sapiens
ttataaagagacacacgaggaacgggagaattagggctatccccattatatatgaagagagggagagagagtggagaggcaaaaatactttttgaacattagatcctttcagagaagtgtcttttaatatgcagtgaataaaacggcctgtactcctcatggaagtggtgccctgtgcccagaaggcatcagaaagcagaaacctggttcaggggcttaaaaaaggaacgggatcgatgtggcgctcgcagtgcccagcatgccggcgttgggtagttggcaggagagcaagagagagaggaggcgcggttgagggtttggccgctgggaaagaggattgagagccagtccggggtttccaaaagagagggacttggggcacagaatctctggcaggtgggggagaaacggctaccgtcaccccactgggcaccgcatgaataacccagatgtcggcgaaggggagcccctggtttcgatgagcccactgcaagccagatcccatgaacttggtggtgagggggttttagatagcagctttgcccttggacctctgcatcccggatgcccgggcaagaccgccaatatcaataacccaacttattatataacagcctcggagaccgggaagcaggggtcaggtcctcccaagcttctagagctgtcggtggaccttctctctccttgtctctctccctctgatttttcttgagacaagctttaaaatggaaaacaggcttgtgcaggaaccaaacacacagacagggggtggtttgtagggatttttccccccacctccctcgaggacaagcaactcttgcagcgccactctcggccttcgccgggctgtaggctcggcgcctggggcggcgctgggggggcggtgtcggcccgggcagcagcctccgcagggttacccgggcgcgtgcagggaaacgtctcagcaattccagcgcccgagcggagcgcgcggtgggggtgggggcgcgcggcgcggggcaccttgaaaccgccggcggccgcgcgctgattggccgagccgccgcctcggcgttccagccaggcgcccctccccccgcgccgtccaccccggaaggaatttcctcctctggcggccgctattgttgtccaccttcgctgtttgggtcggatcgcgtaaccatagtatccaaaccgtgtccgcgcggggccccagcctgggacccctgtgccctcacccccccagcctaccccccacttttttttttctttttgcagcctacttatcatgacttcatcggactccggggagcgggaaagggggttggggcgggggggcggggagtgggcccgcttctggcggcccttacttcgagatgttttcaattacaattttttaaaaagtctgctttgtgggttcagggcttaaaaattcttcctacttgcccccctccccatgaaaccgttggaccaaacttgaatgggggtttccttcttttcccctttaccgtctatgctccagcccctgactttacggctcacggctgggggtgggggaaattcgcagcaggagtcgcccccctcaaacgctacccttcagatcatggctgtgtcctggcccctgggcctgggtttgagctggggaagcgaggctggtggtggggtggaaacatcacgcactgcagtaccccccaccccggggcgcttcctggcggggttgggggatccccggagatggatctggggtaggtggtacggggtggatgcccatcaaatatcggggaggggtgacggggataaaggggagacgggggaagcagctgacaggttattggaagaacaagccccctcgcccctcgaatttctcccacgggtctctgagctcagacatcctagtccgcgcaggcagcccgagccgaatgcctgctcccaaccccggccaaaaaaaaaaaaaaaaaccaaccccaaacaaaaaccctgtgcccagaattgcattcggctgggagaggtggggatccagcagcaagtccgcaccgagccggctgcgcgcagcgcgggagcccccgggctggggccggcagcggggggcggtgtgtgtgcgggggggtgtccaacattcccagaactcaagtattctcccggcgctgagccgggcgggggcagtggcggccgcggcccaagttcggggcaacactgccccctaggggccgccgccggaggtttgcagctggggcggcgaggggtctggaggtttgggtctagccctgggaccagggacttgactttggccctcagtgtttcaccggccagcggagccggggagttacctgggcagggctaccgtgaccccctggcagaccagtgacaggctagaggagagccttcaagtgccaatttagggagctggggagatatagtagtagggtttgtatttttgctctagaatttaaaa

SEQ ID NO: 33850 - DNA, 918 bp, Homo sapiens
gctttttggaaagatccctctggtgctgtgtggaggctggaaggagttagatcagaggcctgtttaaggtcggatcattgggacttggatactgggcagagggaggaaaccaaggtgaagccttgggcctgtttccagccccagtagcctgtgggcccagtagcctgtgggtctgttgtcaacttgcctagaaggagccgtggcccagcagggcttatattggcccccgcagctgggtggccctgggccagcttttccctctgtgccttagtcccccaggctgtgaacggattgggtgagggggtctctcctgccctgaccctgcaggtctgtgacatgactctggctcaggaggagggacacagagcccatggtgtggctagctggggcctagtctagcattatcaagtctggccaggtctgccagggcctggggccagcacttggcacagctgctgtctgagagggcacatctccgacctctgggtgtcctcctacccttgcagtggttcagcccccgccaccctggtagctctcttggctcggcctgcctggctgcccaggccctgactctatccagggcctctcctctccctatgactggccctgggaggagtggcccagctctggagccccattggccaaaacttgcctgggctgcacacacccctgcctcccagactggctgcctgcccaccttgggactaggaggcctggcctggcatgccctaatgtgggcagactgccttggagcccaaggaaggagtggagtctgaaaggctatgcctggggccacctgctgctctgtccctgctgcctgtgctccagcccacggcttctgcgcccctctctttgaggggagtggtggggatagcaactgcgaggcttgtctctcagtgtgcttcaggggccctgctt

SEQ ID NO: 33851 - DNA, 686 bp, Homo sapiens
acagacacacaggtaatgccggcaaacacccacttgacctgattctttgataactgctccctgcagaccatggcgacgctctctggggaatgcccccaactccgtgcggcccagagtccctgaggctccctgcagctggaatcctgtgggaggcaggagctcccagcagcacctaattctccaccgggcctggtctgctctgcagccctgtaatatcccctctggagataacccctgaagcccctcctccctccccgccccaatcctcttccccacaccctcccaggatcttaacaggctaaccagaatatctaccatatctaaaatgacctttgagcacagtaagaggcagcagagaatgttggaccgagccccgacccctggctgtctgcccctgcttgggagtcaggagaccaatcccagcccctgttgcttttctggagtcctggagcaagtgtctgccggtctctgggcatcatttccttccgtgtaaaaggaggcactagactgggtgatcccgaacattctgttctttccctttctaactccaggctttctgccctgccctcagggaatcctgcattatcaggcaagggtggtgacaaagacagattagatctgcgtaaggggcaataatcttcctttcatctgagattatggttaacagattatctacctgggataga

SEQ ID NO: 33852 - DNA, 507 bp, Homo sapiens
agcctgcctctttggaggaagtcaaaagaactctgcaagggtggaacggaaaaggaaagggacatatggaggggcaaaaagggtgaaaaggggactggggccagatacagagggccttttgggtctgctaacaactggaggactctatcctaaagataacaggaagccatggaggggtttaggcaaggggatggcttagagatggtgttggctgcccagaaggccagtggggtgagtgaccttcctctctttgaccttcacttccttatgtataaatattaaacttactctctctctctctctctctctctgtgtgtgtgtgtttgtgtgtgtgtgtgtgtagtgcggagcttgttaacagacgtgcatgcctggcctgtggactgtgcagtaagtgttgaaaaaggcactcttccctgacttgatttctttctgcatctcctcccaggggcccgctcctgcttaaaaacaccatgcatgcaggtgagctgtccctatgattcccac

SEQ ID NO: 33853 - DNA, 2311 bp, Homo sapiens
cagaggtctgatcagtctctcctttcctcgaaactctccaaaaggtcccataccactgaggaaatagccaaatcctcatagtcacagcccttttgtcctcccacctcatcatctccttgcccccttcctcactctgcttcagccccactggcctccttgctgttccccaagcacagaagactctcccgcatcaggcttccggactgttccctgttccttccatgggaatgcctttcccagacccctcctagtcactcccaggcctctggcagaatgtctacccatcctgtttaaaacttttccccaatagctcttgctacccctgacaaactcttacatctcaactattgtcgtttcctccccactgccttagcaactcctagagggcagagatttcatctgctctgcccaccgctatatagccagccactagaacaggccggaagcgcagaaagagctaagtaagtatgtgttgactgactgacgaacaaatgaatgaagtgagatgggggctttggggattcgggttcacgcaccaccccaaaagcattcgaaggccgggcgaggccaggcactgccgaggagggcgggccgggggaggagcgtattggccacgcccggccacgcccccaggccggcggaacccaaggcgcggggacctgcgctgccgggaggattgagggaagggaacccgcgccgccggaaggagccgctcgcttcacggcgctgggacccgggctggaaggcagggcatcagctatggaacaacctgggcaggatcccacctcagacgacgtcatggactcgttcctggaaaagttccagagccagccttaccgtggcggctttcatgaggaccagtgggagaaggtgggcggtcctggggtctccccacgtgtgtaggggcgtcgtccggactcgtggggcacccgggctctggggcacctccttcaatcccagatccctggcgctgccagccgatcgctggtttctagttgagtattgaaaatcggcctcgaggttttgagtcgcttcttaagctgagaacctaggttttggagtcaggcctgtgactccaccacttaactggctctgatatgagtcagttacttaacttctcagagtccgtttcctcatctgtaaaactgcgcgaactatatcaccaatagcaaagatgaaatgagacagttggtaaagtgccaagaacataagggcgctcaattaatggtaattcctgccgctcttgtagaatgtgagaactaaaacaatcattagagaccattacaccacactcccattttacagaagggaagcggaggcctgaatggatacagctagctgtgatgatttgcaaatcatgatgagtaaaaaaactttggtaatgagtcatggaattggatctgctcagtagaaaagcttattcatgtagttcattcttaaccatttacaggaatttgaaaaggtccccctatttatgtcgagagcgccatcagaaattgatcccagggagaatcctgacttggcttgtctccagtcaattatttttgatgaggagcgttctccagaaggtatcttaacatgactaatatttgttttgtgtttccattgaactgaaattaagtgtgggttagaagcgttctgattgataacaagaagtagttagcctgagctaacttgtcattattcattccaatatacttctttttgtacctactaagtggtaaggactggggatacaggggtgaataagacacagttccaccctccaaggtcaggctcagtgagaagccttttgtcttaaagaatcaagacaaacttatgctataagtgtcaacatgtaggtgtatactacagctgtagtgggtcctgttggaacactttaaggagcaggagtggattcacaatagataggaaatttgagctgaatctttgtaattttgtaggcttttactagggtgaggaggggaatttgcactccacagaataaacaacataagcaaaagcagaagtataatcaatccccctgcccctcactgatttcttcagtgattaaaaaaaattcttttcttcaacagctaggatgagtgtacttttttcctttatacttcttttttttggaaagcacttagtaatctaccttgtaagatatttggaattagcattacatttgtgcgactttgtccatgttgatacccacttttatcataacatcgagtttcctttccctattggtttcttcgctttggtgtgtcatatagtacattattacatgatttagaatctatttttaatgagccttttaaaaagtaag

SEQ ID NO: 33854 - DNA, 2667 bp, Homo sapiens
gggctttcacacagattccatgtgatcctcagaacagcctcatggaatgtaaatggagtatcattaccctctttgtacagatgggaagactgaggcaagatgctatcttcacagtcacatgtccagtgtaacagtctcgactgaaacctggagataatgctcttttgctatattaataatagcaacttttgaacacttactatgcaccaggcacttcatttacatgcgttaccccattagactttctcaagggttacctatggggtagggattgttattctcccaagtttacagatgaggcaactgtggcacagagtggttagggcatgcacccagagtgacacagctagcaggtagtagggctgagaactctgcgagttagctccagagtctttgcctccaactaccctagacaagcggttttcaaagtgtggcccccagaccagcaagatcagcagcagcacctgggaatttgatagaaatgcaaattcttgacccactgaatctaaaactctggggtgggagcccagcaacctgtgttttaacaggccccctactgcatgctgaagtttgagaaccattgcacaaggctctcactgtactaccctaaggtggagcaaaaatgggctagaagatttgtctcttttttagtgagtaaaaggatcagaaattgtgatcctcagggaaggctgaagatcgaagctcctgtgggctgggtgaggaagcaaaaaaggttagtgacccgacagaaactgcaggaaatggtaggattaggataagccattaccagagtaggtatgtcttaactcgggtggggtacaaggttggatatcagcatcccatttacttcaaaagatggccccaaaagaaggaaatgttggggagcttggctattttaagttattccaatagaagatctttcactaccccaatgacttacaatatatatgcatttgaataggctatacagacaccttgcttgttcttaaggaaaatatttgccttgtattttgaactttgcccctgatgacaggctgtcctctagattcagagtcagttcctgaaagctgactaattttctttctggggaggaggaatgacaaacaggaaagagaatgaacatttctccagtgtcactgggctcctcagtgcatcatggcactgggttctcacagcagcctcagaaggtataatgcatcttcctccttttacagatcaggaaacagagactacagaaaaagccaccggcccagccccatagcccagggcagaagtgccaggattcaagttcagatctgcctccctccaatgcccctgttgtttccacctcatcatgctgactctgtgaaggctgacactgcagaaataaaagtcacaaggtggcaggcctgtggatatgtccttcctgcacaactggaatgtcctctgtgatgacacagagcagcctttctgctcctgcacactgagccccgccccacctggccccagcctgccgcctgtgggccatagtacaagacaggcagggaagggggttgctcttccccacacccagctgtgggtggtgatgctcttgtgctcctgccttgtcaggtgtggggaggaaacagaagatgagattggaatcccacccctgcctctcactcctctaggggtcctggagagcccactggcatggctcagcttctacatctgcaaacaggggtgaccccatgtggcctgcctgcatcataggcatgttggctgaggtggtatgcgcacaggtggagggaatttgggacttgggtgttaggccatggaaacaaatatttggccctgtcttgggctccctggacagttccctgcagattttaagctttgagcggctccctgctgccacctcctttctggtcctaggtctgtcatgcaaacacaggccttgtgagtcagctttgctctgtgctgggtcccagacttgctggcctgtgttgagccacttctctgtttcattgtccctagtgagagggccattccctatctggtccagcgtccaaatccaactctagcaccggtagtagctgagtgggtctgcagaagtctcttaccctctgcagtaacaacagtgatgcctgaattttctcagctcctcccgtgggtctgtgctgtgctgcactctcacatacatcatcttttctcctgtaaaagaggtggttgggctggatgatgctaaaatcagctttctctctgggcttctgtatctatgaggaggagggtacccagctctcaaacttcccagctaagtggggagagaagccagtagcaaacttagagggcactgatatgcaaaggtgagcaccccaagaccacataaggctggagccagacccttaggaaagctgtctctcctcctgggctttgatgtcccatagacctgagttcagttcctgtcagccacacgtgcccttgggcaagacacaacgcctctctgtgccttagtttgctgtctatagaatggggttaatggatttgccagcatttctgtgatgatcaaatgagataatcgatgaaaagcacttgtgtgcacagtgcctgggatatcatccagcttcatctacctcctcatggagctgaaccaaatcaaaccactcagaattgtggagtcgtgtgtgtgtgcgcgtgtgtgtgtctgtg

SEQ ID NO: 33855 - DNA, 1981 bp, Homo sapiens
ctgcgaggggtctcccctcaccatcctgctcgccatctgcattataccccatttctctgaactctccagaaagagcaaaggctgtgcagtcaaccagggtggcatggatttagctgccatttactagctctgtgaccctgggcaagcctcattccttgccccagttcagctggcactcaagcccccgtgctctgcaggccccaccatggggcctttgcatgcaccatgctcctgctgggtgtgtcccccctcattcctgcctgggaactcctgctgaaggggagtgttccctctctgcctcagtcactcccactttatccacagggcccggactttccaggtcactgttgataccaacctttggtccccatatccccagagtgtactttcattgtcagcccctggggccctgtttttggttcagaaagtgtgacctctgggtgtacagtacttagagatgattgccaatgacacaggcctgtgatgaatgcctgtgtcctcagccagtggtagacacgtctctgatttgtccctttggaccattcccagaagaggggctcaggtaagcatagttaatgaagaagcaaatgtttgcttctccttttgttcaagggcttcttagaggcagggacttcttaaaaacagagcctggcacatagtaggtgttcaataaatgttaaaatgctcagtaaatgcctctcagacatgcccagaattttccagtttatgggcatttttactctcatcatttgttgcataatcccaataaacctggagctgatcaatgtttatgaagcaggaactcaggcaagtcacaagagacgacaagtgacttgtccacagccacacagcaaaataataacagaactaggtgctcagaacgaaacctctgactctaaaagtgatgcaaccatcattattgtcatcctgcctgcaactatttcttgagcacctactctgccaggtgctttagaagcatgatgtcatctaatcctcagatgataaatagggtctccaaatcccaaactctctctggaggtttgtgtagggggctgaccacagctgctctgtgcagaactgtggagcagctgctgggccatgccccaggacacagcacagggttggcagccacacccccatgaagcaatcggctccctccctggagtgctgggcaccctgcttagcactctctcatctggatgttcactcactggggaatccccactgtggccgtgttcccagagagggaagagccagcctctgatagctacccctgaatcactgctttcctgctcacctcctccaggaaggcttcccccagtgaacggcctcctaagagcaggaaagtgcctcagagaccatgtagcccctgcttcctgcacccctttcacagatgaagaaaccacagcccagggagaagaaggccccactgtgggtagtgttgcagctgagacaagaacctaggcctcctggctcctagcccagggctcttcaggcccctctctgctgccatgacctgctgtcatgaccgcattcaacacatcaatcttggttgtgccttccactgaaggtagcctggcattcagggccacaggctcaggactgaaacaagagacctgggttcttgttgacctcatgcaatcagtggtcatgtctacacccagcttaggagcagaggaagctctcccagccggggagagggaggggtcatctgtgaccctgctcatccctgtgcaggctctttctaggtgctttacaaatattaactgttaattatgacatcaaccaagtgagggatgtccctgttttacagatgacaaagcctatgacatatgtaacattactatctccatcttacagggaggggaaaggagcttggtggtgctaagcactgatttgaagtgagtgagcacgggggagctggaatttggatccagaccatctaacccagggtcagctctcttaacccctaccctgcatg

SEQ ID NO: 33856 - DNA, 1746 bp, Homo sapiens
tgaagccatgatcattcatggaaaaggcactgaggggagtgtgcggagcctttgtgaagggagctgtgcttccctgtgctcccttcacatggaggtgagggggagagaagaggtgggaatgtgcccaagtttctggcaggatgcctgactgtgccttttacttaggtgggtgtgcacaggcgcaggaacaggcacttgctgggaggagcaaggtaagaaggatgaattgtccaggttgggcttgtgctgtttccaaaagagaggcttgggcaggcagtcccactaggaagcggttccactcccaggagagagctacaggcctggctggggcaggcgggggatgcacattggaaaggcatttgggaggccaaaagaccatggttgagagagagtcaggggtaccggggcatctctgcagacagaagggaccatgggaggaccacagtcctcccagagggaggtagggagacaggggtcacctacctgctgcccgtagcctagcgccttgtcgtagagcgcgatgcctgccgccagcccccgcgcacgctcctctgggctggcgcagccgacgtcgaagccatgcgcgtagccctgctcggccaggcagcgagcggcgcggagctgggggtccccggcggcctcgggctcctctgccaggcccatgaggtcggccagccgtgcggcgcacgcctcctcctcttcttcctggcccagccgcccgtacacgtgtgccagattggcccaggcattgaggttgcccgggtgctcgtgggccacctcgaggaagcactcgcgggcctcgtccagctcctccaggtagaatgcgaaagcgcccaggaggtgacgcacagcggggcgctgcggggcggccgccagctggagctcctgccgcagaccctcccgctgcagcttcaggtcccgggcgcgctgtggggccggcgagcgcggctcgaagttcaactgcatctccaggtgaaagtggcccgggaggtagtccaggtcgtcgatgagggcgtctagatcgtcggccacagcctccagctccgccatgactgctccctctgctcccctggcctcacccttgtccctgaggctgtggagggcagtggatgggggcgttccccgagcgagctccgtgcgggaggcgaggggcagccggcagaggccccgggcgctgcggcctctcggtctcagggcgcctcccgcaggtgggtgggcccgaggagtgccctgtaggtgtttccgctttcgctgctcagcggcttctagacgctgacattgcacaaccaggtgtgccagaaaaacaggcacattgtcaaatacggggtgcgcaaacctcggtgcaaggcaaaaggcgtgtttttacgctgctaagcagaggaggaaactgaggctcaagaggaggaagagaacttgcccaggtcacagagctggggcgtacccaagtaggtagacctggaaccccagtttgctgaaggccgggcccttcctccaggggcgctgctccgccctgtctgcttgagctgagtcaggactggccgttctagctgcggcagccacccttactcctgccgctgtcccatcctctctgcaggtcctcagtgcttttcctctgaatggagcctgccacctccctcctctctttttgggccattatttatgaggcttccttcctgggatttctctgcgccctctctgctcagcagtgagctcctgtgcaaagactatgggctgcatgtgctggtt

SEQ ID NO: 33857 - DNA, 2651 bp, Homo sapiens
attgctggatcatatggtaattctatgtttaattctttgaaaaactgccagactgttttccacagcagctggactattttactttcccaccagcaatggccaaaggttccagtttctctacaacctcaccaacgtatgttattttctatttttttttttaagataatagccatcctaatgggtgggtttggcttttgatttgactctgaaaaagatgagtaagagagttgggtgggaagggtaggttggtggggagcgcatatcatcagcagcaaaggtatgaaaaagctagaggttctccaggggagggtgtgtcctagggacagagcagccttgtggctggaggttacagagcatggggcagagatggcaggagatgaggactgaaggcaggggccacagccctatcacagaggcccaagtcctgactgagaagcttgacttgactccactgacacaacagtggctctggagtctggacgggttaaacagtcttgcagccagggagctctccaatgtgcttatgagtcccatattcatggtgtgaccctatgcctcacgagatgtgaccagggcaagttattctccccatctgagccttagtttcctcttgtgtacaatgagggtgcaatggtgcctataaaagaaaatgggtgagatgctagacaaggaagctgctgtgatgggaaactttgggctgaccagggcaggcggccttgctgcagagctgactcatttggcctgttctggctttcctggcagccacgactcccagcccagtggaccttggcttatagcctttggtcactcctccatgagtcctagagccatggggctcaggccagaagagaagcagcaatatagctgcaggcatgtctgggccaccctgagaatacccaagcagacccagggctggctgaagtgcacaggactggagagtgtgcacatccacaccttgttgacacctcaaaacagcctttccaggaagccacagtcataggtccatgtcacagaagaggaaatcaaagttggcaagggtaacttgcccaaggtcagcacccaggaagtggcagagccagatttaaatgtgtctttgaggatttatgtgttattgggtagtttgaccagatgcatgtattcattcccttgtcattcaacaaatatttcctgaacatttactatgtgctagatgctgcaccaggaggaaatgagacaagtgtctgtcctcaggcctctgtaaaggtctctaaccaagggctgggaatgacctccaattgagctcctgctgtgtgccaagagtattacctaaatcaggtcatttcatcctcacagcagcctgggagatagagacgattactttcattttatagaatgaaactgataatgctgtgactcagagaaagaagtgacttgctcaagatcccacggctgggaagggcagagtctgcttagatgacccaggctttccgttctgtgcatgttcctgaggcctgccacctctgaccatcagctcagtggtgcagcgcagacgctctgccagcagtggcccgccaggcctggagcctaagggtccagctctcagctgtgctggggagccacacttcttatctaactaccagcttgggatgtcagaagggcactgggtggggcctggcagaagacccactgtgcctctggtccaggttcaccatgggctggaagcagggcctctggtacaacctacgcctctctggcttcaatcctgtcaccatggaatggggtatggatctctgccccacctttgcctaagatccttgggaagatcacaagccatcgtgagagaaattagacaatctcagagcatggctgtggagcactggttggggggtaaagaaggagggaagagagagctgactatgccctgtgtggggtacataccctcaattcctttctttacttggaaagtcatccatatgcttcaatgttgagtttggaattctcctccaagaagtcttccctgacctacctacccacaggctgggtcagaggcctccctctctcatagacctgaccatagtatgtggtcattgcttcccccattattttcagggcagggaccacatctgggtcccagtcattctgcactgtgtctgcccagagtgggtgccagggacgtctaggggccggttgagtcctgactacccctgcagctttgcccagccctccaccctctggctctccttgccctttcccccttacttctgctcccctgactcccaaagtggagaaggagctgggatgtcatttgcccaaggcggccctctctgtgggcctcagtttcccatcagcacaaggtgaactttaaaaggttctttctgagcctaggcaggctccatgcagggctctgggataaagccagaaatcagaaacacttcctcaacaaatgactgtaagaccccacccaatggcatccatattaaatacaagaagggccattacatctgcaggggccagggaaggaccctgaaaatgtgcacggacaagttaaaaatcagcgggctacgtgcgcacgccggtgggggcgccacgtgggcgagggcgaggcccacagctccggggcgcatcacaaggcccgggttgccgtggcagcagcggaggcgggcagcgcgcag

SEQ ID NO: 33858 - DNA, 3380 bp, Homo sapiens
agacacccacaaccgcaggtgtggaagacacaggccactggatgagtgtgggaagagtggggacaaacagaggctggggcagctcatgaaagggtccacatcagactagggggcacggtgactccccaaagcagccatgtgtgtaagcactgaaggctgagtgaccctttccctcactcctctggagctgccggaccactcccatgaagtcagggacctgcctgttttcttctgttagatcctgcgcctttgccaatgtctggcatgcaacaggatctcaataaatagcctggcttttattgtttccttggttacctttggaagacctacacatgcccacagcagaaatccccatagtacaaaagttaagcctccctgcgcattcctgaccctgtttccctcccagcaatgacctgacctggctccccacccaccctcaactctcctccccctccctaatggcaagcattggtaagaatgatttgcctaccctttgggggacatctgatacggagaagcagaggagctttgaaaaaacagaaagcaaaaaaacctcataaatggtggcatcttagcaccactggctcatcactgtatcctgtatcaatacagagggcactactgccttcggttgtgggtgtctaatgtgtgctgcaggggtccacaaattcggcccaccctctggttgtgtgttcctttacaaattgtccatggctgcctccaggctacaaggcagaggagcagttactagagaggccttatggtccgaaaaacctagactgtatactatctggcccattgtataaaatgcttattggatcgggtgcggtggctcatgcctgtaatcccagcgctttgggaggctgagcgggcagatcacttgaggtcagtagttcaagactagcctggccaacatggcaaaaccctgtctctactaaaaacaccaaaaaaaattagccgggcgtggtggcgggtgcgtgtaatcccagctactcaggaggcggaggcaaggagaatcgtttgaagcggagaggcggaggttgcagtgagccaagattgcaccattgcactccagcctggatgactcagggagactccgtctcaaaaaaaaaaacaaaggttattgacccctgctcgattacagcagatgtgtcataatttatttaatcacttctatactggcagacatttagattatttccagattattccaactaatatacttcgtatatgttatctttgcccatttatatatgtgtcagaaagataaattcctagaagtggaagattttggcttaaacagtgtgtgcaattttcatggataccatttcagagcttgtaccattttatactctcccagacaatgtagaacactgtttcccttctcccttgccagcacaatgtgacatcaaacttctagatcactgtcattcattctgataggtgaaaaatgagactcctggagttctgttttgcctgtctctaattctgagttagactgtatcacactgtgatgtttaaaagccatttgtgtttttttcctaaaaatagtcaactggtatccaaatatatcagctgaaaccattccttttccagtcttagcctcagaaagttcaagttttaaacatgtgccctgcccttctcctttcccgcttctgtccacccattacttatcctatgtggcttagtgacctgggatgtcagggtcctaagctgcccccttgctgaggccagtcattgcagagaatctcactgcagcccttgttctctggccatccttgctcactggctgtagggccccatggcaaatctaaggggcccagcctgagccaggaaccccagccccagcaggaagtcctggggcaatggccttctatgaacacaaggaccctatcttatcctttcttactggtgttaactccctgtgttagccaaccgcttatactaaaatgatgacataaaaaggaatgacaagacagagctgcccagcttggctccttttctttcagtccttccttaccgtaagtcaaaggtagtgttggtagaatgtgcatgtaacaaagagaagtaaaaagagtttatgcagcattcttaatgaaaccaagaaatacatatacatgaggagttaaatgtaacatttaaacagtgaacagtaaaattcatactaataatttaaatttttcttcacttagaatggcattaagttgcaaatatttatgacaagagacagaccatggagaaagaaaaaagctttatatttagtacctttaatggcacttctggcctgctttttgcacctggccctacaaattatgcagctaaccctgaccccgcgtgttgctgattgaccaagctgggggaagggaagtgactggaccagccaggcctggcacaggtgtgaccagaatggactaatcacccagaatgcagcttgttaaggggcttagcacgcaggcctggtcacacttggttcattccagggccttactcatcagggaggaacctgggggaaaggccgccaatgggaggagaagagttatcccagcagagggggggaaaaggcatgcatttgaaattgtttattcctcccctctagaaatgtcttgtcttctgcatttctactgtagaggatgctgcgcgcagatgcccgctccagggaggcacccgttcccccagctgcacagggtgctgactgctgacactcagggagaactgcccttggcagaagggagctgcctcatccaaggtcagtctgcacaatgactggttgatggggcagcatttggtataaagtcctagcccactggcctaaaggtgacacaactctggagggccatcttaccccagggctgcctgtgggttagctgaggtcttccttgtgactgcaccacagcttgacttctccctcttcccagtcccacttccctactaccacacaatgacagatcagcacaatgacagatccctagaggtctgaacgttcacttcctgcatgcaaatgtaggctgaacacacctattcttccagattcttcttttacctgaaggcagtgtgggccagtgtttacttaacagaacaaatatgtaagacaaacctcattttgaatcctagctctgtgtagcagttttatttttatttttatttatttatttatttgagatggagtttcactcttattgcccaggctggagagcaatggcgcgatctcagctcaccacaacctccgcttctgggttcaagtgattctcctgccacagcctcctgagtagctgagattacaggcatgcaccaccacatctggctaattttgtatttttagtagagatggggtttctccatgttggtcaggctggtctcaaactcctgacctcaggtgatcc

SEQ ID NO: 33859 - DNA, 1741 bp, Homo sapiens
ctgaatgattccatatatgtgaaatatccagaataagtaaatctgcagagacagaagatgaattggtggttgccacaggctggggaaaggggagagaatagggagtggctgcttaatgggtatagggtttccttttcagagatgaaaatgtttggaactacacagaggtagtggttgcacaacactgtgaatgtactaaactaccctgaactgtccattttataatgtttaatttcctgttagcccagctcaagccctgggctctggctgtccctctgcctgtgaacagagttccagagtcctccccagagttgttcctggtctgccttccctatgttcaggtccctgctcacaaagtcatctcctgaggggttcttcctgaccttcccccacttaaagtgtcactgctcctcatccacccacccatctacacatgcaacagcaaattctcactcacctttcacagccaggcttggctgttacctcgagccctaggcagaactagccacttcctactaatgttcctgcggccctttacagtgcagggatctgtctgctcaccgtggctagaggctaacccttcctcaagggcggaacaggtctgtgttccccaaagtaccggcccaggggcttactccccagcaccaagcagatgcttgctaagagcctgctgcttgaactgaaggtagttggttccttcagaaggaaacgactgtgttgctgcttaagaaggcattgcagttccttaggacaaagccactctttaccctgaagggagagagtatggctacagtgttaactgtccgggctccctgcccagctggcctggaggagccagggctacagaaacctaagcctcacctggagctcccagaagatgctgcgcgtgtggcggtggtagtagtgtctcaagggaatgtactccaggccctctcggtttgtcttcagatagttctccacatgcttaaagaaccacggcttgtagtaattgccaatgctattcagctgaaatgacagagggcattgtgatcagcctgcagacaagcgcccagcaccatcggggtgtaacagcgacacccggcttctgttcagcactcctggccttttcaaagctctttcatgtctattactgcctttgagactcttgaaagctggtgaggttaggcacagcgggtatcctctagcagagagagcaggagctcaaagaggttaagtggtgtgtgcccagggccaaacagtgagtccccgacagtctagagaactcagcgaccccgcctagcctggtgcaagtgtttaacagagttaaacatttaactgccctgatgcagtgccccatgcaggggaattccctccctccctcccttcccaccttccccaaggccagggaagcacgaactctgggaatgggtcagcccctcagtgcaacccagggctcatggcaccaactggtcatggcactttccctgctgtccctggaccaagctccacagtcctccgggtacagcactccccaggcagccaccatcgtctggaggatgctcacatgaataaggctcatacctccctggccctgggggctcccacacccaaatcttctattgagctgatgtctcctgcagccctaaatggtcatgactcaatgtgctgtgtgccttgggatggctgagcttctcctggcctcagcttcctcatccataaatgaattctggcagatgctctcggggagaggcaggggggatcc

SEQ ID NO: 33860 - DNA, 1814 bp, Homo sapiens
ttttttttgagacagagtctcgctctgtcgcccaggctggagttcagtggcacgatcttggctcactgcaagctccacctccctggttcacgccattctcctgcctcagcctcctgaaaaatgggaccatcttacacgtactgtttgccaatttgctttttccatttacaacacacttagcagagcctaggcaggttacttagcatttctggaagactaaaagagatgatgtagaaagtgccaagcacggtgcctggtccacaggtggctgaagtatcagtccccacccattcccttgttgacctgctctaccctacagccaggcaaccctttgccgtggatctctggcctccagcacttgcagcttatctgtgtgccacccgcttgtgcaggcccaccctgctggtaaggccaccctgctggtgaggccactctgcagggaggaaactggggctaaagagcctctttgcccaaattagttttggtgtggatggtatggggcagcgcaaaaaacactcacgctggcctctgcctgctaatgtgaacaggggaacccagcaggaaacagagcaacctgatctaaccccaggtgaggtgtgtcacatacctggcagtggcagcagctgcataatgaaagtgagacttagggccacctggatacaggcgctcctggtgctcactgatgcatcaggagccatgcagagaagcccaggacatgggaaagaacccagatagtctgtcttttccaggcacacaccagctgaggaggccaggtggctgcatgagctccagtccaccccagcccttgactgcaagccacttcctatctctgggcctcctctgtgaaatgggggtaggctgcttctcacaggattgcagcaatgtttacacggggcagtgcctgcagagggcccatcacagggcctggcacacagggacaaattcctgaatgcttagaaacagaaatgtttggaagcaatgcttctaaaatgaaatgcccagatgtctaatggcatccaccactctgccccagccctgttccctcaggtatcagggtcttgctcactggggcacttggcaaatatccctctgctgctgattctgggagggcctttgggtaaggctctctgtgcctcacagtcttctccttgggaaataagggaatcagatcaggtctccaaatatttcaaaagctgggcaaacccctctgccaaatcataatcttagggagcatctaatacatcaaatggatggcagcagagccactttgggtacagtgggggtggtgactccccttggtcccatccctcctcagctttcctacccctgagagcctcaagggaacacctcagagcagctggaaagctctggtctagatgtccttgctaggtgacttggtgctaggtgacacacactgtctgagctttggcctcaggcagatccaggggcccaggagggccagagcacttcagctcaatgtccggtattgccaccgctgttccaggacctccagcacttaccgcagtgtcccacagggagcaatgtttgcatagtgctaaagtctgcaggctgatatgtcagggaaccgacactgaaccaggagtcagaagctggaatttaaatctgttctgtgctagctgtgtgtcttcagagaagtctctttccctttctgggcctcatttccttatttgtagagaggattgtaccggatgattttatagcccttcacaactttaaaatgttttaagtatgtatataggtatagattaagagtcttaagggatgcctatcctttgatctgcgattttatgtta

SEQ ID NO: 33861 - DNA, 1051 bp, Homo sapiens
gaggcaggcgatcacctgagctcagaagttcaagaccaacctgggcaacatggcgaaaccccgtctctactaaaaataccaaaatcagccaggtgcagtggcatgcgcctgtattcccagctactcgggaggctgagacaggagaattgcttgagcctgggaggtggaggttgcagtgagccaagatcgcaccattgcactccagtctgggtgacagagtgagaccttgtctcaaaacaaaaaacaataaacaagaaaagacaaatgtgaaccaagtgatcactgctgaagacaaacaaactgcaaaatgctgcaaagagaggctcaccctcacaagtgatccaagaactgcaaaataaaacgagatactatttttaacgctatcagattggcaaaaatgaaagagtgatcctatttagtgttggcaagaatgtagggaaaaaggtgttctcacagaccattactacaagtaggcataaacacagctcttctcgagggctgtttggtcatatctattaatatttaatgtgctcaaacctttgtgtaacaaagtccatttttctgactcaatcctacacaaatatttgtacagaaggacaggataaatgtgagtcttaaatcttcaatgcaatcttatttgtaagagcaaaacagtttatgcaacataaatgtcagtaagggctaaattaggccaattatttacatgcaaaaatgggatattacagaatgaaatgaagacatgcacacatacatatacacacacacacacacagagaaataggtctcggctgggtgtggtggctcacacctgtaatcccagtactttgggaggctgaggtgggaagactgcttgaggccaggagttcaagactagccttggcaacatagcaagaccccatccctacaaaaaaattttaaaaattaaaaaattaaccaggccgggcacagtggctcgcacctgtaatcccagcacttggcttgggaggccaaggcaggcagatcacctgaggtcaggagttcgagaccagcctagccaacacggtgaactcca

SEQ ID NO: 33862 - DNA, 2399 bp, Homo sapiens
ttgaagaaagaaaatttcaaaaaataaatttagtgtagcctaagtgtacagtgtttataaagtctacagtggtgtacagtaatgtcccaggacttcacattcactcaccactcactcactgactcacccagagcaacttccagtcctgcaagctccatgcatggtaagtacgctacataggtgtaccattcatcttttatactgtatttttactgtaccttttccaagtataggtatgtttagatacataaataccattgtgttacagctgcctacagtattgagcacagtaccatgctgtataggtctgtagtcaaggagtagtaggctatccaaatagcctacgtgtgaagtaggctatctcatctaggtttatgtaattacactcttatgatgtttgcacaatgacaaaattgcctacaacttgtttcttataacatatccctactgttctgtgacacatgactgtacctcacagtgttaagacacacagctttgatgccaaggcctgacttcctctccagagaggcaggatggcataatgaacggctaagggacctgggagcctgattactggggtgtgagtcccagctgtgtgacctatggcaaataatctctctgagctttagtttcctatctataaaatagggataataatccttctattatttaataataatctataaaatagggataataaacctccctcattaggttgttgaaggataacatgcatgccttaatatatataatggatttacaacattgcctaagctcatataaggggctacacaaatttttgtttacagatatagacccagactgaacaggtactgggaatgaagcacacctagaggagccacctccctgacctcaggatccttaatgcccagagcaggctggcatggacatctcccattgctgaactcaccggagtgcatcgcacaaagctgccatcagccaggaccagctcgtaagcagtgcagatgtgttggaacaggccgtacttgtgggatgatgactcgatgcctgtgcccatgatcaagccccctgcagagacatcacacacagtgtcagcagggagagctgtgggtacagggttgggggtgggttggagctggggggcctcctagcatgagggaggtttggcaggctagcagaaatggggctgttgacttaggggagatttcccacctgtcaatctagagagcaggagagggaaggaggggctcagatgggagcatgagggtgtccttagaggaagggagtggcgagcagaccttgtcaagtgtactcacacctcacctctggccagactcaacctagaaatctgtgtgcattcatcttgagagggactttaatgaaaaggggggttgaaggggtgacaggaagccctgtcccatgggaatagttaaaagaactgaaggtgttttccctgaagaagaagaggctttgggggctatgaatcctatgggaggagaagagagactatacttattctgtgtgttccatgggggggaattggagcaatgggaacaagtcacagggaagcagattcaaaccagaaattaaaagtgccttctgataacttgagctgctcagaaatggaacagcaggcagtgaacaccctgtcattggagcaggcaagtaagagactgaatgacttctgtcacagatggaatagcggcaattccaggactagatggagggtggccaaggcccatcagctccggtcctaggaccgtgtgtctcttcttgcccgttaatatagggtcctcacccactgtgaggtcatcaagctcaggcaacacggggagagtccagccaatggaggtcagcagggcagtcacctggcccatggtcaccaagggctccacacggacaatctgttgacacaagaaaagagaccctgggtcaaaaggaggctgccaggcccaaggggagctgctgcacacagaaggtgtcatctcaaaccttcccaaacactcactgcagggattcctatatagcctttacaggctctttctagaacattgcctttaattacagggaatgtgatttctggctctcggttagctagtgttcaacctcgcccttcaagtatctttatactaaatatttgacttaaccttttctaaattacaggagaaatactcattcacttagaagatacagcaaaagtgaagaagaaaacaaaaatcacccatcctggctggtcgtggtgactcatgtctgtaatcccagcactttgggaggccaaggcaggtgaatcatctgagttcaggagtttgagaccagcctggccaacttggtgaaaccctgtttctactaaaaatacaaaaattagccaggcgtggtggcgggcacctgtagtcccagctgcttgggaggctgaggca

SEQ ID NO: 33863 - DNA, 6781 bp, Homo sapiens
aagatttgatcaggcctcaccaaagaagatatacaaatagcaaacatgcacatggaaagatcattagtcactagggaaatgtgaattaaaattacaatgaaaaactactacacatctattagaatggctaaaattaagactaaccatatcaagtctattacaatgtggaacaagaacaacactcacgctgctggtggaaatgtaaaatgctacaatcacttggaaaaaaaatttggcacttccttaaaaagttaaatgtacacccaccttatgatctagccattccattcctagatatttgcccaagagaaaggaaggcatgtgcccatacaaagactgttcacaaatgttccattttatttgtaattgccccaaactggagccagccaaaatgtccatcagtaggtgaatggataaaccagctgtgatacatccacacaatatgtgtgggaatatgactcagcagtgaaagagaatgaactattgacacacctttcaacatggatgaatctccaaataaagatgttgagtgaaagaggctagacaaacaaaaagtactgtatgattccatttatataaactctagaatcaaactaatttatagtggcagaaaggtcattgtttgcctaaggctgtggggggcgggtaggggaagaggcagggctaggggctagaggaagggattaccaaggagcatgaggagattttggggtgtgatgggtatgtttgttgtcttgattgtggtaagagttttaccacactttaaatacgtcaataaagctattaaaaaaaatggcacagagagattaagtaacttggccaaggtctcacaataataacaaaatgccatcaagtagacataccatatttaatgactaccctattattggatattgtgttgttgtcaattagaaataaagctgtgatataatcactctgtgttgggtatctttatactgaagcctatttcctttttccttaagccaggtttcgagaagtaaaattactagatgggccaaaaagtatgtacatttcgaaggctattaaacaagagggtttccaggaagcttgtaacaagacccatgtctctcagtcacttctgtagcccattttttaccagcacacttccttatcaggaaggggtaagtagattcctttttgcctctcatttttgctcacgaattccccattcctgacttcctgtggaaacgcaaagggttcccctgacctattatgacccatctctcccctggtggctgtgaggcttgaggacagcaatggcagggagtatcttctatgactgtgggcattggtcctgtccactctgcaatgcccttggctaaaatcatctccctatgagtcacttgcaccaggggcagtgccccacctgctcccagagcccggaaaagtgctactctcacctgtttcttggtgtccacttccagaatgtccatcaggttgatcatgatgtttttgtgtgtcttcttgtacttcccgacacgtagtgagacagtgagccagccagggcgccccgtgcacatgaaggtcttgctaccctgctccttccattcccgcacctgcaaccacaggacagagggtgagctggccccactgggaatccccagagcagcctgcagccctgctttcttcaagggcgagctgggaatgatgcctccatcaggcactggagaaacagaacaatgaaaaggcctgctggccctaccctctggcacctccctggccagcaaggctgacagaaaagccaacatattgctacaccacaaggcagaatgatgaaagagctagaagagaggatcgaagtgttctgaaaacattaactctagctgggaagttcagaaaaggttttgtaatggtgataatagcaagtataaaaatgaggaccatttactgggtattcccaacacactaggcatctactgcacactgtcttgtgtaattcctacaacagtcccaggaagttacgatgacacccttttttcgaggataaggaaactcaaaagcaaaataacttgtccaaagtcacacaattggtaaatggcagagctgagattcatagccaggactgtttgacttcaggacaggaaagatagatggagttgtggtaacagttcacagggtaatagctaacacgtatggaggcttatcacatgccaaggcctgtttaaacatttgtatatgttaactcatgcatcactttgaggggaagaggaggagcagggaaggaccaccaagccaatggaaggaagaggttttacaaaacctctaaggtaagtgaccagagcacaaaacacagaacaaatggcccatggatgacaagcccatcagaaatgcaggaggaagtgtttcttttctgctgagatagacaagtgcagggggggtggatatttgtcattttgacctgtgaccatccatttcctcttcatccacttctaacaatccccatcttcctttggtccaagtgagactgattctactcccctaccccaggaggtgggtacatgactgaggactgattctatacttctggccagagacagattaatgacatctcattaagtcaagccaatgagaccagttccaggacagccactctctctttactggggtcgctaagccggttggatatgagccagaaactgttggggcctctgcagggagagaggctccagagaatgaagtcaacctagaaaagcagggccaacagatggcagagggatggacagatggagatgggggacagaggatcctggatccagccatgcctgatccagttgtactcccagacttttcaggacctgagccaataaaatccctttttgctcaagtcagtttgaattgagcttctttcacttgcaaccaaaagtctggtcaaatactggtcaggtctcctggagaaggctgcactggagctggctaggcaaacagctcaacacggggaaggacttttctttgatcagaggccagggcaggtattaaggaagagattcctgtgatttgggggaaaagggatgataggtaggattccacgaccaaccaggtctcgtccctgcctgaatctgcagccacggagtttgacacaagcccagagatgggagggagtgattaggggtgctgcactgaagctggaggccaaacagagagcccagaaaaaagggcaactaggtcagacagctattacaagccaggtgtgaggcaactgaaccagacctataggggggaagggaaagcctgggaaagaagaaatgtcagagttcaggctctgaaatcgagctaacctaggttctagccccatttactgactagtcttcctgagcacatgactcacactctgaaactcaattttccctgtttgtaagataggcacaagatctaccagggttgctgtgaggatggcaatggcacatggcaggtctggggtagaggctagtccagctgggcccctgttttcctgctcacagtgaatcttgtggcttagccaagattaataggcactcgctaggctgttttgagccaggccctatgggccacaggcgagtcacataacagtccctgcattctaggagctcacagtctgacaggggagacaagcaggtaaatggagaatttgaactcgagaaaagagctaggaaacagggtgcaggtggggagggaggacacgcagaggctctggagccatgactgtgaccagcaaaatccagagctacagggcaaagcacttccagacactgcgttctcccaccaggccccaggtcttatgcctcatgggaacgtctctccgcatccatcttcatgctcttgcctgaagcacccagcgcggagcaagcagaatatggaggctgctacacctacggaagggtggcagcaggaaacagaagctctctgcaacctgatgccaacaagagaggaacataaagagaagcagagggagtcaagaaactgcccaagtccctggatgcagaggaggctccactgtgagccacagcaggtcacaggctccgtgggtgcctgaggaactgagagatggaccgactgcctttgtcaaggagtgagccctccgtcagcagaggctgtgaggttcttccctcccgcttctgggctgggttctaccttcttgctttagtcttctatcctaaacccaatcaaaagcgtcttgctgtacaaaataaagtccaaactcggccttggcatcaaggcccctctccagcctagcaccaaacggacttttccgacgttctcccgcccctgccctgcacttgtcggcttcccagcatttgctcacaccagtccctccacccacacaccttcccccaatcatttcccatacttcccaatctctagacccagctccacctcccggaagcctttccttctctgaaatgcttgggccgggtgagagttacctgagtgcttcgcacctccccctcttccccttcttcatctccctccaggtacccgcatatgccctgcacacagtgggcactttgcctgttctgttcccccgcccccatcacatttttgtttcgttccaacccctctccaacgccagctccccacccccccaggaagtcctggccgcccccgcaccgcagctcccgtcgccacctcgcgtcccgctatccccgcgcacgccgcctccggccctgagtcccggccgcacccggcgccgctcacctgcttctggatgtcccgcacgcgctgctcgtgcaggcgcggagcgctgctgagcttgaacaccacccaggcgcgcacgtagtagtagatatcgaagataagcgagagcggcaggaggaagaggcacacgaacacccagcgctggtggatgagcacgaactccagccccttcaggcgcacccacagcaggaagagcagcgcgcacacggccagcgacacggcgggctccatggtgcggcgccgcgcggtaagcgctgcgggttcgcgcctcctgtcactgccgccagctccgcgcctggcccgctctgcgcctgtagcccacagcccggggagcccgggatcgcccgccgcctcgcgattggctcgggtcgccgaggttcggtgggccgagacccgggcggcgaccaatggcgagccgcgccggggatcggaccaggaacccgcagctttcattggctgcgggagtcggaccgctccacccttttctccccgccgccgcgcgaggcgggggtgccagggactgggtgccggtggggtccgctgcgaatactgggggtgggcagttgggactcagggccccaggccctcggggctgcggggccgcctcttccaaacgcgccttaagcggttttgcagtggctttccgccggagggctgggaggcgccccggccctgagtcagtcaccctttggccggacaggcggttcccgggcgcggaggatggaaacctggcggtaacctctgcaggtcgtgccactcggtgtgcgcaaggtctccagaggcatcttttcatttttagggggcactttccacgaattcatttgagctacacagcagtcctgggcagtggggagtggtgagctccattgtgtacacttggaagcagcccagaaaggtgaagacctgttcgtgaactccagaggccattggaagcatggaaggctatggctggcactcttcctctttttccagttcactgaggcagatgggaggcccggaggagaaagaatgaaggaaggcatttcagcccgagtaaactccccaggcccgctctgtgccaggcagtgttgcaagcctcgggtagggtggtgagcaaagcagatggccctgccctcactcagcaaccagtgtaggggagctgccacggttaccagcaaaagctgaaatccagcgccatttgcatttcatatggaattttaggaagttttcgagatgttttagtttagaagctaaacatgacataccaggttcttctctgtctggccttgcatacctatccagttccctctccattcatctctgccctgacatgcactcaggaggctccctgggcctcagcattcctcatttgcgcgcctctggtcaagctagtacctctgaatgccctttcccatccccttctcagagttcacctcacacattccgaagccagctcagggccacctctgaaacatttagagcactcccctgcccatccagatgctcattaaatagtgtgcatctctgtcaccgttctttcatgttattttataattgtctctttatgtgtctctcacccccacagactgagccttagggcaaacaatgtcttgttcacttttgtccttccagcttctagcacggtgctttgtgcacagtaaacactccagcggctgttgaccaatgaatgaatgaagattgtaggctcaaatattcaagttatcaaagtgcaaagaatgagaggttgtttgcactggacttcaaaaataaatagcctggacctgtactgtcttacacaacagctatgagctactggtatgtggctagtccaaactgaaatgccctttaagagtaaaacacacactggatttcaaagacttagtacaaagaaaaaatgcaaaatagctcattagtaatttttatgttaatgacatgttgaaataacattttgatatattaagtaaaatatagtattagaattaatttcacctgttttatttacttttttaaggtggctactagaaaatttaaaattacagatttgtcttgtattacatctctagaagctccaaccaacagggggacagtgaagtatgaagaggaaagccaa

SEQ ID NO: 33864 - DNA, 1450 bp, Homo sapiens
agagggtagccgttgctggctcgaatgcctgggtttatatcccgatcattgtccctcccgctgtgctctcaggtgatagatgattggctatttctttacctcctgtttttgcctaatcaacattttagtgagctctctctggtgtgagctaagttgcaagccccatgtttaaaggtggatgcggtgaccttcccagctgggcttagggattcttagtccacctaggaaatccagctagtcctgtctctcactgggaagcaggtctgctctctccgttttacagaaagaaaatcagctcaggtaggccaagtaacaaacatacccagtatcacttggcttgtgagtaactgagccaggatcccacactcaagtctgtggcactctggagctcatgctatttccattttctcagaatgctctgaaagttccatataaatattgctaatttggaggaggctgagccaggaagaggtggccacgagggctgagtaggtagtgtggtgagtatgatggactttggagtcaaacaaatctgggttgagctctgtctatgcaattactcattatatgaccttgtgtgtatttctactctctctaagcctcaatttcctcatctttacaataggtataataatagcatccacttaaaaaggctgctattcgtagaaaataaattagtgcttataaagcacttagcaaagtggccagtacaagcaagtactcaataaatatctctgtttttactactaaacatatgtgttcagcaattataaaattgtaatatagatgggttgcatctagacacatgtacattatagcaatgaacatcattgtcacctttccaatcccattgcacaccaactatttctggccctggactacgtcaacaacctcttaatagattcctggcctccaattcctctccctttggtaagccagcctacatacgctgacaggctgatctccctaaaacctaattctgattatgcattactatgcatcatccccctgctgaaatactgtcttcaaagtaagtccaagtttctcttcttggctttcaaggacttgcatatgatacagccccaaattcctgctcccaccttgtccccactattgtcccaccttggttgtcccacctgctcccactttgtcccacctagtccccagtatgtggactctggttccagttgaactgagttgtgggcttttatttatagacacaatttctcctgcattttctccatccaaaaatggccacccatctccacacacctgccctcaaattggcttgctgtcaaatattttcagtgacccagtactacttctctcatgaaacctttcctgccatccccaaagagatgtgagcaacttattcctttgaactcattttgcctttatttttaaaattatagtggtgttatgaaaagagcttaggttttgccaccagtta

SEQ ID NO: 33865 - DNA, 769 bp, Homo sapiens
atacctttgcccaaatcaagtcctagctttcttcaccagcacagtaatgttgctcagctagttatgaagatgatagggttgaacagtcatagtatgattctcaagtaagtgggcttgaaactaaatgtcaacccaagatcctctgagcagactccccagccaaattaaaggcagacgccccagctaacttaatcttcattacatgcagcaacaatcctatcagccttttgcccaaccagcttcattgctctctgccaaggacaaattccttctgctggcagtcacaggctaacccagctggagccgggcctctcctctcattattcctcacatgtgctcttacatccccttccccgcaaactccactcaccccaattatctctctgtcctgtcttcaaatgtgctcttgcaacaacaaaaccctctcctgatcctgcctccctccctccccaccccaaccattgccctcatgtctcattttctctttacacaacaagcacctttgcaaaataatacctttgccaaagtcaagtcctacctttcctcaccagcacagtaatgttgctcagctagtttgtgaagacaaaagggttgagaaatcataatgtggaaatacaccttaatttgatctttggtattcatttggtaaattggcctgaacatgtcataaccctagatgtcccctgggaagactctgttaaaggcaaacacctcagctaagtcagtcttctccaggtgcctcaaggatcctatcagccccttgcccagc

SEQ ID NO: 33866 - DNA, 1171 bp, Homo sapiens
ctgagcaaagaagtaaattatctatgtattatatgaagacagacttctcagctgggcgtggtggctcatgcctgtaatcccagcactttgggaggccaaggcaggtggatcacttgaggccaggagtttgagaccagcctggcctttagtagagatggggtttcttctgtactaaagaaaccccatctctactaaaaatacaaaaattagctgggcatggtggtccatgcctgtaatcccagctacttgggaggctgaggcatgggaatcatttgaacctggggggcagaggttgtagtgagccgagatcacaccactgccctccagcttgggttatagagtgagactctgtctcaaaaaaaaaaaaaaaaagaaaaaagaaaaaagacagacttctctatgaagtcaacatctgaggaggtctgtttttaatatttgtggaaagtaagttgggctttcagcatatctttggggcatgactgtccaagtgtattgtttgttttcccaagtgaaggcaaagagaaatgaactgtctttatctacaagaatgtaaagaatgcactgcataagtctatgactgtaaaaaaaaaaaaatcctgcactggatggaatagttgtgagaaatgtatgaggattaggcactactgcattctgtggaattactctgttgtttactgttcttaaatcctgtacaaacctttcttctttaccatttggttttctttctttctttcttttctttctttttttttttttgagatggggttttgccatgttgcccaggctagtttcaaactcctgagctcaggagatccttctgcctcagcctaccaacgtgctggaattgcctgagccactcagcctcccaaagtgctggaattgcctgagccactgcacctggccccatttggttttcttacctgaagggttggtatattacaagggcttgtgcaagaaatgatcaatcctttttctatataatctcacattataggttttgttccttctagggcttcagttctcaaggaatattgttggatatttggaagtgattttgatgactctatttgaatttttattggagtagctgaaaaaatagttcctatatcagtggaggactttgactataattgatcaggtactacctttagttaaagttttgtgattcttc

SEQ ID NO: 33867 - DNA, 1146 bp, Homo sapiens
ggagtgtttcaacaaggaaatttccattgctcatatttcccttccaaaaggttgactctgatcacggtgtggagagctggtgcaggcctgtgagtggggggggctttgaagctgtccagggcagacatattagtggcttgaactaggacaatgagcaagagggagagaaagggagggatgcacaagttatttaggcgtggtaatggtggggctgggtgtaggacgaggaggatccccgggggtggaagtgaatgtcatagctaggctcgtggaactgggaggagggagctggagcagggagggggatgcggccctcgcaggagcacaggacatggctgcccctgggatcagccttggcagatggccagacggccagtgctcagcacagagcctggcatagtggctgcggaatgagtgaaagctgaagttctggaccctgaaagaaggaaggagaaggaagggcatggcaggaaccaccaagtaggcagcttgaccacatcgtgcctgagagtgcctgacagtgccaggtgcctcggccccgggccatgaacgatcgtttgtgagccttctgagctgcaggcgggcgactgagaacagcctggcgggctgagcccctggccctgaggacgcagccgtgtattttttcccctgtggctcacggggcctgggaagcacaatgtcctccattaccgcaactcctcaattagacatgtgatggcggaactcatcactaggtggcgctcataggctttttgtattttttcccatccttctgtgacaaagctgggattcttgctgtgttgctgaacaaacagaaccctgacttagtcttcacaagttacgaaactgacccaagggctgtgctgttttcaattctaccatgctgcaactatccctcccgcagcctgggaaacagggtaggattccaagaacaaataaaggccctccttcaacaaccccatggcatccgccagccgcccaatagtgccggactctgaccaagcggtgagacctcgggcaagtcattttgcaaccgtccagtggattcaccttgcccgctgcatagacacagccgatttattaagacaggggaaatgcagtggagaaagagtaattcatgcagagccggctgtgcgggagaccggg

SEQ ID NO: 33868 - DNA, 806 bp, Homo sapiens
actccttatacaaaagtaaatcccagtggaagccaagatattaaaaaaagatttaaaaaaggaggacaatttttatatgatcttgataaggaggaggcctttctaagcacagtacaaaatcaagaagtcatgaaataaaaggctgataagtttgactccatgaaaattaaaattttctatggaaaaaaatacaataaagtcaaaaatcaatcaacaaactggaaaatagatttgcaacatacataagagacagcaggctaattttggtattatacataaaaagctattacaaatcatcaaacaaaagctccacagccaaaatgaaaaaatgaagagacagttcaaagacaaacaaatgtagataattgtttaacttaaggaaaggtcaaaatatttggcaactctgtgttggcctgggtgtgaccatgagcggtagttgccagtggtattcacaaatataccctttctcctccttctgggcacttggtgtgattgcagtttcctacatttgaccttaggtgtggtcatgtgtctcgcttaggagaaggaaatgtgaacggaagtgttgtgggtcacttttgtgtggaagctgcatggagtcacctctttgctttccgtcagcctcagtgttcagcaatgttctgaatgatggttgctttatcagtctggttctggggtgagggtaatgaagtagtgaagcaaagtccttgatggacatgtgaggtgagacagaaataaacctttgacatttcaagcccctgagatttggggcgtgcatgtgctggaagcagaacctagcctattct

SEQ ID NO: 33869 - DNA, 2662 bp, Homo sapiens
agcaagcctcatgtcatgccacatgtacaatctgaggccaggagctctctttccccttttcatcctcctgcctggtacacaataggtgtttactggatgcttgtccagttgatttcttgaacatggtgtgtaaaaggaatctttgcaaattgaatcttctggaaagctgagcttgtgcctaccatagaattctgaatgtacctatatgacgtctttgcaaacttaaaacctgaatctttgtagtataaatcccttgaaatgcatgtaggctggacatcaaaagcaagcaatctcttcaaggagcagctagttggtaaggtcagtgtgcagggtgcataaagggcagaggccggagggggtccaggctaagtttagaaggctgccaggttaaggccagtggaaagaattcggtgggcagcgaggagtccacagtaggattgattcagaagtctcactggtcagcaggagacaaggtggacccaggaaacactgaaaaggtgggcccggcagaacttggagtctggcatcccacgcagggtgagaggcgggagaggaggagcccctagggcgccggcctgccttccagcccagttaggatttgggagttttttcttccctctgcgcgtaatctgacgctgtttggggagggcgaggccgaaacctgatcctccagtccgggggttccgttaatgtttaatcagataggatcgtccgatggggctctggtggcgtgatctgcgcgccccaggcgtcaagcacccacaccctagaaggtttccgcagcgacgtcgaggcgctcatggttgcaggcgggcgccgccgttcagttcagggtctgagcctggaggagtgagccaggcagtgagactggctcgggcgggccgggacgcgtcgttgcagcagcggctcccagctcccagccaggattccgcgcgccccttcacgcgccctgctcctgaacttcagctcctgcacagtcctccccaccgcaaggctcaaggcgccgccggcgtggaccgcgcacggcctctaggtctcctcgccaggacagcaacctctcccctggccctcatgggcaccgtcagctccaggcggtcctggtggccgctgccactgctgctgctgctgctgctgctcctgggtcccgcgggcgcccgtgcgcaggaggacgaggacggcgactacgaggagctggtgctagccttgcgttccgaggaggacggcctggccgaagcacccgagcacggaaccacagccaccttccaccgctgcgccaaggtgcgggtgtagggatgggaggccggggcgaacccgcagccgggacggtgcggtgctgtttcctctcgggcctcagtttccccccatgtaagagaggaagtggagtgcaggtcgccgagggctcttcgcttggcacgatcttggggactgcaggcaaggcggcgggggaggacgggtagtggggagcacggtggagagcggggacggccggctctttggggacttgctggggcgtgcggctgcgctattcagtgggaaggttcgcggggttgggagacccggaggccgaggaagggcgagcagagcactgccaggatatcctgcccagatttcccagtttctgcctcgccgcggcacaggtgggtgaaggagtgaatgcctggaacgtactgggaactgcaccaggcacagagaaagcgggcttgccattatagtgggttccgatttggtttggaaaacatgggcagcggagggtggagggcctggagagaaggccctacccgagacaggggcggggtgggaaggacggcagatgctgggagcacgaggcaatttctttatgacacagaactcatgctctagtattccatctgtttcagccgaagaaaagaaccagctgaaggggcaggggagaaggggcggaggtattctcgaggcccattggcgtcctttaggactcaggcagggaagggcccttggtgctctggagccggaggtggtgcgcctggtactgggaccccggagctgagcccggcgcctcagcccacctggctgtctgccgaccgtgtgcggggcgagtttgctcaacaactctgccagcttctggccctcaggctgtgggaagcttcttcccggggcgagaccactagctttttctaagtattaccagcccaggacttggctgaggttctgtgtcccccagcttggagtcagatgtggggttgaatcttggcttcctctcactagctgtggtgcttgacaagtcacttatccttgagcctccattgcctaatctttaaaagggaggtgacaatcgtccctacggctcagtggcagcagatggggagatgaagggaaagttctgttgaccatgagtgaacttacaatgcaagccccggggggatcacttgcagttttgtccctgtctgcagtgtgacctgttggtgacattgtctttgctccaaaccacagctcctggggcagaggggaaaattctgccactcacagctgcctgcccacgcttctgtctgagtgtgctgggtggcaggatggcaagtccttactcagctcagtatagccctcttccttgttccctgagcctttgactttctcgagggatgttgtggggttgtggccaggataagaaagggcatttcaagttacc

SEQ ID NO: 33870 - DNA, 1502 bp, Homo sapiens
ggtctttctcatgtggtccttgtgttcgtcgagcaggccagcaagtgtgacagtcatggcacccacctggcaggggtggtcagcggccgggatgccggcgtggccaagggtgccagcatgcgcagcctgcgcgtgctcaactgccaagggaagggcacggttagcggcaccctcataggtaagtgatggccccagacgctggtctctctccatctggacctggcctgggaggtggcttgggctgggcccagggagagctaatgtctcctaaccaagaatgctgtggcagcctctgccgcagagccagagaaccagagtgccaaggctggcagggttcccagtggccacgagtgcagatgaagaaacccaggccccaagagggtcatgcaggtagcccagggagttcagccttgaccctgggtcaatgacctttccacagttccacactgctccccttttaaaatccggtgatgtctttatgtcttttgttatgttatcttcaatgtggagggactcgaggtgatctaagcaaactttttctatcttctgcttgcatacctctgagaccaggggactcactcacttgcatgactgggccctgcaggtcacactggccaggcagatgtggtggaggaactggcagaggactttttctagactgtgactacatttagtccacccagcggcccccctatgaagtccagttgagaactaggactctgggggccggtggacagagaagagggagggttctctcccttactgacttccttctgtggccagacattgagcaaggcctctgtacagcatgtcctggggctggccttgccgtagctgctaaatagttgacgaaaccagtccagagaggggaggtgactgccagggtcgcacagctcaagctggggaactcgctgggaaaactgtcagctctgggcagcagcttgacttccactgtaagccccagcccccagggtcaaacactggctctggtgctggcagaggcagcccactagcctgtttcaaaggctgagaaggcccaggagtctgccctgtgctccaccagttctgccctgagactttcctacagagtacaggttttgatgttcagttttaaaggcaagaatcaataaccttctgccccatcaggtgaccccttgtgcctgtcccacccctttattgactgacctcggctcagtcaggtcagttcctgaaggtcagtgtgtggaggggaggctgttctttcccagaaaggccttccccaggcctggtgctctggcctctggaggacttcctggagaagtcccttctttggggtcccagtcagtgtatgggaagcccttattgcatgacctggcacggggcaggggctcaacagtcactattgccttccttgccactgccatttcctcctctgtaagcaggtgattgtgtgtccagtctgagcacagagataagcacacagcaggtgcttaataactagcagctgtaggctgggcgcggtg

SEQ ID NO: 33871 - DNA, 831 bp, Homo sapiens
actggcctggcggagatgcttctaaggcatggtcgggggagagggccaacaactgtccctccttgagcaccagccccacccaagcaagcagacatttatcttttgggtctgtcctctctgttgcctttttacagccaacttttctagacctgttttgcttttgtaacttgaagatatttattctgggttttgtagcatttttattaatatggtgactttttaaaataaaaacaaacaaacgttgtcctaactcttgcatagacttgactgcctagggtgatgccttgcttatactaggaactgggtaagtttgttgaatagttgagtaagccaagtatttgatgagtacttttatcttgagtacaagtattgggcaagtactggtgatgtgaacttactccttgtgcctatcctaggaatgaaatgaatgtcttcctgcagctcccctgaccaccctgacagtcaaagtgcctcctccttggtgacaggtgccctacagcactctagatgctctgttgtcctgacctcccaatgcccttttcattcttttctccccagtacctggcacacagcctggcccgagtatttacggaataagttacagtgccagatgcttctgtaatgagccagtgctaagtccatggcttttttcatgatttaaaattcagaacagtctcagattgggtgcaatggctcacacctgtaatctcagtactttgggaggctgaggcaggaggattgcttgtgtttaggaattcaagaccctgggcaacagtgagaccccgtctctataaaaaaatttaaaagattagcgaggtgtggtagcacatg

SEQ ID NO: 33872 - DNA, 1620 bp, Homo sapiens
ttctccacttttctaacaagcaccctatccaatccataccatctacttcacatgactcagaaggaccttgtatacaaacaaacttatttctcttgctttcctttgttcgttccatctctctgtgtttatttctcatactgactaatgactcaccatttccccactctaccaagctagaaaccacagggccattttataaatgtccccaccctctacctagtcataaatgtcattctgtcactgcccttcatctcctctctggatactgtcagctctcagtctacccttcctccagtctctcccacttcccttcatcctcttcactgctgccagagtaattgtttcaggtaattctcggcttagtaactgcctgttttttcatggactacaagacaacactcgtattccccaatgagacccttcttgacatgtttctctccttcatcctttgcttgaacaccaggcaactgaggttcccaagacaggcgatgcgtcttcatgctctcactcacccttccttccattccagcttggagtgccccttccctccttatttacctagaggatttctaggtaaataatttcccaattcctagctcaacagtcattttctgtgaataatttcctaaccttatgaccctaagcaaattcaaccaatgtaaccactactttctcacccctcctcctcacaagtactttttatatatgcctctgctttaataccttttttttttttttttttttgagacaggatcttgttccgttgccagggtggagtgcactggtgctattactgctcactgcaacttccacctcccgggctcaagtgatcctcccacctcagtgtcccaagtagttaggactacaagtgcatgtcatcacactcaactatttttttatttttatttttagtagacatgaggtctcactatgtcgccccgtacgatctcaaactcttgggctcaagcaatcctcctgcctcagcccctgaaagtgttgggattacaggcatgaaccaccatgcctgccctgttttaatacttataatatagttacctagctgtttgttattctttgttaaaccatcagctgcctctcaaaggcagagataatatctaatttatctttgcatccccagcactaataccttgcacaatatggatttacagcgataaaattcaccttatttcaaactgacatgagacacaaaagaaacagatacagcctcctggcttctactcttcttgaaaatttcccccactaccagaggggaaagagacatgcttccatacgtttttcaaataatcagaagttataaaatgatttaaaatattttaaaggactgaaacatcattccttcttataataactctcacaatgagtcatatgataccttgtaggaataagcaagactttgcaggggaaattaactaaaataactatattcattttcggcaactcatgtaacattacattgaaactctaacctcaaaccgccagctttgaggaagttttcacagaaggatttggcacagcttctggccatgtcatcatcagctgttggcatgagtttggagcttagaacctagggaacagataagcacaattattcatccacac

SEQ ID NO: 33873 - DNA, 626 bp, Homo sapiens
gcctattcttaccatttgaatttgatctaaaccattatttaatttaaatctagtttttattctgagaactctttattttctacttaataaaaacaacagaaatagcagtcccaccttcttaaaaatgtgcaaacagacatgagagtacattaaagtatacgaatgacagaaagaaagttaagtaacagatgagactgtgagtgcaactaccaatggccccacaatgagtaatactgctacaggtcacaggaacagaggtcaccagggaaggccatgtcagccaagtgtgtgtttccattccatccctttggccaaaaaaggggctctaaacacagctgttttcaaaatatagtcaccacagaacttttgagagtcttcaaaagctggcagataatctaaaggtcaatcaaaatacacactggagtcatatataacaatgtcataaaaacaattagcaaggcaaaatgctgtgagatatgggggcaggacaaggggagcatgcagaaaagaacagaaggggcaggaaaggcaactaaatagaaactccattaaagcttcaactgtgactcaaattcgaaaagtcctgctgaattgcatcttctgagccagttttcttaaagctagaa

SEQ ID NO: 33874 - DNA, 2589 bp, Homo sapiens
acaggcatagtcttctccacctagacttgaggtctctgatcaaagccattagcctcaagactcctcctccacccccactgcgctcccaccctgttccgcgcccctctgcatagcaccctcagtatgactaccatctctttccccggtctaattttctctcatttctgaccttatcgatgaccagtactccctctttacccagacctggtgccagctctatcttccaattccagtccccatccctgcctagaccctcctcagctcccacccctgcccaggcctcccacctctgccctctcagtgcaatccccactgctctcatacctgattttattcaagtcctcattcctggccgcggccccttccctcttcattttaaatcctactcaatgccccccctttccgacccttggctaaaaccccaacctcactcctaaccccaacagttttcctgtgatcctgtcaaagaccactactctggccggcccacaccgctttttctgactctgagcctggtgcctccgccaatccttcactgaaacctcgtgccacaaaatctccgacctagcctagtgcactagtaccccatttccgaccccctactgcacgcatccttcccactatatgctcaagtgtctgtcctcccatctcggatgatagccctggagcctcctccccatcgtcggcgtgcatagccggaagcctaagggacccctcctcaccccaacccacagctccgctgcgcatccctaattccctttcacacgcctctcctatgggtccctctccccacttacccccaatcaagtgacttcggttcccaactggagcctggggcttctctctctctctccgccccgcccccactaaagccccagtcgaatgccctctctccccacaccaagcccagcggggtgtgtcccctcccaggaactccagcccagtggcttcccacagaggtctggggttgcccctcctcacctccgcgtccaccacctcgtggtaggcgggcggggggtcgaagccgcccccgcctccggtgctcccgccgcgggaggggccgccgccgccgccgtcacctccgccgtcgccccgcgggcccccgccgggcccggggctggggccaccgccgctgtccatgggctcgtagccgccgtagtcgaggcccggccgctcgttggtgagcagtgccacggcctcgttaatgtcgttcttggccaggcgcagggccttgcggatggtggcggggtctgagaagcccatgcacagcagcgtggtcatgtgctgctcctcctccgattccatggcttgggcctcctggccgccccggccagcgcacggcgaagctacgggtcccgggcctggcgggccgcgcggcgcaccctccgcgccgcctccgcgcccaggttggcccctgcgttcctgccccgggtgctccgcagcagccgggccaggctgggtgcgggcttgggtcctgcgagccgagctagtgcggtgaggcgctcaggcgcggctgcggcccggcccagccctgcgcgccgccatgttggcctcctccccctccgcctcctcctccccgggcggcggggccgcgcctcggctcccggaagcggcacgggaggcgaccgtgctcgccgttggcaggctagggttggcggcggcgtattctgtttgttttaaacgaaggagcggagggaggggccgcgccgcggagcgtgcctaaggtgaaagggctgccgtgcagccaggcagaggcgaggaaggcttctccatcgtcgccaccgcccgcctgtttcgccggcaacaggttcccccgggacgggaggggccgcagcgccgcgcagctcgcagcgctgaacgtcgcggaaatcccttggccggccgagcctccgcagccgcgacccggcttctctccgtccgagtcccccgagcctctccgaacccccgttggacttcccctccctggccggcgccgcccgacccgctcccccatcctagagggaattccctgcgccgcggctgtgaggcacctccaccccggcctgaaatgcaccgcagtcctgaaggaaatccaccctcatcccacgcagattcacccgcaacgctgcctgaatacgcctcgctgcccacagaaattcctgcccaaaccagacgcgtggaccacccaagacgaaattcacactcgaccctagccccgccagcccttgccgaaatcaccctaaacccgttgaaattaattcccagctgtccgaattttccttccaacattaactgactacctgtctccgccaagctgactgaactctaccgaactcttaccctgaaagcccctgagagtccaaaatatatttttccagcccgaaatctaaatcccagttctctgtatgaaaacctccagaaacccagactcttacttccttcggccacggactcgttcgaacatcgtggacatcaccttcccacatttttaccgcagtctttggctccgattctttgtccctgcctcttgggcagcatcctatccctgtttctttccacctttgaggattcctctacctctttaaaggcctgctttctttgctttctctt

SEQ ID NO: 33875 - DNA, 1131 bp, Homo sapiens
tgtcaccactttggttttggtggggtttagctgtcttcccctgccccccacccccccaatccagttttatccgcagggtctttgtgatctgtatcttgtgctgacctcttatcttatcttgtgacttaagaatgcctaacctccttggaatgcagcccagtaggtctcagccttattttacccagcccctattcaagatggagtcgctctggtttgaatgcttctgacgccgtgattggtttagactcaatctcacactctctttgtggcataggagatgtgttttcagaaatccagaaaggagcttagacaaaacagtagtctcagggaacatagctagttaagtgatggaactgagatttgaagtcagatctgtctgactccaaagtccatgttttttttgtttgttttctctgtggtttgttgtttctatgatgtggcttctgtcaccctgactctccttttgtcttttgtccctcaccaccttctgtagtttcccagtcctcctgactcataccagggaagcctcctgtgtccatatacaatgaaggctcagggacttctaactcctggtggactggctgattgagccctggaagtgtactttctccttcatttccctcctgactctcgctgggagagttgtagactcctgggaaacacaggtctatggcctgcctaagagaggaccagcccacaccaaagaaagtgccactgcctcctcctcctcagtggatgccaccaagccccgaggaggacaaccttttccttaatctccttgaaacccaggcaaactttgacaaaaggaaaggtgtttccagtgtgttgttaactgaaccttggttgcttggcagtatgcagttcttgtctaatttaccccaaggaaatgtctgtgtgatgtatttttaatttgctgaagaaggataagtgttcaaacctttgtacatttatgctgaaattaatttttcaaagtccacataacttcagtgctgtgggatagtccttaagaacagaaattatgaccaaccataataaatgacacatttttgtgaaatgtcatctctcataaagttgttgtgaaacttaaagaggatgaagcttggaaaccacccagcaccatgcttggcatat

SEQ ID NO: 33876 - DNA, 2591 bp, Homo sapiens
attttcactaatcaatcactgaggctgttgatctttagcactgctttctttaatgtgtttgttatctgtgaggctggatggggcattagaattttcatccttctgttagacgtcatatctgccccgtttatcccattatcatgggatattaattacttgaaagattgtgtttcttctatttcctggcccactggggtctttagggttggggacactggggagcccatggatgctagctgctaggctgctgtggctgtgccggccatgggacagcatggggcagcaagtgtggacagtgatgcagggccctccctttctttgtgctgtactgaagcaatggctgttgagaatctgcagctgggaggatttcactgacagttgctgggacaaacatttattgacctccttcaggaaggtcaattcctggcacaggctccccttcttctacgccttttacccatgctatctcttcagccttggaatatccatctccttttctgtgcttattaaaatcctacttatcgtttaaaatccaagtcggatgctgtcacctccttgtagatggagggtccctccttgtgctcctttgggcaccatatgcttcttgagtgtggaagcacccatattgtatgcagcttcaaaataagggtctagtctgtgcctgagctgtagagacttctttgtctggagtcttccccttctaccaaatccccttccactgggtttttttttagtctttagctctaaactgagcaatgatttaatccaggaggcctttcttgatgccagacaaatgagaccactctcctctgtgctacctcatcagagcacttctcatcattttcaccaattgtctgttcaattgtctttcctccctgctggaaagtcagctatggggaagacagaaagcctgcttgttttgtttactgctgtattcttagtacctaatctccctccaggcctgtagtaagtgctcagtaaatactgaatgaatgaatgaatgaatgagagcatctggattcaggtctcagtgctgccccttattatctgtgtgacctcagaaaagtcaatctcctagatccctcccagctctgacattctgctattaatattttgctacctcttttacccggtatctacagctcatgtcctggcccacccagcatgagtcatgcctcaagaacctcaggcactcgctcactccaaggattttccattctttggagaacctttcactcttcaaatattgtctttctgatgtggtccttggcagcgtcatagatctctccagctcacgcaggtcgggtcccttgatgggatcaggctaggtcagcgtagatgccttatctactcactctgttcctggaagtctgggctttgtgcattcccataaagggccccagaagagggtgggatctgagcccgtgatggaccatgctgtatgttggtgcagcccaaggggagggaaagctgtgactcagtgtttgtaaaatgttagcttgtggagtgagtaagaccagaccaaggctgactgttttgggaagtggtgagttgggttaattgaaattggagcccaaaagccaaggtcaattcctgccatggtggctctcacttcctagctgtgccctattaccatgtaatttaatctctccaaaccccagtttctttatctgtgaaatggctacattaacacccagcctactcaccccctagcaagatttagaagtgctggagggcacatattttcatatgggtgcatattgaatacatactatatgacacaaacttcatatctgttatttaatcgaattctcagaacagccctgcatggttgacagttcagataagattctggcctcagctctgggtttcaatacagcaatgtttccccagttgtgtgttggatcacacctttccgctgggcacgctctttcccacccgaggttaggaaatataggtttttgtggtcaaacatgtttgtttaatcctacattgggacccactggtgtacagtaattaggatttaaagggaaaagatctagccaccccagaactctcagtcttatgctcagcagcctggagttgggctccccagtgtttcagttgttaggcagggcagccatcccctgcagacagggctccgtctgtgatgcctgggaaggggcatcaccagttggggtctttgactcaacttcagtgtcatgaaggatttctgcatttacattttgttttgaaattgtgcgggaggcgggtgggatctggcaagatggccgaataagaacagttccggtctgcagctcccagtgagaacaacatagaaggcaggaaatgtctgcatttccaagtgaggtacccagctcatctcactgtgactggttagacagtgggtgcagcccatggagggcgagccaaagcagggtggggcatcgcctcacatgggaagtgcaaggggtcagggaattccctcccctagccaagggaagctgtgagggactgtgccatgagagatggtgctatccggcccagatactacacttttcccacagtttttgcaacccacagaccaggagattccctcgggtgcctacacc

SEQ ID NO: 33877 - DNA, 3533 bp, Homo sapiens
gcacctgccaccatgcccggctaatttttgtgtttttagtagagatggggttttaccatcttggccattctggtcttgaattcctgaccttgtgttccacctgcctcagcctcccaaagtgcagggattacaggcgtgagccactgcacctggcctttttctagttcttaagaaagagtggtgtgtggcctgagtcacttcggtctctaagacctgtggtctcctaccacaccttgcagagttgtggtaaggattagtgatagcatgccgaaagcatattattctgtagactccatgaaggcaggataaagccagccttgtccccagatgtatctccatttcttagcacagtgccctgcatgcagcaggtactcagcacatctgtgataagtaggaatgtgaatgaataaacatagcacattaccagggagacagtaggtactcaacaaaccctagccatgatacactattaccctgctgctctctggcccttagtctatgcatctgtattaacaagggcttggactagttggtctctagggtactctccagctctgacattctatgcctgaatccaaatactccagaagcaacctggggctcagggaggaaagatgatcttctcagcatgtgcacagaattatttggcgtgttctccatgtgagacgaagagcctgtgtaccgtcctgaggctcattctgccctcttcaacacaccatctggacctctccacttggcagtttgcaacatctgtcagaagtgcttggtgccaggatgactcttgctgcaagcatgtccttggaaagctctggaaatagggagcctgccgggagtttatgtaacatgctgagtggccagaggactgtgcgcaaagggctctgatcccatagcgggtcagcctgctatgaccactcagggtgactcaactgattgtcacatgcaacttacaaactgctgacgacagagagcactgtggtgaaagggacaggaaattctgcctctgctttatatactttttggtggttattcccctttttattctaaaaaggaaggatttgagattgctgactcaaatacaaagaatataaaaaataaattagaaaatcagaatgaaaggtgtaggggagaaaatatttctttcccaacctattgcaaggtttatgactgatatcccaatgacaaagacagattaacaagagaaaagcgtaacttatttgtttaatatagttttacatgactgaggagtctttggaaatgaaggcccaaagatccagggaaagctgcatatttttatggacagacataatagaagcttgattgaaggacagaagggtatcatccaatggtgcaaaattagggggaacttagcaaggtttatttgttcagattcttcttggcctctggatatagggcaggacacttctggaatgagggtcttgtgacctacgtttaggggaggtaggtcagagaattcttttgtggcctgcttcaggatagaaaggccagagaaagtcagagagaccgtcccacttttatagttttcttaatttcctccagcttaaagtcctccgtgtgtcaagatgccatattttggggtattatattgtgagccctgacaagggaaaagacttgctgggggtctcttctacttgcctcttcagacctactccacctgccgtcctgctgtctgccctggggcactgaccatgtggcttatatctggatttttactggctttggccatggggcgcaccagcaggagatcagagggaggaggggagtgaggtcctgaagtcactttgggcaggctgtgtccttccctagaggacacaaatcctctcaaattgaccttctcagtaagactctttctttctagacaggtaattgctctgtctcctgggactagtggtgaagctccactgttattggcccctggatagtgcactgtctgttgtacttcccctatctcctgcccacagctctgtaaatagccccgttttaaataaacctttcttgaattatcttaaattgagtgttccctctgtttcctgttaggacttgactgatacataaggatagaaaatacaagagggaaccagaaataatgctcatggatgagatacaaattgtagtgccctgtacatgtgccaaaaaaaagatgtgagtgtgtgctatccgtttgacttgagcttcctagtgaccaaagcaacagaaccataggaggaggtctccagtcatcatttcttaccaccagagtctaagggaccttactacataaaactctgtcactcccattatcttgtgggttaaactgtgtcccccaaaatgataagctcaagtcttagccactagtacctatgaatatgatcttatttggaaacagggtctttgcagatgagaccaccttaagatgaactgatagcaaagtggtgtgggcccctaatccaatgactggtgcccttaatgaagagagaaatgtagacacacagaaacatactaggaggatgccatgtgaagatggaggcagaggctggagtaatgcccaactagaggttaggagagacacatggaacagtttctctctgagtctctagaaggaaccaaactggccgacaccttgattttgaacttctggtctctgtaactatgacagaataagtttctgttgttttgagccacccagtttgtggtactgggttatgacagccctagaaagcaagtacactttgaagtggcatcaagactcttgatatgactatgcctactttctagcttcatctcccaccactcaccggcttgccctgtttgtctggttcttacatcactgtgctatcccagagtcctcagccttttggctgtattcttatcacagcctggattgcctcttctacttttcaccctgatagattcagctcaggcgtggctttccccaggaacccttccctggctctcccagctgtcttgggtccatctcctttgaactcccatatcattgataataggcacctgatgcatttgtttccctccctcaacagtaacctcctcaagagtgatatcatgttcctctttgcatccccagggtctagaacagtgcctggcacacagtagattcccaataatatagatataaatatcctcagcaggatatttgtttggggtacctgctaccagccaggtacttttctagccacttcatatgcacttcatttgtggtgaggaaattgaagcttgcataggatactgtctaagttatgtgtccataagtgatggaactggaattgaaattagatctgactgactatagtctagtctctcccattccaatctgctgcctctttacattggacagaaagagaagggccaggttagggaggatctaaatgctagatttttgtccacaataaactcatcttgagcaatcagctttgagccctgcatgaatgttgatcaaatgattgtgtatttactaaatctctttttgcttttgctcaggaagcagaaatgtttatttctttaaaaaacacagttgataa

SEQ ID NO: 33878 - DNA, 835 bp, Homo sapiens
acccagtgtatttaccaattagtgtatttaccttcatatttaccaatcagttaactttcagagattaggggtgaggcttttgtgttttttaattttgataatattatagtgttcaatatttttgcccagccaatttatttatcttctctcttctacagtgttcccaagagaactacacaaacaatgactgaatgaagagcaaataattattacattaacaattgtctaagtactctattttctaatgcaagaccatcttccacaggaagcccttcattgacctgctcagatgaactcagctatgtgacctgcaagtttattcttccacttattatacttactttatcactatttgttcagtgacttccccaggagcaattaaagcagaaaccatgcatgtcttatttgttcagtattctgtcctaatatcttagcaagtatatgtcatagagctactatttattgattcttaactagtataagagttagatgtctaaaatgtgactccacctacatgacacaaacccccccagttcactcatttattcagtcattaaataaatatttcagatatgtcaatatctgccaggactcttgctagccattttttactcaatattttatttaactttctcaatattcctgcaaagtcaatatttttacctctatttgatgatgagtaaactggggctaggagtggcagagctcatatccaagttcaaatctgtttgaattcaaaagtgatgttttacacaaaacctaatttaggctaaaagaaagaatgtggtggagagtaagcctaatggaggcatggtcactgtactggaagatctga

SEQ ID NO: 33879 - DNA, 2648 bp, Homo sapiens
atacagagttagagaataaagacagcatgtttttacagaatatcacatttactaggaaaatgtaagtaacataacattaggtaatattgaatcatccagaaatatcatagaataaaggtaaagttgacataattcttagataatccattggtcttggaaggactcttatagagatctgtttcaggctttacctttaggaccttcaggaacacttgatcacttttctgtgcccttaagggtcctttgggaataatgtttgagaagcaccaaccagctgtaccctctggggagtgataacagaaggcagagtatgagcatggccttgaatagtaagcaggaattctgcaagcaacaggggtgggaatgggccatagctttctgagaacaatgtgctcagggcagcattttttgaagatcatgttggcaagttatagtggagaaaaggaaataaaagggattagagtcaaggggaccagttcagaggcttctgtagtcattcaggaagtaggtaaaggtgtcaactcatcacagaaaacttttcatgaggatatagggtgcaggctgggagatataaggtaacataggagtgaggaccatgggcatttgggtcacttcttcacataacttactcatgcttccagggcttgtttgaaccccatctcctatacgtcacttccatttgatggtagagtgctgatgaacacacccaactttatggcttgatgggccagacaacagtcagttcatcctgggaagctcaggtcacatggtaacttgtagcccatggttaaatgttcaatatctactaaggcccagtagggaaagccagatgagtggatatggagggggagagaaggaaaacaaagtgagaacagtgtgttgggaggtaggaatgacatcaatccaaaggtagaagtaagccaatgtgccactggcctgagacagacagtgccatatggctggggaagccttcagagtgtataatgttggggaagtaacaagacataaatttgtattttcctttttcacattttaattaaaatatgctgggtgtggaatagatattagagacagtattttagaagttcagagaagagagtgatagctttggactagatgttgtggagaggtggaatgggagaaggcttccagaggagatggcacttggcctgagcctcaaagactcagtaggacttggagggaatgagagagcagtgcaaacaggggaaaggcattgagcctggagtccttaaaataatgcaacttggctcctgactttgattcatgggggaggaattcacccaaggccatcagccaactggaagagctcaaaggtcaaggactgtacattttttcatagcatttctcatttgtttgagcttaaacgaagctgaaccctgcagggaaatgagcacatgttacgcatctctaaagccaggaggcttcatggccaggaaactatgctggtcggatagtaatgcaaatgactaatgcacccttctgaggtctcatgtggtttgagaccccaggaatctgggccaggcaggagacacataggcggtggctccaaacgagaatgagggtgattacacaagaggcagctcagtttggtgaagtgttgttctgggaatcaggagtgaggtttgctctccagtgtccctgaacaggccaggttccttctctggtttcagttaccttgtgaatgtctggctctgacatactagggggctatggaagacctggcaaatgtttagccgtgtctgcatcctaatggcagatgttaaaatccaaccacatagccttacttgttgctccctaaacacccgctttatacatcactatgcctttaaacattaagttccctttaccaggaccaggctcagggacaagtcactgtgcacatcttcctgctccccctttaagattcagttcatttctctttgactgggaagttctgactctcacagacagagctggtcattgctgccttgtgcctccacagcacttgggaacacaaaatttgccacaattgggatcttgcaaagaaatgtcaaaggattatctcttgtttttctcctgtgggcttttcaaattcagggaggtctttgacttgggcttttcagatcagaattctcagcctctaacactgtgcctgcctggaaaaagggcaaatcaatgagacacaatattcagagaaataaaattgtttctaatgaagttggagagactaatctgttacttgggtctgtgtgagtgggcaatcttttcacctgcttgagagttaaaaaaaaaatcatgaaatagcctcccgatttacttttctttcccagatttgtacgttacaggtgcaatattagaaagatcacagggcacagagttagacagatgtgggttcaaatgcaaggttcaccactcggcttgttatgttttgttagaaaatccacttaaccctctgaaccttttcttcatctataaaattcaataatattgactccaaaagattagtgtgaggattaagtgaagcaggatacataaaactagcatcatcaaaggttttagaaagtatgttaaacacctactgtgtgccagtctgacaccaataacctttggggaatcctaattgtgtatcttgaaagtcaggcaaagta

SEQ ID NO: 33880 - DNA, 660 bp, Homo sapiens
catgaattccttttaaaaaggaagttttaaattggtaaaataaaaagttgtacagttatccattagagatgatatggcattgctcaaaaaagctaacataggcctggggataacagtgaatgtacattgtccatttcaggggcccgtgttgtgattgtcatcctaggacttaccataaattccacacacatttttccccagtggaaacttctatcatagggtttgccagatcatatggcccaagcaacagggctgattgcgtcatggcctggacaagcatctgtttgtttttggttttttttttcctgctctgggtctggtcaaggctgtcaggctttcgcatcacctgggacataagccagagcagcttccctgtgtgtgggatcagcttcctccagaacctgaggcccatcaggcattgtgcttcctcctttgtggcaggagatataagtggcagtgatttgttttttttactttaggggaaatttgagaatacctttgaccattggacctctaaatattttatggatatggcaaaccttttaatattctggagtatatgtgtcttaccaaggctgccagtatgcgggctaacttactcatctggatcaatcaacagaagttcattgatgtaatagatcattgtaatgttctacaggg

SEQ ID NO: 33881 - DNA, 983 bp, Homo sapiens
tgatgcattcttcccctaaattcagtcaaatacaaggtttaagaaatttaataaatccaaaccttggaggtcatctgtgtcaaaaatatgtattttactcacacagagacaaaaactagcttcctaacaccaatcattcagaagtgcagtaagcaataactgtgtttccccaaattccctgatgataggaattatcagggcctcttattaaaaacacaggttcctggtcctcctagagcttcttattcaatgggtctgggatgaagccagaaacttgtaatatttaacaaacaccctcaggagattctcatcatcagagaattttggcaaacaatgatctttgggccctgatgttcagcactcctccaacaaccctttgcagaggagggagattccagcaccgtggtcagcctcctggtcagttaacaattaaaccgtgggaactgttgccctgggttatgcaaggagatcttttactaaagaatgttgcttgtaccacattttcgtctatagacccagagcctgacaactttcctatgttctcctctaatccccttaacaatcctgcaaggtagatagtttctgcattttacagacatggaaaactgaagcacaaggggttcggaaaaattgtaaactgtcatgtaccttataataagtagccgcatgggaatttgaatcaggtccatctgaatccaggcccaagctcttcccagaatcctagcatctggaagggtcaatggtagatttggccctcccacagccaatctatacgaatggctagccatagttgaaatctacaagcctcaacttcaggatcttttccattttaggttgacccttcactgacctccacttcctccaccccacctgcttcaccccaagaagccatcctgtttgtgcctggccactctgttgcaattttccaccaggattatttgtggctataacaagcaagaccacgccaacgtctggcattaaaa

SEQ ID NO: 33882 - DNA, 4357 bp, Homo sapiens
acttaagcaagacatccttcctctcccctttaattccaccacctatgactcatcccatttcactttcaatgacactttcaggcacaggccctcacatcaccctatattcctttcttatagtacttttcataaaactgtttcataacttatataatggcaaagaaccctagcttggtggctcttagtaccaaccctgtaacctttgacaagtcacttaattattttcaggcgcagtggctcatgcttataatcccaatgttttggggtactgtggtgggaagactacttgaggccaggagttcaagaccagactgaacaacatagcaagacccccacctctccaataaataaataaataaataaataaataaataaataaaaagttacttaattctctgggcctcagattacacatgtgttaaatggtgatgataatagtgcctattttgtggggtaattttgaagggtaaatggaaaaaaatttccataaatcacttaacacagtcctttggtaagaagaaagctcctaacaaaggtttttcttgggtttggttgttgttatcaccattgcattttccagtttgcagggccctttcacatttggtgtgttcttcctggtaaaggactaggtttgtcctgttagagagttgtcaaatggactctgagaagtcaagtggctttactcaggtcacagctggcaggaccagggcctgaatcctaaatactgatgccacagtgggtttcattgctgctattttgacgtccgttctagcactcagttctactgtttcatagagtagggagatgttgctgtgaaggcttcactttacttcaacatgcctatatgaaagttggctaagtgctcagaaaagaagtagcttttgaacagaatgcatttatagctaaaggcttccacactgggagtcagtgtcagagagattaaatacctagtcttgggaatgacatctggctttaaatcagcactccgccactaatcatcatgtggccctgggcaagtcccttgatctgtacaaggctcagtttccttgtatataaagtggagattgcaatggcacctctgtcttctaaagcagattgcataatacaggcatgtagcaatactaaataaatgttaactagtattctgatctaatttttaagctccagtttgtgcctactgctcttgaagtaaagaccaaactccttaatatgatctacaaagcttggatctatctaagtgaacctgtttagcctaacatcccactttgctcactacacaccagccacattaatgagatgactattatttctccatccagtagagatgctttagggaatgcaaaaaagctctataatgaatacactgggtttacaaagggactatccacagaaaacaggaccatatggtcatgttacacattgactttctctccgttcttggtttgtgcaaaactccattgcaactgcatgcatgctgctttacttaagcaaaatgcccttcctctcccctttaattccaccacctatgactcatccctctagtttcattttcaatgacactttcagccataggccctcacagcaccctatattcctttcttataatactttttcataacttttgtttgaacaactacttctccatcaagattgatttatatctatctctcccactagactgtaagcttcatgagcatagactatgactgtcttattcatcattatatcaagtttctagcagtcactgaatgaatgaatgaatgaataaaattattattatatatgacctgcacaataactctgtaagataaagaagtattatcatctccattttatagatgtaaaaatgaaaacagagaagttaagcaacttgcccaaagtgacacagtgagtgaagtattgaatacaagggactctgacctagagtaagactcccagctcaatacattttctgctactccatattgtctcttaatatcctatctccatgtcttttggatctgaaaaactcagcctctattaccgacagctaatgaatacaagagagatttctctgaacacagacaagccctctatcccttctcttttagtgggggctgttggaaaggaagcttacttcaagtagatataagaaataaacatttttgccagcttgaatgcagcctaatccagtggttatttagattaaaaccccagggcagtgtccaggctgacctcatctctatgtggcagaagagtgccaccaggttcagccacactcaggagcctcagcccaggagaagtacataaggaaatagttcagaatcccagtgctccaggggagccttgatgactgaaacttgagaggcctcctgaacttggaagagaggtcaggccaccaaatgctccattgtccattgaatgttacatcccatgcaattccagataactcaatactacagtattctcttacaactgagagcattatatttttcaaatgcttccataaacagctttgttttccttttaacctatcaacaactaaaaaaaaatgtgggaacaagtaatgcagtaaaaaatggttacgtgcatgggatttggagtcagacaggttgaatcccatttctgctgccttctagctatggaacttgaataagccactgagcccctgtgagcctccgttttctcatgtgtaaaataaagatactgtattacatacagagacatcatagagtcagtcaggtgatgtatgtaaaatgcttttctcagaagttcaatattaatagtacttaagtcagaatttctggactctactttgttgagtgggatttctttacagtgaggcccaccagcaaatatccacctcctagttcatctccatagttaaatagcaggctgagtaaatatttgtgacatgaatcaataagccagtgaacctttgtcccgttatggcaccaagaaacctttccctctctcctggtttggggcctaaatgcttctggaataatgagctgtcatggattgatgaatcacaaagcagtggacttacaatgccttccaagcaatcaggtttaaagaaaaatcctttagggcacattgatgcggggtgaaagaaagcgaggctgggtcctgatgaatcccacacgcagcctgacagagtgaatggcaacctcttcaaatcggttcttggcggaggcactcggggagttcttacttaccagcctctccagacctgtctgtctgtccaccgcagactctacctctgactggggaggcctgagtcaggcgaccaggggatcctgctgattggagtcagctcaatgactcgtcagctggaaagagggggatattgaattcatcagtcatgttgacagggggcgtggggtggagagtgcaggggaaaacccagtgttgggcaaagctgtgaagaacactgagttagacttgggcacgataaccccttgaaccaaattaatgacccacaggctcccattgttttgtttcaaattgtactgaatgatggataataaatgttagcccttgggtctcactcaaatatctaagaaaacagtaggcaatttcttaaatttttttttccgagtgttttcatgtatctttaaatgttatacaacatttatatttcagtaattggacacgctgatactacctgggatggtagcagccaattgggatttttttttcttttcttttcttttttttttttttttttttgagacagagtctcactgtcacccaggctggagcacagtggtgcgatctcggctcactgcaacctccacccctcaggttcaaagattctcatgcctcagcctcctgagtagctgggattacaggcatgcaccatcacacccagctaatttttgtattttaagtagagacggggttttgtcatgttggccaggctggtcttgaactcctgacctcaagtgatttatctgctttggactcccaaagtggtgggattacaggcatgagccacggcacttggtcaacaaattgggatttattaaacacctattttgtaccatgtgaatatatatatatctgttattttactcatttctctgagaggggtgcctacataattcccaaattatagataagaaaacagggaaagacaggtgactaatttgcagagtcactttacaagacagtgacagaggctgaacacagtggctcacacctgtaatcccagcattttgggaggcccaggcaggaggattggttgagaccagaaatttgagaccagcctgagaaacaccaaggccccatctctacaaaaaataacaattaaaaaatgagccaggtgtggtggcagatgtctgtaatcccagctacttgggaggctgatgcagga

SEQ ID NO: 33883 - DNA, 1252 bp, Homo sapiens
ccctagaggattgattcaagtctgggagggtgccaggttttcattaaaccccttataaaccagcactgcagttctacagggccacatctgccgaggaagccatctgtgattcgtatcttcgtgctccaacaaaacgccagcagtgtgaaaaactctcccctctgctctgcagtgaactggaaaagtaacattagtaatcacttttgcaggctccataatgacataatgggcattggcttaagtcttaaaccacagccaatagcccctgccaacaatctgggtggatccaagctgtcctaaaaatataggtcatcactcatgcccttctcgacctaagagaataaagataaagaatttgcactttgagatacagggagaaaaagtaactaatgtttaatgagtgtctgccaagcatcaagcactttgcaatgatgacaaccttaaaaagcatgcatgattgtactcattttacagaggaggggcctaaggtcagagatactagatggcttacccaaagccacacagatcagtggcatggcagaaggtcgaactcaagcctcacaatccccaaagcctgtgagctttccaccccagaaggagaaccttgaggatggcatgcaaactaagtgtttggatttttctacaaaagtaattcaagactgcattaaaaattaagcacaggacagatagaacatctttcacctgtagtagcctagatctgggtaaaaccactaagtaatagaactgcacatgggttatttaaatccataatactcactttgagttagatgaacagaaaggagcttgccttctctgcttaattcttgcttcctcctcccccaaccccagcccatcctgtcaaaaaaaaaaaaaaagaaagaaagaaaaagaaaaagaaaagatactgcctgctcctaatgtctgagcccacatccaaaaatagaaccatccagccggtgttcatttcattaagagtaccttccaatagggtgcttgcttgcattttctgctaaagacctttggaggtcccaagcagtcttaaagcgaaaagtcctttttcttctgaagatgcaggatctctctggggctatccaggacaaaaggacggactccttaaacaaagaggaaacaactgctcccctcaggagactgcagactcagaagcagggagaagaagaaaaaaaaaaaaaaagcctgggctttaggaccaagcaggctgcggtttgaatcttggctttcctgccaaatcatt

SEQ ID NO: 33884 - DNA, 4447 bp, Homo sapiens
aaaagctagatataacctaaatatttagcaacggaagatcagttaaataaacagttcattcataaaatgaaatactatgcagtctttttaaatgatacagaaatacgtttatagatgcagaaagacatttatgatatatcgttaagcagaaaagctggttacaaatatatacatgcggaaaaaaagtctggaaagacataccaatgtgattgtagctcttatatctgaatggcagaatttatggataatttttatttttttacttatcagtattttctcaattttagataatatgccttacttgtgtaatagaaaataaaataaaatttgcttttttaaagggtagggacatggtattcacacagacttgggttccaatcccagctagaccaccaattagcagtgtgaccacagagacattacttacatcccctgagcttcagtttcttcatatccaatatgggtataagggcactttcctcatgaggtggtcttgaggtttacatgtgaaagcattaatcaagtgcttgacgcagggtaggtactgagctacatttttcccctttcttcctggatgtccaaaaataactgaggtaaccatttacaattacaacatggtcaaacacgccaagtcatgtaaaatgtagatccggaaattatgagagactagtatttagtgcttcagcctaactcttttctctctgatctccccagccccatgcagtgcggcggcagatgcagagattcccgttattaaccaaggtgtcttgaaggttcggaggccatccaggtggaataaagcaggctgtgttacccagccccatcagcaggtggggccggtctcacctggtgtcttcattcagcctggcacacctccccaccaggcatcagactgtatgtcataaggggctattccgtcagttactgcacatgtttgagactctcactctacctgctcccacctcaatccagttcccgtttgtgcctccacctccacttacagtctcactcttaccacttaggattttagcctcttcataggggaacttcgttgcctatcaggaatgtctggaatttgtcctgccttcccccaactactcattcatttcctcaccaaactttatgactacctaatgggtgccaagctttgtgctaggactcagagatcaatcagagacagcagaccctgatcttgggggagccacacagcctgccccaaggcctcaggtggggaaaacagactggaacacagaccataaccaatagctattataacacagcactacaatgctgtgttatagtaactattatcattagaatctttatataacacttgttatataccaggagctgttctaagcactttatatatgttaagcttaattattacaacttatctatatgagataggttaaaattatctctatttgattgataaaggaattgaggcacagagcagttaagtaacttgcccaggatagcacagttggtaaatggcagaaccaagatttgaactgagcctcctttacactcttaaaaatgacaggattctaaagaggttttgtttatgtgggtcatgtctagtaatatttatcaagtcagaaattagagaacttttaaaaacatttatcgattcccttaaaataacagtaataaatctgttacatgttaatctaaataataaattttaatgaaaaaaaatccatagcaaaattagtaagaagaatgccattgtttcaggtttgcaacatctttaatgtctgacttattaacatacaaagcagattcacatatattttgcattcagcctattgtcatgtgttatttgattaaaggatatgaagaaacctggcctcacacatcatgaagttgaataagggagaagtattttaataatctattcagataactgtggacattcctctttgatagtacaccaaaacttgacaagtggtggatttttaaagggtcactgccatgtggaatctgaaaccagctcacagtgaaggatacaagttttccaaaatcccagtttttcatttgaactctcaaattttataattggccgtacatactgtcatttgttttccttgaagtaacagctctgacttcatcatttaaatatatatatgtgtgggtggatgtgtgtgcgtgtgtctgtgggtgtgtgtaggtgtgtgtgtgggtgtgtgtctgccaactacccatggctgaataactgcagtgtgtctgtcaatcgttctttccaggaaaatggttttccatggagaaaatggctacttcagctcccaactcactcactcactctggtgcttttccttgagaccaccactgtgcttttgtaggcaacagaaaagctttacccatactcttatctcatcacaccaatcattaaaaagacaggccagacactcgaaggctgaagtttaataaatttgatcatttttattgcttcgtcaaggacattaagtgaaactgacttttttcttcctaccgtgcacatgtggtggtgaataatacaatgataactactgcagtttgctaccactaccttgatccaaactaaagcaccagctgtttaccactgttgcttttacaccatcagtttaaacatcaaccaatgaaaagggaaaattacatcttagtagcattataaaaatagttctgatctcatgaacctctaaaagtacctcaggttcctccagggtcctcaggccacgctgagaaccatggctctatactatataatccaggataaacctggggctatgtcagcttcctcactgatcaaagttcagattaaagcccaaccctgagcccagaggccttgggatctggacaatctttctttggccagcccttgtccctcatctctcagagctaggccgagtctcttgaactccaagctctagcttagattctcactgaagaccatctttccctcaagtcagaccaaccataggctagacaaaacctcagttcacctcacccttaagacactcattagacttctagccactcagggaaagaaaagagaggagaactcccatctggagcccttactgcgtgccaggcatgacattctttaattcaactctcatcacctccactctgctagcaaagaaactgaggctcagggaagcagggtgcccacgcagatctgtctgacatgaaagctaagccgtggtgccgccttctggtcaattcccacagtctcattcctggccctgcctggacttcctccccttcgtgtctgctggctggtaaggttccagcatgcctcacaaccaaaatttcctgaaatgagaaaattcccagcaccagcggttttaatcatccagtgtctgaattcctaatagtcacaaatcactcagatgttggaaactatgagacacaccactctccggaacagatcattgataaagtctgagctgggttcacttctgccattgttggagaccaggcggcgcaggctctcctttggggagtatttccaccgaagctgatggttcgtcatctctgtctgtgttccgcacacgggagttgacatcctctggcccctgcctcttcctcagcaccaggggctccctggaagagccagggcccattcaaaaaagtcacaaaacaactccccaggatgtgaccaggataagaatcacatcctaagattcagcttcaggaaagtttatcccaaaataaacccaacactgaagtaaataaagcattaggaatattttgggagagcaatttcacagaactacaaaaaaggaaaaaagatgctattgtcaacagcctttgttcagacattctgtatttctggcacatcttgttaagtggcggttttgtatctgacatttatgcaagggggaaatgacccatgtttatgaaaattataccatttcttctaagggtaagagtgtcctttaagcactggtttgagataggcagagagtttgatgaggattcaaggttgtgatgattaaagccagggtaggaggaacatgtaatttgtgcaaaagaacccggagaacaacagcaaagggagaactctgttgaatatatacaaaggggacgctgctttgcagtcttgtttccctaggaggaagagggaacacaaacagaaagtttttatgatttcacagaacaagagaaggctcaacacttggcataacaaaaggtaaaatgtttgggataatggacaccaactaagccttatctccacttgcacattcaaccaaaacaaacagattctattagtatcaccttcactaacgtgattgcattcatccattcatccaatatttaacaaatactgtgtattataccccgctaagcattgggaatgccacagtgatgaaaacacagtctgtgccctcgagaagctcctaggacagcaagaaaaacagatctgtgaagaggcgatgataagaaggtaatgagtgctcta

SEQ ID NO: 33885 - DNA, 3931 bp, Homo sapiens
cagaggctgcagtgagctgaaactgcaccatgcactccagcctgggcaacagagggagactctgtctctaaattaattaattaatttaattaataaaataaaataaatgttgatgaggaagtaggaatccagggagacttcctagtgataatgacacctgacctcaaaatcccagagaggatggtggctggggttttcacagaaggagatggatgctgatggtcattccaaagatatcaatcaacaactttcttcagtcttttatcttcagtgcatttatcactccatttaaattttccagaattggtaaaacttctatgggtcttaatttaaatatgataagcaataacttgttacatttgacttaggaaaactgcatgatccagtggtgacaaaccacaggtctggggataggcagacctggggttgagttctgccactaccacttgccagctgtgggcacatcactcaccctgtcaggtccatgcccacctcacagggatgttactagaaataacatgaggcaattgaagcatctggcacctaataacattctgttcttcccctaggatcctgtgaccacatcacaaacatcccccagttccacgggtgactgtttatcgtaaccccacagccttccttcaacccagctgctaccatctctcacctgtactatgtgatagcctctggacttttgtccccacttcctgcctcattccgctttggtctgtttttcacaaagcagccaaaaatgcttgaaaatgcgtggtgctcatgcctttcctctgcttcacaccctcccacgattctcccttgacctctgataaagtcgaaactttagaacagctttcatggccttaattgttcagcccctgctcccctttcagcctggtctgcctcccgctaccccattccactccatgctcatgtttgtccacagacttctgcctggaacaccatccctgctgcacacctcttctgcatgctaatgcctctcccttctcagtgcttcctggaggaagccctatgctttgatgcttcttccaggaagcaacccatgatttctgaccaccacaaccacgccaagcaacactggattcagtgctccctctctgtccttcctaccttctgttttttccccatttatcacagtctgttacaatctacttctccgtatccatcactagatagtcatttcttaggaatagcttttgaagcttttatcccatatctgacctattttgaatgaatgaataatctcacaatgaatgaatggcagggatgagattaaaactcaggtcaatctgatccccaaacgtatgggttcccatcatcccagttgaaacctaactaaaaactgaagtagtgccatcccccctccactgccccatacccccaatgggtctgctcccaccagccccccaccctgccccccaccacacacacacacacacacacacacacatccctagcttagggtccctctatttggcatggactcattttctgccaggaatgcatatcttccttgcaggctgaggcactatatggactgtactaaaaacactcaacccactgattctggtgaaattattttggagtgacagggataggcaggggctttcctgggctcaggactctagctggggagtggcaaaagccacagtgcaactcaactcaggagaaaataaatgcctggaaatttgagccagctgtttttttcttactcaccaaagtgcattgagtcaacccttaatcttttgtcaatatttgcggactgaaaacacgacaaaccaccccctgtgccgctcagagtgtagacactgactgatgggaccaggtacaaaatcccctgggacaaaacagaactttcataactggctgtagagttattgtttttgccttttggaagcttccaccttgtgacgggaagagcactgtcagcccaacacagaaactctgccgcctggagtcacgtggatccagatgcgaagggactccaacgtcatgctaaggagtttgggtaataacaatgataaaatgcacttattgaggtagtgtttaatgtgtttaatgtatcttctttacacgtgtttaatgtatcttctttaatcctgaaggctaagaatttgtacagccatattacagatttggaaaatgatgtgaagagaagctaagggatttgccactgccactcagctgccaaggatcagaggcaggattctagtctgtcccctttgttccatcacccctgcctccccctgggcccagccaccatcacctctcctggggggagctcctaattgttctcccttcttcctcttgtgcgctcctccaaactatctccagccaaagtgatctttaacaatgtaaatccagttatatcactctttccattgtaacagacattacttctacttctcaacgtccatcctccaaccattgtccagtgattcaggcagaattccctcctgctcaggaggtgagtcgacccagtagtgccactggctctgcaacaggaattggttagcagggctttgcatctccttggccacagacgttgggcaggtgtggaaaaaggccatcagctagatgctcaagattgaattctgagattgtgggggtgatgctcttgctctcatccctgtctgcaggtagccatcctgtgaccctggaagaaaccagcccaaggaaggtgctaacctacagaagaaggacatggccagggtaatcacatagacccggagttgaagccctgactgcaccacacccgaagcctccccacctttcaacctctcggtgatggtgaaccaataaactctttttattgttcaagccagtgtgagttaggttcgctataatttgctgcagaaagtctcctgagtgattcagatgcctgttggtgctcctggaattgcatccagatgccctaccttagtattaaagtctcactcaactctaagatcaatgagtggggagggtgagggctagattttcattgaccctggtgttgccagcccctgctggacatcaatctggcacaaagcagacaatgttaatttttttttccttgaaggagtaaacccaggtctctctccagtgtcttatcagcctcccaaaggcggggaatcccactggggtccctgatcaccttccagagccacctctctgcaatcagctgcattttgctagaatcggccttgctgtccaccttccccatcagcgtcctcatggagaccaccatgagggaggggccagcgggtctgaacttgaggctatgtctagcagtgtgtctgagctccaggtacccaggagggggccatggccgagtgatgcccagggcacaggatggtgcaagcaagatgtaaacaagatgcaaacaagatggtgcaaggagatgcaaacaagatgtttgcaaggagatgtttgcaacaagatgtttgcaaagagatgtttgcaacaagatgtttgcaaggagatgcaaacgagatggtgcaaggagagcctccaaaacagcctggaattcacacaagtaaatgggaggggcctcagagccactgtgatttgggcagcaataagtatgaccagcagggtgaccagtggaccatgagaaacatccacatgtgggtccaaagaacattgcattcctttgtttatctaacccacatcctccttcgtgtcttagggcctttgcactgccctttccttggactgattacccagttactctacctcatgaccaacctctgtcttaattctctgcagagtgcttatcaatggctgattgcatttgtttgcttttgtttctctgtccatgacagcaaggaccttgattgtcttatttatcactacttctctcatatcaaaaatccctccatagtcctggctcagcagctcttgcctataatcccagcactttgggaggctggga

SEQ ID NO: 33886 - DNA, 1062 bp, Homo sapiens
gtacaagaaggagatcagcatgtgaatagggatgaacccatgaaagagcatatcacgttccggaaatattctccacccaacactgatccccaggtagaggctctggtttctgagctttttctactggcttgtattgtttattctgttcttttgaactcaagcagatctgggattggatccaccacctaagaatgtgaactcaagcaaagggcttcatctctctgagcttcggtgactttgtctataaatcccctcagccactggcggtaaagactaaatgggacctcatgtatcaacatgcctagcatgatcctaacacaccaggagctttcaatgctccctcccttccccgatggcccagaaaggcccagaaagcctaattcctttcagggaaccagagagacgagacagcacaggtatagggcttaaggagggcaagagtgatttctgtgttggtggtgtttttaaatgctaactggaacaggaaaaaaaaaatcaggtgagagagaaaccacaatgcctgccaaggagtagcctgcattgttcgcccctggaaaagctgctggcttagggcttttaaagctggggaaaggtcaacccctcgcaaaagaacaaactgcatggccctgtgacttccctcctctaattcccataactccctgtgctggttgcctcctctggaacgtgggaaggtgatccctgccctgccagggctgtttgggctgtgtgcttgtgcttgcagggctttgtggattggaaagtgtaggcaacctgatgaagagggttgtttctgtgtgcttagctctgccagcctggcctcctgacctcccatgctgtttgctcagcgctacccatgtaccttccctcaggtcctcctctacccactgctcccccttcttgatttcaccttccaaatcctcccatccttgataactgcatttccaagaagcccctgctggtgatgtcggtctgcactgacctcatgccctcaagatgtcttcagactggatggcaccatgagagtcgctttctttcttctgtgttttgttttcttttcctgtt

SEQ ID NO: 33887 - DNA, 999 bp, Homo sapiens
atacttattgaataaatagaagaattaataggactgttttacctggaagatatgtgtacagtataaattgcaacaggaaggagcatttgaaagaagtcaggtaggtacacattggggaaactcagaccccgctggccaggatttgtgaagtccatacagcgataaggagactaaggtaaggttagttacaggctcccacgagagcaaagctccacctgagttccacctccacctctgccccaactcacattgcataaccttgggaggtgccatcaccttcctggctcatgtcttcctcacctgagatgtgcagagcttggatcaggctcacaacttgcttccagatctgatatttacatttccctattggctaatacctcttggctaatacctcttcctccaacttttaaggacattttgaaatagttgaaactgttctaaatattagaatattgaagacagctactgagggtataacacatattgaccaacctctacctcagaatgatccaaagactaaggtaattcaaaggggaagagaagtcccagatattagagttaggtggcttaaatgccatcagagggacttccaagtgccctcttgtgagtgcatgcgtgaactctctccctttctctctcagtcacacacacacacacacacacgcgcacacacacacacacacgctaatcttgctacactcatctgaaccaaaaaaagaaaacaaacaaacagacctagacagtgagttgcgagagggatttgcaatttactattctatctattcccttcttttcaggtctttattcattcaaagccttgatcaactgagcactaagcatcacctcatcaaaatcacctggagtgcagttggaggctgcagtgagctatgactacactactgtgcttcagcctgggtgatagagcgagaccctgtctcaaaaaaaaaaaaaaaatcacctggaggagtaataacaagtttgttaaaatgcagattttag

SEQ ID NO: 33888 - DNA, 4808 bp, Homo sapiens
tctcactcttgttacccaagctggagtgcagtggcgcaatctctgctcactgccacctccgcctcccaggttcaagcagttctcctgcctcagcctcctgagtggctgggattacaggcacctgccaccacgcctggctaatttttgtatttttagtagagacagggttttgccatgttggccaggcttgtctcaaactcctgacctcaggtgatccacctgcctcggcctcccaaagtgctgggattacaggcgtgagccaccacacccggcctcagcccccatttcttaagcctactaaagttttagattatgtaaaatgcttagcacagttaagagactgttcacatatgccaggcaccttatctagtagctggaagcatacgaaattgccaattgccaatagtctatcatttttgacctttaaaaatggcaatttcatatggctcaaccgaatgcattggctagatctcatcccaaccttccaagcagacatagttattcctagtttacagtaaagaccatgaaactccaaggggttaaacatcttgctgaagggcacagctctaatgaaaggcacaggtgggattccagtgcaagtctcttctgcctgcagccttggttcctccttctgttctccagcaatccaccactgctcctcaggacgactgcaaacaccagacggaagtgcatcattttggccacagtgtcccaggtcgaaacaccacctctgactccaaacagagccatgagtttgtcccttgaggctcgggctatgtgcacaagttttcagaatgccttgtttcttgtcaaaaactaaactgatgtttttcctggcatggcttttggaagggagcatgattgctgattaaatatgaagtggtttgaaacctaagtgtctctctgaataacgtaatgtttactccccacaaggaaggcatgccaaggggctgtctcataggggttatttatgtgtccaagtctccaacaacccctctggaaactgttgcagtgatccttttgggtttgacaccccctgagggatctgtgtcctgaagtggcctgagggctggaagggagtgttctgtccccagcaccaccagctctgctgatgagccctgagctgggtacactgtacctgcccagagaggctagagacttgcagacacatttccctgttcccttactcagagtagggaaccctagcctgtgaggctgcagaaggaatcccggaggatagtggaaggaaggagagcagcgttgtctaggagggctcttatgtcatctctgattcctcaaagaccctcaacgtggttgttcttgttgccatttcacaaatgagaaaaccaagacccataaaagttaattcttttctcaagttcacacaggatttgaacccaggccagtctgattccaaagcccctctttatttcaggaaggaaggagaggcaggaggaaaggggaacttattttatgccaagtatatgctaggggcttctctttccattatcttttctatgctttctgctactcctgggaggaaggtatcattacgcttatttcacaggtaagaaaactgaggtccagggtattggagtttttgcccaggatcactcaggtaataaatagcaaaaccaggctatagcccaggctggtttacatttcctactccttcacgctgactctttagtgatgagtcccacagtctgggtctcttcccaaccatgacacttgacctcagtttcccattctgtatcatgaaaaggacgtaagcatctcccaggtttataaacctgatatagcataggcccattagtacagtctccccatgttggagagacaacatggctcctaactgaattataaaatagtgttcaagttgctggcccttgaattgtctttcagagaaaacatatctcagaagatataaaaagaattagcctcattccccaaggaaagattgagagagggactggcaagaagcttccagaattccttggaaagtccctgaaatagctcatatggccacctctctcaagcagagcaggataagtgtggcaatttggggctgtcctgaagtgattctcggcttgcttagaagctgagcaatattttctacccacctgcctgtagcaagcctactcccaggtcatcacccccaatttcgtcatccttttccatgctcccatatcagcaagagttggggcttcatgaaccccttgaaaacattcagctctggggccatgagtcatagtagaggctacactagactaacccccagaaagaaaaggactaataaaatgaaactcccaaaaagaaaggacagtcactaattggtcatcgtcctcgtatatgccaggtgcatattcaataatcaaaataacccatagtgcagtactttcttttacaaaataagaaaaaataacaatgaaaaggataataaaggcaataagaatagtgataacagtaaccaacatttgcggagctctttctttgtgccagtgtgccagtctttttgcatgcattaggctgatccttaaaataaccagataaaatatttactattactgtgcccatttcaccaataacactcttgaagctcggagaggttgagtaacttatatcacacagcaggtagctggcagattgagaatatgaacctaggtccgtttgatctgaaaactttggctcctcgtcattaaaccatgaggcctcctggagaaactggattcacaagtattaccttcattgaagcatttatcctctctgaacctcagtttccttatctgtaaaatggagttgtgtggggaacaaggaagatgctagatccagtcatgtatttggtccgtcattccacaaccactgggactcctttgggttatcaggcacagagctgagttctggggttcaggggttaaatgagaatctccactgacaagtacaacaggcacagatgtgactgatcagagtgtagcatgccgagtgccatcagagcatgcgtgcactcccggaagcaccaaataaatgttcttagttatgacagaccttaaataaattattattattatcattgctattcattgaaacattaaaggcatattcccttctgagtctcacttcctggggttctcccactagctcccgctagtttcccagatggacgcctgggtcaacttgcgacacattggacttttgtttttaaccctccaggaccttacggcccggaaaatcccaaaggtgactcagagactttcagggaaagtgatcaaagctgaggcccctaagggcactggattctatactctgcagcttcccctatcccagagcaggagaacgggctggagctgaatcccaccagcctcctcataccctggggcagctgaaggagaggctgcccaaccctcaggagagggcagccagctagggggtctcacttcccaggttccatatgtccctcagctctgtgttaattgtgggtctctgggcaagtccctccaagttttagggtccccgtctgaaaagtgggaatagaatttctgccttctgttatatatggctgctataaaaactaaatgagaaagagtattgtgctatgatatacctattagacataattcattcattctctattcatcgaacacacactttgtgtcacaaactgactacatacctaacattttccatgtagtaatcccatatgtaaaactaagtattttatgtatatgagctaatttaatcctcacaatactataggtagatattatctgtatccccattttacagatgaggtaaccgttcatatagaggctaaggaccttgcttagggctacacaaacacagctgatgagtgacaaagcaggtagcctcgctctggagtctgtgctcttcacctctcccttctctgagggtgagacatggtgcctgtcctgcccacagggggttacagtctggtaggaaagacagagtaagcagacaatcatagtatatacggtgcatgttgcgatggggagtgcaggggatcagagccagagaaggggctcacacccagcccagggggattaaggaagacttcttggaggaagtcaatacagagaaatgaagtcatcctgggcaaagcactagttgcgggagagctctgggctgagaaagaggctgttgcctttgaatagtggagagaagttggaacactgggttcaagggcaaagataggccggggcagatcctgtgggaccttgtaagctgttgtcagtcagggacccagcagcaaagagatggcatgctcacctgagtggtttaagaaaagtttagcaaaggaactttgcacaaactgtgggcagggaagatgagaagtaataatggatgctgcactactcctgggctagtagccattaccaccctgaagcctggaggggcaagaggaggaagcagcatagggaacactatggcaggagctgtggcctccaggtagagggaagaccagataagagggaggcgaaaggtaaacactgactgctctcctcctgccctcccgtctcttgctgggcttcactggctgaatccaactgaaaatgtaaatgtgtgtgggtccaggaatgcactccacacaggtcagagtcttggggcacacagcagggtggggaagggaggacaatggacctctgccaacagtcagaagatactcttactcagaggcttattttttatcccaaggacagggggagccatcatagtgatgctatcaaatctctactgttttttttttcttttttttctttttttgaaacagagtcttgctctgttgtccaggc

SEQ ID NO: 33889 - DNA, 2923 bp, Homo sapiens
gtcattggataaggccttaccaaacctcaagaaactgcaaaccatccctctttctccttccccactgacactgtaacacacccttatatacacacacacacacacacacacacacacacatattaccaccaccaccaccaaccaccccccgctctttggcctgccctggtgctgtcacaggccatagcctcctgtcttctgattctgattccactcacacttcagcatcctcatcgtagccaacactgtgccattattccattcacactatctgcagatcacagatctggatactatgttctcatctgacaaatgagtgacaagaaggacagaaaaatccacagactcatccaaggctcccacaaaaagtgagtgtaacatagccaggatgtgaacccatgtctcacccaaagcacaccatactccgactgtatgcagaggaaaccacctccgctgcccctcctttcttttacttttccctcttccctgccatgagacagtgtgtcttagactttgaccccacagagttttccttagcaagacgcctcctccctgtacagtcctcaatggacagagttggttgggtacagtcctcttccccctgccatagaaagcctggtgcatggctgaagcctcgcaggctggccatccccacagcagaagcgctgctcctcccatcctcctgcacagagggcattgcctgctctggaatgggtgagccttcataatgtgttatggcaatttagtcacataatggcttgtacttggagagcatttactttatgccaggcattattttaagtgctttacatttaattgttacaaaaccacatgtggtgagtctattcccattctacagatgagaaaactgaagtgcagagagttaaaataaatcacccaaggacacaaagacagtgagtagcagggctggatcagaattcaggcagggtggctccagcatctgttggcttaacctcctcatatgctttttgtctgaactggaaagccccaaagcacattcaatactacccctcattttgaaaacaaagaaaatgaggcccagggagaagaagtgagtgacttgcccgggtcagtgacagagcctggaatacagcccctgactcccaggccagtgctcatctcatctcctgacactgcacttccccaggactctctccccaaactctgcatgtccttggctgcaaacaggctgagtttctcactaacagctcaattatactggagtgagcactcccctccaggaagccagtttacgggacattaaaatctcttactaatgacctatattcctcacatccaaactggagcttggccatgtactccaagcaactccttgcaggagtcacaaagcttttgactggggaataaccaaagccaaatatttccagaggcaggaaaccccctagggtcccattcctcagctcctcctcagcccacaaggaggttgttctaatgtcaatggaagatactttcttttttctctgaaaccttcagagatgataacctggtgagcctggggccactatcacctcctcatcacccccaccccatatttattctacagatgaaaaacttcaggatgggaaatgtctctattcaaaccccttgttgaaccaatggggaaactgaggccagcaagaagactgggccatgctccaaggcacacagtagggccagcaatggccagaggcagggctggaacccagatctgtccactctgaattctaattctttctaccacccctcacagggtcctcccagcaccttgtttgtctagagtacatagttcttttaaaagtggtttgtataattcttaaaatcctgaagagttgtaaacagcctttgtagaaatacagaaaaacagttcggggaataatttgtctctttcttcccctgcttaattttttgatctcaggatgacaaggccagtgaccaatctgtcctcttcctttccccctgggggctcgaaggaggtaaatctagggcatatcagtgagttcggtgaactgatgtttgtgaagtgcttcagctgacacagtgttttcatgtgacattttcaacagccctgtgaggtaaacacatgcctattgcaagggaggccatgtggcctgccgcgtggccactagacattggagtgaggtcaacctggggctggatcccagcctcaacacacacatgtgagctcaaagttacttatcttctctactttcctcatttataaaatgggcattatacacaccttgcagagacattaggcagattgaataaggtgaggcatccgggactttacagcactcagtaaatgttagcagacattatctctgtactgtcctctaccagggagtgcattacaaaaaaaagtagttaactcccggggtttgttattccaatacaggcagaaagtataaattagcatcagaaaggctttgatagactccagatgacaaagccatagtgggagctagtatgctcaggactggctcggtactctggttaatctaatcagagtgaagccaggtcgtgtgtgggagctaaagggaagatgcagtatttttttcctctagatataaacctggggaatgcaggcctggagctgctggcccatcctggtgctatgtggaaactgagactgaagccaacatggaagaaaggagtcctgagagaggaagagagatcatgtgagacccctccagccagtcccagcccaggatctcgaaactgtatgaactgatacattcttttgcagagcaggggtgtgcgttatctatcactgttgtctatcacttgctcgtgaaagagttccactcgcttcaagggttgtcgaaagagccaaagagatactagcctgctggttgatgagggttggtgcacaggacttttcagaagggctgtggaaatgttc

SEQ ID NO: 33890 - DNA, 977 bp, Homo sapiens
gaaaacctcttttctaatctaaagaaattagagaccattggcaatactcttatcatgattcactgaagacttttttttataaacatgtgctctctccatgaagattcattcaatgacattaattgagtatccatctgggccacgtaatttattagaccctttctatattttctcatttaactctggggaaaaaaacgctattgggtagatactattgccccatattatagatgaggaaaccaaggctcagactggtgaaattagtcactcagccaagttcagctcgaccctagatctatctgacttcaaagcccatgggggatgcttttcagctgaatcagccccaacccctcctctggaagccaaggctgataaatgataaataatcctcacccgagtttccacgtctcataccttaggagcctcagagtctgagtctttctaaaattaggtcgatcgcttccttccttacgtcgagccagttttaaatataggctctcctatccatcttccttgctctgctatgtttcctctgcactccatggtccatcagatcccagtagtatttttcctattgccttttaaacttcctttgggcgtctgatttgttactcattttggacccactatgctgggaacttgttcatggttctccgtccctgtcagctctgacgcaagtcaggaaaagcctcccaggtattagtcatccctgctctgggatgtcatgcagcccctagaaggtgacctctagctaatttcctggaggcagcaggtatgatggagagaggctgggctttgaactcaaacagatttggatttgaatcttagctgtgccatatttctgagtcttagtttccttgtttctaaaatgcaggtgagaatacatcttttccaggccaaacatgagcattattgagataatctaagtatttttataacctggaacctgagaattgtttaataacttttaatcactt

SEQ ID NO: 33891 - DNA, 757 bp, Homo sapiens
agacatagccctaaaatccatttttccctgatagctgcactttattcttcaaagccccttttcctttaagaccataagctcttctggaggattgagttggaggaggacagagtgatgataaatctaccaacaaccccagccccttctatcagtcgtttaatgagaagcacgtggaagtggaggggaatgaaggcacggatgggcagagttcaaaaggttcctcccccttctggtgtagagggggatttgttgtgtaacctaaacatcccagcattcctagcgggaagaggcagagcgcaggaggcccagcacagccggcctgcaaagttaccaaaggctcctctcagtctgacagtccctgtgacttcgatcctggctgtccacgttgcttaatagtctacggtctgccctgagcttttgtccccacttcaagggtatggattcaacccccagaggacaaggtcagatccaggagctgcagtcagccccattccctgtgtgaaaaacatccttcaagcttacaaagcattctggggtataatatctcaaaactggtttaaaattaaaggtactcactcatcatgctcagcttgtttccacacctgtgttttcagtaaaccacactgattttcacctgtcattcagctagaaaaaaacctcactatctttattctacctctgtgtcattcctacattcaaatgatgagcaaaagcagccgactctacttgagaaatgtcttcccagtatcactcgcca

SEQ ID NO: 33892 - DNA, 943 bp, Homo sapiens
ggtacaatgttcactgtttgggtgacaggcaccctaaaagtccaaaccctaccactacacaatatatccatataacaaacctgcacatgtacccctgaatctataaaataaaactttttttttaaaaaaggattatttagctttctattcagttcattaatcatcacacttgaccgtgccagtgactgactcatgattcaagaagagcttgcttccacttcccagaacttgttccagtttctcattctgcttcctatgcactgtgtgaacttggacaagtgacttcacctcctgaacctcaattttcatccttcaaaagatgcgataataacatttatttcacacgtgtgttatcaagaggaaatgaaaaagcatttaattaaaactgttacttttagtgcttaataattgttagtttcccacctttttcctttcttccttcctctctctttctattccttcttttcttttcccttgcttccatgctttctttcttcctctgttcttaacaagtactgtaatgaatacaaagaagtttaacagaggatccttgctcaaaggaagttaatctccaggtggcttcagtttcctcatctataaaatgtgaaggtgggaatggataacttctccagatatgtcctcccctcaccaatttatctgcagtaacacgtgtacatacgtagtcagcacagattaccaagcacctcttttcagccagatcctgagctaagctacacggatagatagatttacactccctgtcctccacaagctcacagaaaaattgtagctgaagacaagggggaagaacctacagtaggcatgcaatttatataactattttaaagagttcagatgtcaagtagagaaaggggaaaatagccacgtcagagtctactgatgagacaatcagagagggaaacacacaaagtactgtagctct

SEQ ID NO: 33893 - DNA, 2000 bp, Homo sapiens
cccaaggaactcaattagagagagaaaaaaaacgatctaatccatttgttttataagaaatttctcagtgactccagggcaatatctggtggagacagaagtcctgagagcaggaggcaggacaaggtggaggcagaagaaggagaaccttgggtccccatcctcgcttcaaccacagcaccactgctttaatctagtttataaactagggttttataggagagttcaaaaggctctgttgttaaagttcaaatatgtgcaacctcctggttaacagaggaaggagctagagtccagaaaggggaagtggtttgcccaaagtttcacagtaagggggaggccaagttccccatgcctagaaaccagcctttcacctgaatcagacctaccgatcaagccagacccagtgcctaacctggaaacaacccgacaaggcttcttgaagtccctcaacccacttttaccccatagagagagcttctcttttgctcataatttttcagtgactgtcttgtctccatctgtatttcactcagaagagaaagagcctttaaccactacaggtaccataccctgaggatgtgctggtagattcctaaacaggccagggaagtcaggggccagccagccatctcagctgacccagacagttcctgcagcatcacgaccaaaagtgtcttcttcccagaaggaagggtcaggtaggtgcctggtgtcaagaacaggcttccaaattcttaggcattagtgttggtcacacagattaaagttaaaagtgattattcataagaataatccagatgttcccagttctcagagggcttttacacgcattatctcatttggggactcacacaatgttacaaggaacactgggcagaaattaatatgcccttctataggtggaggcccatcaggatctcaccagaatgtgagactttcaagggcacaagattttgtctattttgttcactgctatttccctagtgtttacaacactcaacttggaatgatgttcaatatctatttatttaacgaatgagtaataaacagcccttgccaatcttcctaatctcatctctcttcacttttcccatatgccactgactgtgatcacactgaaccgcatccaggtgcccaagtgtgagaaactcctccccaagcctgaagtttctgcatgagtttttttcctcagcctgaagtgggctcctccaacttagcctctattggacctttatgtctcaatcttgacattctgggctacagatgcctcaccaggcaagagcaaccagcctaggggacaactaagggtgaaaaatctccacttgtgctctgcttgccaagctgggcatcctgccatggagctatagtcacccacaaaaaggggtgcctttttcaaattttcacaaaggctccaacagagttaactgtggtcctgttgacaagttcctctgggggtttttgttcacagcccaaaatagtttggagtccactcacaatctctggacttgtctgtttccctctcaaggcggtgagttcttccacggcaggggctgtctggttagaagttctcaggcatcagtaccatgccaggcccacaggaggggttcaagaaatgtttattgaatgacagagtaaatgaatgaatgatgagtgaagcgtagagaggtgaactgacttttccagagtcaaacggccagtaagcggcacagctggcttgagtcccctaaacctcctgaaatctagtctagagctttcttccatagtggaaatcttccttccaaatattccttctggaagtcaagtcctcagagacaccttaactagtggtgaagacaagtcagacgaacttaattaattctgagcactctcatgcatcctattcgccaggccagtgagggcattcagaaatatttagggagactcatttttctacctcaattcttatttctgtctgctcctcactcttcacccagaattaagacatgctgggccgggag

SEQ ID NO: 33894 - DNA, 4514 bp, Homo sapiens
taggcccaccactttctcactgtgttcttgggcaagtcactggacatctgagtctccgtttcctcatctgaatacaggggtcaaaatttctacattgaaatggttttccttcacttgcctgttttatgatcttaaaattggtaactgccttctctgggcctcccttctttccttacctacttatcagcgctgtggcagagtaggaaagggcatgggttctagggcgtgatttgcagtgtgatcttgagtcagttgcttctctgtgtctcagttttctcctttgtaaaacagtggctacctcatgaatttgttacaaggactaaaagagaggaaagtatatcaagtacttggcccactgttaagtgctacacaagtgtgaactcgcttacattgtatgtgtgactactgagttaagaaataccacagatgaaagggtagagcatctgggttccagttccagttttgtcactcgcttgctttgtgatcttaaataattacttaccctctctgggtctccttttacgtcttcagtaaaatgaaagggtgggagcttcctaagggccttctagttcttgcattctgtgtaccagaattgtgtacagagattctggtacagaatccatctttgaacctgctgctccctggacctgatatgtctagcagtgcttgtggaaaacctactcccttctcatcctctggccaggttaagtttaacctcctatgggaatatttccctgagtcactcaaaaacaaacaaacagaccgggcgcggtggctcacgcctgtaatcccagcactttgggaggccgagaggggcggatcacctgaggtcaggagttcaagaccagcttgccaaaattgtgaaaccctgtctatactaaaaatacaaaaattagctggctgtggtggcacacgcctgtaatcccagctacttgggaggctgaggtaggagaatcacttgaacctggaaggtggaggttgcagtgagccgagatctcgtcactgcactccagcctggaagacagatcaagacttcatctcaaaacaaacaaacaggcttggcacaagtggctcacgcctgtaatcctagcactttgggaggcccgggcaggtggatcgcctgaggtcaggagttcaagaccagcctggacaacatggtgaaaccccatctctactaaaaatataaaaattagccaggcatcgtggcgcatgcctgtaatcctagctactcaggaggttgaagcaggagaatcatttgaacccgggaggcaaatgttgcagtgagccaagatcgggtcactgcactccagcctgagcaagactccttctcaaaaacaaacaaacacactccattggcttcttcctatgcttcgagcatttacctggataccactcttctgaatctgacttatcattcttagtttccctcgttctctccctgcttaccaagctgggtacccctcgagggcctggtgggcctggagtgacaaagtgcctgggctttgaaggcacatcccagcctcaagaaagctctgtcccatactatctgggtgatgttctaactctcaactgcctcatctataaaatggagacagtaatacctacaacacagggtcgtgaggatgaagtgcccgaatatccacttctggcagaggacacttagatgcagtcacgtgaaagggctggacgtcacctttctctttggaaatgtccccagggtgtggcacaaaggaagcacgaaatacagtattagtggactgcatgttctggggtgagcagcttggaaacccccaactccccatccgccaggccacaaggagttaatgttcaacaacacccttctgacccggttcctttccaaaccaggcctgcagaagccgacggctgctcccattgggcccatgcctgccccgccttcccgcccgggaggtcttctgcgcccagcgctcctccagcttcttttgctctccccagaagaatttaaaaagccaaacaaaacccttttgctgtgatctcaccccagacaaacgcacggctcccagacaaacgcacagctacaaaagcagcccgcatttgcattctaaaccgtcccggcctgggatgaaaagcagaaaatgaagtcaaagcggccggcagaacaatgagcccctcccggcagccgccgccccggccgcccccacctcacaggctgaatcccaggcccgagacgtggggcgtccggagcagcccccgccgcggaggaacggccgaggcgcgcccacctccggggccgtccgagcctcgtcgggctcggtggactggccccgcccgagcgcgcaagcttcccatctctgctttctctcctccagggtgaaaggacggacggccccgacccgcagacccggcagagccccgcggggagggcaccaggccaaaactaggaggaaaccgaccaagtgggctgcggcggccgggaaagaaaccacgtgcgctgatgtcctcagaaacgcagggagatgttccacccacggaaaccatttgggttctgctaaagaagggggtcaggggtcagaaagggctcttggaggggacgggaaatatatatgaaatttaaaatatctgtatatatttttatatatacatatgtatatatgtgtgtatacatgtctatgtgtgtatacatacatatgtgtatatacatattttatatgtgtagtatatatgagaccaggttaagtttaacttcctctgggaatatgtgtgtgtatatatgcagataatatataacatataataacatatatagcatgtaatatataatttcagcgtatatgtatatatgctgaaatctacaaaataaaagtcaacactccagccgcagcattcgacagcccatagggacacaacaatccgttgatcctacccgccttttcactgccccccacccatccctatgccatcggtttctctgcttcctcagcataaagtccatgctccgtcattttaattattcggtctaaactcccttgccactcgaacccataggtgtacgcacctgccaaaccccaagcaggttaaattcaactcttgtccaccctcacctgcgtctgccgggcaaggcacaccaccttgctgactattcccaataaattcttgacactaaccccaaatgggtggttaatgctgacttacatccctactacattttcccagtggattctcttccactcttctaaacaaatactttacattttctcttttctcagctcccccctctgctcccccatccttcctcactgctgctaactttgttgctgttttattgaggaaatagacgcaatcaggccagaacttctgcaagctttccccaggcacccacctgatttgtagcgtggcttgcctggtggccatcctgttctgccctccgacctgtgatttcgcatgaaagctgtcttgccctgccataggccgaacctccacctgcattcgacgcccaagcccttcacagctctgaaaaccctcccagagctcttctcttctgcaccatcacttttcctctgtctggatcattggcctcagctcacagacactaccatttccaccatcttaaaaacaaaagcaaaccaaaaacaagagtctcttttggctccctatcttcctccagctacttaacccatttctcagcttccatttacaggccagctcttcaagaattgtctgtgttaaggggcttcaaacttgtatggttcacctgcctgcagaagagaattttgaaaaattgtgtactctggccgggcgcggtgactcacacctgtaatcccagcactgtgggaggccaagaagggcggatcatgaggtcaggagttcgaggctagcctggccaacatggtgaaaccccatctctactaaaaatacaaaaatcatctgggcgtggtggcaggcacctgtaatcccagctactcgggaggctgaggcaggagaatagcttgaacccgggaggcgaaggttgcagtgagccgagattgcgccactgcattccttcctgggtgacagagcaagactctgctctgcaggggaaaaagaaaataaaaaagaaatattgtgtactctaacacacatttgtaagttgtatctaaaactgctcaatataaatttacatataagatccaggtgcagctaaataatcagccacacactctgaattttattattattattattattattattattattattattaagcttagtaaaatacccacaacgtaaaaatttaccgtcttaaccatttttaagtgtacagttgggtagtgttaagctaagtaatagtcacactgttgtgcaaccaatctctgggattttttatcttgcaaaattcaaaccctaatcccattaaatgacaactttccattccctcttttccccagcccttggcagcaaccattctactttctgtttatacgagtttgactgttctggatatctcatataaggaaaatcatatagtatttgtctttttggtgactggcttactt

SEQ ID NO: 33895 - DNA, 1551 bp, Homo sapiens
agctccgcctcctaggttcacgccattctcctacctcagcctccccagtagctgggactacaggcgcccgccatcatgcctggctaattttttgtatttttagtagagacgaggtttcaccgtgttagccaggatggtctcgatctcctgacctcgtgatccgcccgcctgggcctcccaaagtgctgggattacaggcatgagccattgtgcccggccaggtccaggtctttctgattccttccatgtcacagcacttcataaaggcccctcctccccatcacactactgggattatttactcattatttactagacctacattctaggctctcggctcctgaaaggccgggctcttttcattcattttgttgggtcagtgccctaaccagactttagctctaggtgggtctcagggaagccctcctcaatagcaggtcctcctgctgagagctctcatagctcctcctgcattctttcttcagaacactcatcccatttcttagttacatatttgtaatttgactgtttgtattcgtctttagactataagctcctcgaagctggcatcccattttatctactgttttacttctggtgtttaccagtgcctggtacacaggaagtgattaataaatattagtcaatggataattgaagtcatttagatcagaatcccagatctatcccatattagatgtgtgaactgaaacaagattcttaacagcttcagtttctcactcagtaaaatgagactattcatagctacattttttattctgtatttttttattgatatatcatagttgtacaaacatttggagtacatgtgatactttgatacatgtgtgtgatatacaatgatcaaatcagggtaatggggatatccatcatctaaaacatttatcttttctttatgttgggaacattgcaattcttctcttctagttattttgaaatacacaataaattattgttaactacaatttctctaatatactatccaatattagaacttactccttctatcaattgtatttttttacctatcaaccaacttctcttcatttccccccaatcctatctactttaacagtggtttttgaagatttaaatgaagcagactgcatgaaagtacctgcgtcaggattttgcacataaacagttctttggaaatactttggaatcaacgaatgaatgtacgaatttattctaactggcaggaatcttatgcagatttctagctgttaaagtttttgtttttttccatctctacctcagaggaaatttaagtcctcattaattcctaaggacagggtcaatgttttgcaattctctatgtccctgcagcctgtttaattggatggttaccaagaatcatgtgactttttgacccgggtgatgattaattggttcaaaattgccgggaactattcagtgccaggcagacatgcaggatttgcagaggataagacttgcttctgcccctgagaatctgacagtcttgatacagatctttatgcatgcaattttggtacattaagctaagag

SEQ ID NO: 33896 - DNA, 2829 bp, Homo sapiens
agggggctgggagagccaatatgagcctgtgttttttttttattcgtctgtctgtttatgtgtgtctgtggttctgagtacgattgggtctgcccatgcacctcatggtctatctgggctgtggccttctcctttgtcctgtgtacctctgtccagatctctgaaggtgtgcaggcaggcctatccgaccctaagtgcttgtgtctttgtgttgagttcatgacactgtataggttttctgtctgtgctggcttccattgtcttccttttctggaaagcattcaattagtaagcaatggaggaggaaaccagacttccatttgacatgtgatttttgtctagacaagtctgcctgttgtgacaggatctaccctcaacagacccaggtaaaagttctcggctgtcatgcctgttgcctaaggctctgcagttatggaaccagcattctagggttaatgcactgtacctcagtcagttactacaaagtcagctgtgccatagaatgtctgtgcacaaaggtcatggagctacaaggcctccagcttcaattcacaggtgaggaaactaggcccagaagggaagtgtctggcctgaagccacaagctaattcatcattcaccatttacccaatgctgatgaagcacctattgtgtcagctgctgtactacataccgagaataaataatcagaaggttaagccatggattctgctattaaggcacccacaatctagctgaagagacagacatatgagcaggccatgagtagatgaggcctaaagccatggtaggaagaaagtgcaaaaggccatgggggactggaaggaagtgagacaatactgtctccagggactggggaagttgtggaaagctgaacaatgtcccccaaagatgcccgcatcctaagtcccagaagcaatgaatgatgctacatgataaaatgagattaagttaagatcttgagatggagagatcatcctgggttatcaaggtggtcccagcatctgtaaaagagggaggcaaaaggacaaaagtcacagaagaaggtgtgacaatggatgcaaaggccagagaaagtatatgtgtgtgtgagagagagagggagaagtgaagattctatgctgctagctttgaaagtggagaatggggccatgagtcaaggaactcaggtagctccagaaagctagaaaaagcaagaaaacagatctccccttagatcctctagatggaatgtgttccaccttgattttagctcagtgagacccttttccaactcccaacttccagaactgtaagaaaagaaacttgcattcttttaagccactaaatttgtggtaatttgttacagcagccagaggcagctaatacagaaggtttcatcagagatgaggtgacactggaactgtgttccatcaaaggggacaggtatctaatacagaaactcaggtgttggaaaatattgaaatgtttgacatgccgggaggtgaaggggtggagagatgagaggagacctgccaaagcctgggtcttggagtgccagctctgtgtcaggctgtctggggtcaactccagctttgctaccttctctctgagtgcttgggctctcagcaaatgtcagcgaagattacaactcaattaacagggagtccgtaaaggcttggctcaggaggttatctggcagactggaaaatggattctgtgtttcttggcacctcaagtggtggcctttgtgccatacatgctgcttttttatcaatcctcttaacctcaggtgatgtctctgtgtttcaaaaaccattcaatacagccatagttgtgagtaagaagagaactttgctccttcctggcattccctgggacagcggccctgattcgtggggaagagttctgtcatgtggcacaagcagagcagaggtcacagactcctgcttggcacgtgacagctacattgcacaaccctgataaagctgcaaaacccatgaggcagatgcctgtcatcctactcatagttccctctcccaggcacctggtgccttcatcacatggtctctggttccccacacctcctcacagatctacccatctctcctcaatccagggtcctgagctttgcttctgtctccctcacaatcaaacccaggacaacagaatcctgggagcttacggctggaaaagacactaccttctttcctcccagctgaacatttccaaacttttattctcagtagccacagcttccaggcacttccctgtcctggcctctcagatggcttcaatgaaatgaatctctcagtgctgcgattccaagccattctggaccatgaggtcccactgagcacaaggctgggtgtcaggcatttggagaaaaatgataggtaagattgagtccctgttcttgcatgttcacaggtgagtgagtaaaaggcagggaaagagatttatcacccctttccaaaccatctttacattgtaaatcaggctttcaaactcaaagcaataactggatccacccaaagggttaggaaggactccgtgacacaattaaatgatactctttaagcagctaactatggagcttctgtttcgggttaactgcagggccttcagcttcagggaccccttctccttgcagagtgcagagggcatagctttgagtccatgagaatcgtggtgcagctgtctattagctctctgaccctggatgacttaagttacctctctgagctagttacttctgtaaaatggctgtagtacaatggcttaatgtgactaaaagaagacagtgggcagctgggcacagtggctcacacctgtaaacccagcacttttg

SEQ ID NO: 33897 - DNA, 879 bp, Homo sapiens
agatttttagactggacacaatccagatgagacaaaactaagtttactatgaaggcatttttctacctttgaaacaggctgccatgaaaaacacttgctgttggctggtgtgaacacgcaatattctgggtctagaggtcttccttagcaattgctcattcttcagtactggaaagttcaggccctttctccacaaaaagaagactgttggaaccaaaagcaactacgtggtagaaatggagaaaccagtggcagatctagtcctagtacttgggtttcctgaccccaaatcaaggtctttagtccaactcaacaaacaagtatggctctttcctaagtactgagtactgtgttaggtgctggggaaaacaaaggtgagtaaaatactgcagtgattttgagttccctgccttctgaaagtctcagtttccatgacaaagagaaacctgttttactttcaccatgggcgttaaaaagaactttggatgtcctttcttatttgaaagtgcttacagtgaaaacattttatttttaaaataattaacatcagcctccttaaaatccccagctccagctgtttcagccctttctgttggatttttaaagggttgccacattcatctgcaaataaaacaaactgaccagcaactcatggttcatatctttaattgaaagaactccaaacctcttttgtcatcattatatatttcacaaatgaggtgttttatttctagtgaaacacaactaccagagccaacaggactcataatccttccatcccaggtaaagctgagtcacttcccaagacctccttccttttgaatcctctttaaataagggagagtaagtatacatttattgggcacccactatgtgcta

SEQ ID NO: 33898 - DNA, 1026 bp, Homo sapiens
ttatatgtgacagggagccaccaaaagcttttatgtgggggtaagatgtgaccagatttctgtccaaagctcatgcaagtagccatgggcccaccagccacttcccatacgcaatctaatctgcagggaaaagcatgctcatgaagtcctataattccaggaacttcttgggattgggtagacaaatggggctttgacagtggttagcaagacccggaaccctgacatagggaagaaacatcacagtgggaaccctgccatatattctcaaaagatcacatgatgctgtatcggaggcaagtctataataaggttgagaaaaatacatttatttttatttttccagcagttaaaaattcattcgtcagcatgtgcactcccatccaagccatgctacccaggtgtacacaaaacaccccgtctatgtggcagaataaacaacacgtggactggcaggacaccagacaccagggacagccaaagatcgagatagtcaaaaggcaagactggagccagatgcagtgccaaaagcgaagaggtgagcattatgggaggccctgcaagaacaaaatcaccctggtgagcaatccaagggcactccaggtatgccactgagctacatggcccgcgatctagctcaaaggtcacaagctggcagcccatggccaaatctggcctgtagagatgttccgtttggcctacccagggtttaaaatgttttaaattgttaacatttaataacaggcagataacatccagattcccagcttcttaaaccagctctaaagtgtgtggcaatgcaggcagtaataacagcggctgccttcccgcagggagcatatacacattctccaggagccacctactccccactatctccctgacatgaaggctgtctgtgggttgccattctcattgagcttgcactgtcaattttcttatacctggtccactgtagtcatttatgttaattgcctggctttgtaaacatttgactttatccttgctgtagagagtaagagtcct

SEQ ID NO: 33899 - DNA, 804 bp, Homo sapiens
ttcaaaatactacatgaatgcaaaactgaatgtaaaatacctagctgttcttaggttagttacatattctcaattctctcaggttagttaatactttattattgaccgctgcaaactctagcaagtaaagggtttttccatttcatcacactgacttacaggaagcaggccttaagcacccagtgtttagctttataattatacttaataataattcagctatttatagaaaagataaactgtaccagtggctacctcaggattgtggtattataggcaacaaaatttttctttttctttttacttcttgtttatattttataaaatatctttatatactttttttcaatgaaaatttttcagcacctattatgtacaaggagttcaaaatctatttagaagagatttcagagaggaggcaggcaggatttgaagtgactatcaagaggtaagtagcttcttttttggctgagcacggtggctcacgcctgtaatcccagcactctgggaggccaaggcgggtgaatcacctgaggtcaggagttcaagaccagcctgggcaacatggtgaaaccctgcccttactaaaaataaaaaaattagccgggcatggtagcacacgcctgtaatcccagctactcagaaggctgaggcaggagaatcacttgaacctgggaggcggaggttgcagtgagccaagatcgtaccattgtactccagcctaagtgacaaagcaagactccgtttcacaaaaaaaaaaaaaaaaaaaaaaaaaaaaaaaggaagtaaatagcacataccaag

SEQ ID NO: 33900 - DNA, 696 bp, Homo sapiens
ttccaaagtgcaggctccttcactcaaaatgtttcatttccctggctttttaacacctttggagaagactgataagaagaattaacaatacaatctgatattgctgtctctctgcagaaaagatattccatttctgtagaaaattggccaagtattctcctaccatggctcctgaccttttcttctaaggctctacagaactggaactgagattctctctgatatattttcagtaaaagtggatagatggcccaagtgaccagctcaaagcagattctagcagagcattttccctgaaatgttagtaaatgacctctgctactgattagctgaattattaacagtgtgtcaccaacccatcaatgaggattgctatagacattgctgaccaagttctgagaaaaacagaatgaacttcaacctccaccttcatagtgttgttgtgaaatccaagtgagttaataacgtatgaaaagcccctagctcactgcctgccacatattaagtattcagtaaagttcatgcctctctcttccagtgtaaaggtttggagttcacgtctatcctctacggatttacaaagaaacaggaaatactgaaatggacaaaagactttaaacttcaagtcaaatctgaacactttacaaggtgtgataatttcatttttaaattttctgacttgcttgctttcttcat

SEQ ID NO: 33901 - DNA, 1139 bp, Homo sapiens
gacccagtggtcttccttacctcaaaatttagagctgatggtccattctagggtgtccagccttttcagcaacaaaaatccctcatagttaattcttgcccctctatgacacatctagaagacatctgtacttaccaagtaaactatatttcacatcgtttatttttgctaatccaagcacaaaaagtgtctcatctcatcattagcagaaataaacaagaccagagtgaactgacagcagtcattcacatcacaaacacagcatgctgatactttgactagtctaggcagaggctgatgctgtgagttaggcttgacaagttaatcactggtgaaagttcagtatgcctagatatttctgaagtactgaaaatagcagaggatgccccatgattgacctaacagaccttcacaggtccagagaaccactagtccaactcattttggacgacgcttcaggggttgccaatgcgaaagccagcatggagtagtggagaaaagcatgggattcagaaacacgtggagaatataggcagtagggcctagtagttaagaatgacctcaccaggcagacgtctgaccccacctctcaaactcactcactgcaccacctttggtaagttatttttaacctctcttacctccgttctgtaaaatggagacaatagtaacaagtactttataggctcattgggaggattaaataagagaatgtatacacgctgcttaacctggtgagaggtacctagctagcactcaataaatgtcagcaatcgtcattatttagtcaagcttgagtccaaattccagccccgatacatatcagctgtaagaacttgggcaaatcatttaccctctctgagctgcaaaaccaggtttgaaacatttcccttattctgttattaaaaaggttaagtgagatatcatgtgaagcacctaacaataaatggggatcccttttcctcacccttttgtaatatttgaggtttaattttcacatacttacaacttgattttttagtgcatttatagatcaactcattattcaggatttgtatttgtgtcttatattctttaatatttcttggcatccagcacatgagtctaaaagatacatggtaattttagttcctaagatg

SEQ ID NO: 33902 - DNA, 728 bp, Homo sapiens
aggtgtgagccactgcacccagccgcctttagatatttctaaaatggtgcagccactatgaaaaacagtttggcagttcctcaaaaaggtaaatgtggagttaccataggacccagcaatttcactcctaggtagtaggtttctctatgaaatcttccaagataaaaataaaaagaaaaacaaaaagaaaacttcatttgctctcctcgttcaccaaaataaaactcaaattccttagctgcctgccatacccagtcccctttcataatctagctctaacctatctctccagcctcatctccaatgtcctcctttcttcccccgcacagtgcaaacacacaatattgacattccagcctccagctactcactcttcccaaataggtccctgcttccaagtctcagcacctgtgcttcactctgctgcaataccttctcccccttcctggcttgtgagctattatttatcttgcaagacccagctccacaccctcaggcaagcttcatcactcttcactgtgctgctagagtaggccctcccttaaggctccaaagtcatcacttatatagtgtttgtcattaggcaaaagcctgttccactttcaccagcctgggaattccttaaggccatggaaaccctggggcctggcatatagtaggtgctcaagaatcatctgcagaagacaaggcttatacctgaaagacaggtacaaacataggcttaatag

SEQ ID NO: 33903 - DNA, 3309 bp, Homo sapiens
aatgtacaacagagtagcttgggtttttacatccctggctaaactacagctgatggttgtgtctttttgcaaattcctttacatctctttccttttcactttcataagacaccatctcttgggactgccttctaaaatcacaagggtggaaaggaaattgtacaaaggctgtcaagcatgttctagctctgctttcttaatcacaaagtaggaggtaggagggtatcctgcacaggcactctagaaagagcttaccctgccaccaacaaaacacactgagtaaacacagggagttccaggcaagtttacagcaaacagcttccatgtgtttagtgcttccttgtactcccctgggaccagagagggtcttttaaaaattcaacagcttgattacaagactttaagtagtaatctgtcccactgtgcatgataatgagccagctgccttcaggaaggtaggccccccagtgacaattcctttacatagcatcttaatgttgaattaatgttgagagacgtggaaatgggatgtgccacctgaactacagtgacttttcttcctttccacccctccacccttccacagagcacaattataccttcagctgtctcttcttacctgaagggggccgttcttatttttaaactctaagaatcctatctttctttactatggaccatcaagaggacactgcacagtaagagcagtgctacagaaagagtcatgaataccagagaggtataactccagcctaagaagtctctggtctgcaaaatctgcatggacaaatccatttcaaaggggacttaagtctgtgcaggagctgtattttaagggaactgaattgggaacacagatgtttcttcagttagcagagttggcagaacagcttctggaccaaatccgagttcctaatgcgggaaggggccttggagagcatctacttcaacccactcattcaactgctgaggaaactgaggcccatgaggcagttaagtggcacacccagcaagtggcaagagtggcagtgttctgatgacaagtactgtgcgttttccattacaccatgattcgctttaaaaaaaaaaaaatcctaggctgacttcaaccttggaagtcctgttcattcttgtgaagcgctttctccctcccctaccgagttcataaatcctcctcgccctcccactccaattcctttaactcccaccgctcttccagctgtggcttccaacgactttggaaaacagaagtggaccatcgcctcaactttctgggggcgcaattaaatttgtggtccccaaacaagatcgcagctggctttcccagtgcctcaatgtgcccatcagggaaatggggctcatcacccctgctgcaccgagtcagagagtgggcgagctaaaactgatgcccctgaagccgcctaccacctggcacacagtaggcactcaagtgattgctgaagccgtgcccagcaccaagcccggggaaagcacctacaggagaggagcaagtgaaaaggccggctagccagtctggcgagcctgggcagcaaaggcggaagggctggatgtttacatacagccgccgggaaggcagctcggctccaggcaggagcccgactctcggggcgatccatttcactcggatggagggcgaccagctagctatacgctggctctagagcgcggctcaaccaacttcccctacgctaaaaggacgaacccacaccttccgcgggattccgcccgggcttccaacgtggagacgacttttactgagctggtttaacagttgcccacgaacgcttaagcacgcccagacccactcaagtacaggccaagaagtcggtgggatcggggagggcgggggcttcgggcctgggcggcgcaaaggctccccaggaaggctgcgggggccccccggagctgacggcgcggcgcggcgcggcgctgcgcggccccggactgggctgggacgcgcgccgagggacgaggggccgaggggccgagggacagcggggctgggctcacccatgaagaggcagaagaggtcgaggcagatgagcagcacccgcttgctgccgctcctcctcgggttgttgttgagcgccgggctgccgccgttcttgctctccgggacgatcgctttgtcgtacttgtagttttgcatggcgctggctgcggcgcgagcctcccgccccgcgaagacgtcccgcaacagcagccacacacccaggcgcccgggtcgcctcctggccgaggctgctgcggatagtggcgggtcggccccggctccgggcgcggcggctagagtgcagccggggctgcctgcctccaactgcagaaggtggtgttttctgctcctcctgcgcgcctctgctttcctctgtcaaccctaaatcgttctaaagtccaaggggaagagagccagatcccgagcagaaacttttgcagagctgcgcagcttggggcgcgctgttgtggcgcgcgtctgagtgcgcgagcgagcgagtgggcagcgcgggcgctcggccaccttcctccgcagctggttccttaatgaatgggagctgcgctgagcccagcaactccggagcgccagccccaactctaactttgcctcctcctcctcctcctcctccggctcctcctgctcctcctgctgttggtgctgctgccgcggcggctgctgctgtgatcgcctgggtttgttttctgcacttttatttcacgaggtcctttaaaaagagaagacgtggggggagagagagagagggacctccttacttggctcggatgggattccgaaagcacagccccttccttaagctgcctaagacgtaggataattaaggccacattttcccccacccccttcaaaaaaaaaaaaaaaagtcctaaaaggaaaagttactctcaaaccagagaaaccgggagcccctagcgttcagaaacaccaaattgtcaccaaagaaaaaatatatataaataaaaagaaacattttcttgctggccttgggtcaagtaaaagttagggctgtacagctaaaatgcatttttcctcacctacaaacctgaggctttcaggtctttattgtgacttgaattgtattaccctgaaaatataatttttaaggaaaacaagttgtttgtttgtttaagatcttaacatccaacaccgggtactacgctagattttgagaatactaaaatgaaaaagactgcacgactgtggaaccacatctcctggatttcaatcctgtgactctgtgcctcagtttccccgtatgtaactagagataactgttc

SEQ ID NO: 33904 - DNA, 326 bp, Homo sapiens
agagacagaagagaagacatgggcacacaaagaaggccatgtaaagacagaggcagagattggagagatgcagccagaaatgctgatgcaacccccggaagctgaaattggcaaggaatgagccctttccagaagttccctggaggaatgtggccctgctggattttggactgctggcctccagaactgtaagataacatatttctgttgttgtaagttacccaacttgtggtaatttgttacagcagccctagaaactaatactaagaacattaccttcctcagcccggtgaaacttttctatttctttaaattttggaggatgg

SEQ ID NO: 33905 - DNA, 1468 bp, Homo sapiens
ttactcaggccaggcttagaatgtaatcctggaatttgccttttccactaaatccttaatgtaaaactgtctttttaagacgtcttccttctgaaatttgtttccctttgtccctaccccattgtggttaggggtgggggacaaagggaaattttattggttgaagttttgctgtaattttgctatgatttttcagtttcagattactctggttttggctctaagcactcacgttatttaaaagtgctaatttatacatttacttaaatacctactttgttataggcactttactaaatacatattcattaatcaaattattgtaataataaaaacatataattacaaactgagatgcgtggtctgaagctcaggaaaacgcatctgtgagtgcaaaaaggcacctcacctggacttaggaagtgacttttaagctgagatctaaaggatgattagggctcactcaggtcatagtataggattcaggtcagtgaaaacagcttatacaaaggagctgtagcaggaggaggtacagcatgactaacactgaaaaatgtagtatgactcagtgttgtgactcaaaggtgagaccaaacaacagagatggcaagggcctgatttattcaggacctaagagcaatgggaaacctttgaagattctaaattgagaggctactggagatcatatttgtgtttgaagagaatctttatttaatgtctgtctttctggctaaactgtaagctccacgagtagaggcaccaacttttgatctcaccgagtacaatacaagtaggtactcaataaatgttgtgtcaccatttaatagcttagtgcctggcagacagtaagtgcttagtaacgttatgattttcattgctctagactggcctttagtgtaagacagtggctgctaaggatttagaggtttcatgaaataattaattccaagaatatctgttgaagacctgtgatatactcagaaatggcagctaaatttatttattagaatgtcatcacttcttttcttttgtgccccatctaggatgtacagagcacaaaagtgattgaaaattgttactaaatcagaccaacctacagtgaggtgctacagcagatgcacctgccctacagtattcagtttacgtgatcactttggtgcttgtaaagatagcttttataaaactatttcttctagagttctcagtataattacctttccaaagttcatttgaaatagtctcaattcttcttcagtcatattcgtttattttatataaattagaataccttgccatgtttcttcccaaagactaatgattgccattcaaaatatttcttctggccaggcttggtggctcatgcctgtaatcccagcattttgggaggccaaggcgggcagatcacttgaggtcaggagttcgagaccagcctggccaacatggtgaaacccccctctctactaaaaat

SEQ ID NO: 33906 - DNA, 733 bp, Homo sapiens
gtactcagtaaatgtttgctgagtgcagcatgggctagaacaagataagagggggaggcaaggcaggatcatggatcacttcctctgtactaggcaccttgcaaggtgccggggaaactgaaccaggctagctcagtttggaaacatagctggcccatagaggaaaactagttcagtcatcagaaagtcagtgcttggacaggtgcttttcttttgaaagataaaactcacctaggttctggatagggaaaattcttcccaggctgaaagtaaagtggaaaatggttattttcataaatcaacctgaatcaggctctgttgtttggttacagatcattagagactacaccaaaaggtgagggggatgaagcctcagtagagagcaaaggcagacactgaccacagaaagttccaggaactgttgcagtggggctgaagatcaatcagaaatgaaaacaagcatttctgaagttataggtcatgcccaaaggaatgtatgatgtgactcagaaaaattgttgtatgcacacctttcccaaaatgcatcggaaacgtaaataacttctaaatcctatgagaaaatatgaatttgtgggatttaagcaatattttactgggcaaattggtattcacaagtgcacaagtaatgctggaatttctccgttactcgctgatcatgtgccctgtgatcaccgctcaaatcttgcaggatctagatttggctccattaaaa

SEQ ID NO: 33907 - DNA, 2985 bp, Homo sapiens
tgctgggattattgttaagaggaaaaaagaaggttgcagatgtattttaacctccttttttgttacctgagaatgtcttttacctttatccctggtccattaaaactagatctgagatccaccttgatttcatacaatgtggatcaatatacagaacttggattggagggacgaaataactctatgatttaaatctatgcttcaacttctttatttccacatttatgaaaaatgtgtctacaggactatagacactactgggaggcagcacagaatatgagacagacctggaacatggggtcagacagatttgaatttgaatcctagctctcttctacattctagttataaagaactgggtaaataccttaagcctccatttcctgctctataaaacagttataataaaatctactttaaaggcgtattatggatattgaatgaaatatttgccctctgcacataggcattccacaaaagtgtgctggtaatattagtgtattagaggacagaaatattgtattttaaaataagttttgaggtttacatcttgtaaaattttttattagtggcatagcatcaggtttctaacttttcttacttccttacagaaaacctccagttatttatacactacattataaaacgttaatgtttcttagtgatattttcgacattatctatgttcaagaagcaaacacagctccttaaatgcaatataagtgttaaagatgatttacaaaaccagaaaatttctaattttgtttggactcctggaaatcctatcttcaaaaataaatgtttaaacaaatgggatctctctagctaaagcatggacaagtgacctctcatggttgtttccatttgccatgtctacctctggtccacagccctgaaaggtccccgcagaatccctcattgtcctttggagaataattagttaacctctgtattaggctgtacgctctagagaagttgctcatgcacctcattcaaacatctgtccacttggtcaaacagtgagattattaatcacattaatagctaccatttcttgagggcttaccatgtgttagacaccgtgcatagattcattatatgcacctctcattggctgtgtggtcttgagcagtcatttaggttctcagagccttcatttcctcatagagtcactgtgagggtttagtgtgggaataactgaatcacaatgtggaaaatgcctgacaggcgagtttcctttcacaggagaagactcctgtgccacactgcatgatgatgactcaaaaagtttcattggaagaaagttctagaagatctaaagaagagctttcattaagtagaaagattgagacttgaacaacaaaacctgttagccatacttgtatatttattttgttaggttgaaaacacagtttcttccacttaatatttcaatgggccatgcattttggagacaggatgaacaggagtagcttagtcagcatttgctctgtgtaacattctacaggttcctggtgacaagggaatgtgacaccatctgatttctcaattgtccaaagtcccaaactggacaaatttctatttccagtaaacaaattaagaataccctactcatagcccttcaccctaagaaatccttcccttgaatgaaatgattggtgattaaacttttaaaagtgacatccatactaaataaaatggatctcaaaattcatttgtgccaggttcaaaaaaatatatgatgaatttggagtgattttttttcataagctactaaaacttgtttcgtatacatattagataatggttagagatgaacaatcaatgaatcagtagagcagaatgattcagagaaacataggcttcagaaagacagaggtggcagtgaatctcacctctaccagtctgtgaccttgggtgggtggttcgacctaagtctcttcaccctttaatcctctttatatgagaatgaaatgatataatttatgccatgcttagcgtagtgcttggcataaagcgtttgctacttctgcttccactagtactacttccactttcacttttgtactattttcccttttacaattctactacttgtcctttcgaattctaccaccaccttcaccactagttctcctgcttctaccattttacagaacacacacatatgtgtgcatacatatacatctttttatgtaatatatattttcatttgtgtatatatgtttttacataaatatacgtacatgtatacacgcatacacacaatcctaccaccacatgtaccataaccttactgtgatggttaatattgagtgtcgacttgattggattgaaggatgcaaagtattgtgccagggtgtgtctgtgagggtattaccaaaggggattaacatttgagtcaatggactgggagaggaagacccacccttaatctgtgtgggcacaatctaatcagctgctagtgcaactagaataaaataatagactgcctgagtcttctggcctctatctttctcccatgctggatgcttcctgccctcaaacattggactccaagttcttcagcttttggactcttggacttaaaccagtggtttgccagggctctcaggccttcagccacagactgaaggctgcactgtcagccttcaaaaagtagggatacttttgagattttggaatttggactggcttccttgctcctcagcttgcagatggcctattgtgggacttcaccttgtgatcatgtgagtcaatactccttaataatctctcgtttatatatacatctaccctattagtcctgtccttctagagaaccctgactaatccacttaccaattctactatgacttctactacaacaacatacaacaaatagagcttctctcagccctgggcactaggtatttcttttttctattcatgtatatgtaacccagttatttctacaaaggaccacaaaaccatgatcaccaagta

SEQ ID NO: 33908 - DNA, 353 bp, Homo sapiens
tcctaataaaccagtcaaaacttcaacagcatgaaacaaaatgaccacgagccctcattttgatcactagtcaaattttaaaatatctttgtttcaaatttcagagtgtcttctttgaggtgcactaacatctgaccccatttattttacggagagggaagtgaggtcaccctctgaactagtggtaggcttttaaataggagcctggtctcctgactgcctgttctgccacctacagcattcgaccttgatacagacaaacactgctattacaaacaaacaacaaatctctgccatttattaagagcttacaacatcggaattccactttgctgaattagagatatttatct

SEQ ID NO: 33909 - DNA, 586 bp, Homo sapiens
tcatgacttttctggcttatcatctgaatgccactgaagagaaaaagcaaggcttagttccaaaacctttcatattttagctccaccctaggccagcctccctcacacagatccctctgcacagaaaatgaaatcctaaggcaggcgttcaagaacacctgctcaaagcatatccaggctcgatgtgtagagcaagccatgagtctattaagccttgccctcttttgttgtaggtaaagtgttgtttgaatcctcattaaggcagcctggggtgatagttgagaggctgtgctctggatccaggctgaccaggtcaagccctggtgctgctgatccagttgcatcaccctggatgacttcacctgactctccatggtcagagagcgcacaaagcacttactgtacttcatgggtggttgtagctgggagttgtaaaatgagagagaggacataaggtacaactctttatctatggaaagtgctcaataaatagaagttataggtgagatttttttttaaggaggaatatttgaaaacaaaaaagaagagaaaaactcagtaaattcactgctccttgtgaaaaaca

SEQ ID NO: 33910 - DNA, 931 bp, Homo sapiens
ccagcaatctatgttttaaaaagtcctctaggtgattctgatgtacactcaagtttgagaatcatgaagtcagagtaatttaaccatgaagttgcccaaagcagttaaaatgaacaaagactgtgttagctgtctcagtgtacctgccatctgctggtgctgatggccacagtaaaacaaatgttagcacagcagtacattttgtcccaaagtgtatgttcatcttgtgtttcattagagcaaacataagctaaggcatttaaaatgtcaacaagatcagattgtggtgggagtggtgagggatgagaggtgttcctttaaatagaagaagacacaaaatagcacagaaaaatggcttccaaagatgtttcagtttctggaagggatcagagggttgggggttgcaggctttcagttaattaccaaaagcagattatggaggcctgaggggctccccctaaggatttcaggtcaagttcacactgactttctcccttttcactccctccccacttctcctgcacaaatggattgtgttgacaacacaggtttgcaggaaacacaaaggttcagtgactccctgctcagcgactttctgttttcttcctcttggacagattcccagtgatcaaatgcagtgctctcaggggaagtgggctggtctaggagcgataaagggccaattcccacagagacatcgtttcatgggcaagctgccacagcctctagatgagaataagcagtgatggatgtccagcctcatggaaaagcagcagcggcatcgtcacctgggagaggatgtggagacggaggtgactcctggttggccttgtgtagggccctgtgcatttccttaccttccccctgagtcttgggaacagcagctggctgcctctgaaaggcctggaggttcacgatgggaggtcttgaa

SEQ ID NO: 33911 - DNA, 1800 bp, Homo sapiens
gcagcaatttcacataactgaagccccagtgcacagtgtatgaggctggagaagaaaggagaggccaagtcttaatgtcatcgggcttaatcttcacagtgggtgaggaactactgatgggtttcctggtgagcagctaaaggcaatttctaactgattcctctttcatgaccattctaggtaaagcagcatctctccttcactctctacctaccttaccctgggtatacactggctcatccaaccctttcttgtgagccttcccctggcacagagcctgggaagcttggaactaccacgcccaggcactcttttatctggaattttgcccaacagaggtgtccatagcttggtaaatgaggccctgagggtgtggccgctcagggaatagcatgtgctttggggagcagctgtggcagaggttcctgtgctacgtggtgggtagcagcatcgatggattcacataggaactgccccattcccttagctctagcatctaagcttcttgccagttctggaaattcctaaaataatttcttgtaaatccttttccattcatatttacaataacaggtttgagtatctgcaacgacaacaacaaaacacactggccgatacagcctggtttgtttttctttatagcacctatcaaaacccatcagatggtctgtctacctccatcagaatgtaaactctttgaaggtgggtactttgtttgtatttcagtatttgcccactgctgtagtgccagtgcctcaataaaaatgcggtgaaggaatgaatccttaattcactagtctttctgaacccctttaagacagggccagtatcctatttatgttggtatccccagcagtggcagaagtgacccacgaaatccttggtgaatgaatgagtcagtgaatagatatttagaaaagttagctggttcacataatgcaggaaccgtaactcagcagaatcttaattttttcctgtgtcatctttgtgaaagcagattagaatgcccatggaaacaaatgatctaattgctatcatgtcaaaagacagccctaaaaatagccctggaaaatagcctggtacttttgatttgtactgggcaagcctcaaatacccatctgggaagtacaggccaaaacaattcgagagatattgtgggaacaacctaagataaaagacagtggtgtcctctaaacagaaggggtttatctctttgatatggaaattaagcaaggaggaagcagccaacaaaaacaaagacattgctatttcagaagaatggagagaccagagtaaaatagttagaagtctgaatctcagctcttcaagtgtggcattgttatatttagatgaatgtatttcatcactaggaaaaaagactccatcaaacagatgccttttattcaatgtttatgttacaggaatctaaggaataatgataataataataataacaaaaatgggcaaacacatgatattaccatataccaggcactgttctaagcacttcatatacattcactaatttaaacccatgtattctcaggttacagacaaggatagtgaggcatcgagggcctatgtgacttgtccaaggtcacgcagcaaggaagggtcaaagctagcaatcaaactcatacaacctggctttgagtcccatatgctctattctggaatcctctaacccaagaatttgcttggtgggtctagaaacttctttggctaataattttctagaaacaagctaatacctgattacatgagcataaatgctgtaacctcctcttcttgggaagatat

SEQ ID NO: 33912 - DNA, 926 bp, Homo sapiens
gtttctctatcactgtatttaccatcttttattatcaatatctgtttacttttctgtttctcagtagatggtgaactccttcagtggatatcatcatcatcaacagcaacagcagcaagagctaacactcactgagcgcaggtatgcaccgggcatgattctaaatgttctctatatattaaatcatagatgctctaggggagggaccgtcatcaggcaggtagaatcagagaggtcaaataacttgccaaagttcacacagccaaaaagtggtagcactgggattcaaacccagaagctgaaggtttaaagcacacattctatacgagtttctctctctcagaaactctagaatagtggtattgtaaccaagaaatttagcttcaaaatgcattttaaaagtttttcctttcttgctttcagccttgaaacacactttaaaactttctttccctcccttcccacctgacactcccttgcactgccagcttatctaattatgtgcttacttagaaattccaggggctaatcttgaaacaaaccagcccatggcgacccagctgtgaaattccagagattacctccaggcagtttgtcaacaacccagccattgttgagatgatgccagcccttgctccaggtggaccatgactcaagacagtcactggaacaagacagggttgtcacagcaagtaccacagactatgtggctcaaacaagagaaatgtattgccttacacaggcatgagtggcaaagaccaaagtcacccagaggtcttgagactcccaatccaatgctatttcgtccaaaccacaacttggagaaaaggttgttgtaatggaccaaacaaacaaacaaacaaacaaacaaaaacagcagcaacatacacttttggatgatttttttaaaagggtgtggaaggtgg

SEQ ID NO: 33913 - DNA, 3501 bp, Homo sapiens
ttcaaccaagggatgggaacatgggcaccacctcttcatgggaagatgtcagagaatgtgaggccaagttttaaaatcccccatataacacatactaaacatctactacacacccagtgctattctagataatgtagatatattatcaagatgatacctcctgcctgggcctcttccttgaactctaaacccacctatgtagaccccctaaacatattacgtctaaaaccaattcctaatctgctttcaaacctgctctgtgttaagtcatcttggtaaaccttgattccactcttccagatgttccagctttacaagttggagtcatcaacaattttcttttttttttttttgtctaatccattagtaaatcctgctgaccctacctttaatctatttccagcatctgaccacttctagccacttcattgctaagactggtctgagccaccaacctctcttgcttggattactgcaataatctcctacctggtcagccagcttctgcactttctgtccctagtatctattttcaaaacagtagtcagatgatccttttaaaatgtaagctggattgcgtcattgcctggtccacaatgcccaggtggctctccatttcgctcagaggaaatgcttgagtttcaacaatggcctccagggccctatatcatctgaccccactctctgaacactccttcacttcctccagctccagtcattccttgaaacacccacgaccttctgcctcagggcgtttatatctgctgttacttctctgtagaatgttcttctctaagatatccacacagcccattaattcctataccttttccaagtttctgctcaaatgccaccttccattgacacctttcttgaaatggtctcattgaaaatagcagtccctcttcctgcctgaccatccttatacccttccctgctttgtgtatctacattgcagttactgccatttgacccatatatagatttttttgtcttctctcactagaatatgaggtttaggaaggcaggtatcttcaaccgtttggttcactgctgcatctgcagcaccaaagcaggacctgaccacacaaaccatgtcctcaataaatatatattgaataaatgaatattttgttaattttaaaaaatgaaaccaatccttctttcaagatgagaaaccactcttatttctctcttgatttttttctctctctgagcagtgaaagttatataatcatattagcttatcccataaaaatgtgattagctaacaaacatgctcttttgtacatttttgtctaatttgcctaacattcttcctgctgtcctattgtaatccttgctagcgatgcttggcttatagttggcactgacacatgtaagctcatgtcccagctctgctgccagtggtatgatactgagcaagtgataacattgtcagttacctcatctacaataaatggggcaatggcatagaccacactgtattgtcatcagataaactgaaataatggatgccagtgcggatcctggcccatcagagatggggaaaatgtaagtcagtttccttttcttacaagcacgctaaatctattcagcctggcactttcccgtcaaggaggagtttcttaaaaattgctaagtggtatggtcgaggtgggggtggcggggagaactcagaggagggagatgaagtcataccaacatgcccctgctcacccctttccaaaactcagctatttggactggagtgatttgccacagagagaaacatgccctttgccctgagacaaaggggagcttttcctgaccagcaaaagctaaaatggatcctctgccctgatttaaaaccaaacttgtgggtgagaagccacatgattcatgggagaaaatgacttgactccaaatatataataaaaagtatggaagcaacacacacacacacacacacacacacacacacacacacacacacatgcacacgcacatcaaaagaaactgacttactgaagacggaaatagaggagagtggagaattggagaaggaaaaaggaagatgtggtcagtcaggcaagacgtctccaactgtgccaacagcactcagccatccaaggggcagggaatgctggcgtagggcaggatacttttccatacatctctatttatacaagcacctctgatagtctcacaaagtagttattgtaccagtaattctctttcatgagtgagggacccagggctcaggatgacggacacacttgccccaggccacacagttaacaaggagcagaacccggtctagagccacaagccacaaaagagcaatgcacagccggcttcctagcaccaagcactgctctctgaccaggaggcccgctaatcactgcagaggccagatacagtccacaagggcaagtaaacacagagagaagccagcgggcgcttcaacggaggatctgggaataggtcaggagtccagctggctgggtagagctaggccacatgctgtcattcctcagcacctcctgtcccctcacactccaggtggcacaggacatggcacactcctcttccctcccacccgccctgagcaaagccagtgtgagcagaaatgcactggctgacacctgacatgtttattcctgcccaggaggcagcacacacaagcagtttttccccagggctctcaagtgggaggaacttgtcctgcaagaaaagacacacagaaagccagcaacaaaactgagacagccttaccccttccattgctttcctccaaggcagagtcagggaaacaagcccagcctctcagagctgggtcctggggccaacaatccgctttcctctgtctctgctagccagggagcaatcacttcccacaggacacacctgagcccaggctccccacctgccccatctgggccgaggctcctcccttgcctggggctgggccagggccggccgccatcctcccagcttggcttagaccagcacctgcaggggactggggagagtactccacctgcagtcctgccaagcccacctcttctcagcaagcggctcttcccgttgctcccctccggctggtctgacagtcactcactctccagggcatttgtgcccaggcagcaggagctgtgaaggaatggggatggcaggctcctgttagtacagaccatgcaggctggacagtgtgatccccgttagtaacaacctctgccagctccgcccctgcagacggctacttaatttcacaaaccctttctcacggtcagggaaaccaaagcccagcaggacagcatgcctaagcccacagggggatttagtggaggccagaaaaggagttaacataaaggagcaccctgtttttggcctggtgtttattgaggcatttggattcccattttaaaaggtgaagaatggccgggtgcagtggctcacacctgcaatcccagcactttgggaggtcgaggtgtgtggatcacttgaggtcaggagttt

SEQ ID NO: 33914 - DNA, 2108 bp, Homo sapiens
cagtatcttcttaagggaagaagaaacccccagcccccctgacatttgatagaaccacagaggctgttgttacttgagaaaaatgttcaccacataataatgtatatgaggaattgatcatttacttaccctcaaagcagatggactttataagcagaagtgctctgtaatgcaggcatgactgggaagaacaaatcacatttctctgtgtacttaggggagaaagaattaattcaaatgcagggtctgccgcttcaggtccatttacggaagccgcaatcctgcactatgaccaccagggggagcgctaggcccatccctgcacaggtagctatttttagaggttgcttctagcctggaggaagaaacgaaagaaataaaagactatgatactttttttttttaaccggaccaacttataaattatttgtaagtccaataaaaggcaattatcaacatttcctactatttcaggagtaatatattctatgttagaaaaagatgcactttattccatggctatgattcagacaatgggaaattggagacaaccacagcaaaaaaaaaaaaaaaaaaaaaaaaaaaagattgttaccctgtgtaaatctttgtctttaaaacccaaatcagaggatgtgaattctggccctagtgggcatgagatatttgccctgaaggctgtggaatttgatgggctggggaaggcgactggaaggtatgtgtgtgatgcgtgtgcagtaacactgtgtataactctcattctttccacagcacaagggaagtgagtcagagtactcttgtccaaacaactgaatagtgagcaatagcaaattgttttaggaaatatagttttattatttctaactctgtaggcatacaatataataatgaagctcagaagatattctcatatatgtatgtatatatatatacatacacacagacatatatatatacacacagagagagagagagagagagagaatgtgtgtgtgtgtgtgtgtgtgtgtgtgtgtgtgtgtgtgtgtgtgtgtgtttcgctatgttgcccaggctggcctcaaactcctgggctcaagaaaatgtgtcctcctgcctcaacctcccaaagtgctgggattacaggtatgaatcactacttccagccagaagagatcctcttctaataaacaaaattgttgttttcaaagagccctcctattctttccaatcaattgtatgagcatcactctcttgccaagcagcagtgtcgtgtgatgggacaagcatggttccttgactccagaaaaacagagcctgaaccttgcctctgtgagtcagtaaaactgagactttgggcaaataactgaacctcctccatcttcggtttctataatacaatacctatctcccagaatgaacacaaacctggaatgagacagtatacatgagtacctagctcaataaatgttagctttctactttgataaggtctcttgtttccctacagatggcaacaaatacatttgaacagagttgctggattctacattgtcacatattctgagtctgtgggcctggatgaatgaggttttgctttgaagccattgtagggatgaggagtgggtgaaggtggacccgctcgggtgtggaggcaggcttaccgaatcccttagctctaaagaaaaagcatgtttccagggctatgtgttctccagagaactgaggcccttcactgagctgagaaggcctttttctcaagcacagggaacaaagcagcaggcagtgggaatgtgaacctgtaaaccaaggctcccatcagctgctgtgactacttggagaccttttcctgactgtgtgacaagcagaacaataagagctgataaagctcagagcctctgctggggcaaacgactgaatgtttgtgtgccccccagattcataagttgaatcctaacccccgatgtgatgatatttggaggcggggcctttggatggtgctaaggttatgagagtggagcccttacaaatgggattagtgctattataaaaggggccatggcactattcacaatagcaaagacttggaaccaatccaaatgtccatcaatgatagactggattaagaa

SEQ ID NO: 33915 - DNA, 3162 bp, Homo sapiens
ccaatgtctgtatgaaaagtggaaagtccattgaattacacatatatttcaggatttagatgtttggcaacgtacagtagaaccttcatgtaatggttagcatttcctacatttttctgagtgctttatgtctgagttgatataccaatattagccttgtttcagtcttgcaaaatagattgatctgacctcagaagttccaagagacactgaaaaagaccaggaattctagaactgcatcttggtttggtttttgcctccttttgaaaataagacctctttgctaagctggtattagttaaatatcttcctttccttaaccacacggatattgtttttcaaaaggtctaaagggcagtggcctttggtgcctggaacacttttagagtatttaggtaatcaataccctggttactatttaaccatatttgaaagagaatcaagtgagttctgtgcaaatcaatgtgtatctgggtgagtttccaacatcagatagatcttacaggtcccagcctgtagacatcttttactccaatttcctgaatagatagctttattccttcaaggtaatatagtgcggtggcttctggctgagatgtttgctgttgttttcttcatcttgtctttgatgacttgtcagcctggggtaactgcacaggagaaggtgaaccagtaagtgggccatatgtctctgcaaaacttgcacgtaggaatcacctgctggggaactaagacacttttatgtttgcagcagaggctgtgttagaatggaaaataacctcttttcatgttattactactcctgtggaggaggatgggacagtgaaaagaccgtgcacttggagtcaaattggtctatgtgtaaatcacagctctaatgcttagaagctgaataattcagggtaaatcatctcatcggtttgatccttagtttccctagctgtaaaatgagaataataatacctcttctataagagttaatgtagataaaataagatcctgaatataaaatgtactcagcttatagtagacacttaataaatgacagttctcctgagtggtgctgaacagttaacttaacccctactttcttatctgtaaaagagcatcataagagtgctgtctcatagttttgggggaggataaaattagataatgtgttcaaaatcactgtggggaaggcaaaggactatagagatgctgggtcatttgattctaaaaatgactttatcttttgctatgggataatagagggaggtgatgtagtttcatatgtacattgtgttttacccattctattttcttgagatttccaagcttgcttcatgggttttttttttttggtatcttaatattaagtattttgtggagcctaagcagtcctttatttcaccttcgggatagctttaaagcaatccctgtctcccaaacattaaagattttaaatagaattatttaattctaattcttgatagatgatgcaattttgaatcattagtgcttttaaatgctagagcaagtgagaattcctttaagtaacagttcagaagggaggaaagcatttttaaaagcagttaatttgtaacttgtatttaaaggaaatacaattttgaaatcagaaaattcatctgtaataattagaagataaaggcaagagaactgtgtaaaggaaatctccgccgagatattcttaattataaaagcttatcattgtaatcctttttgaaaatgaacaaagagtcttgatgtttgatgaacttatcaaacaagacagaccagtgaaggggcaaatttcaagtcaaggcaaaatggaaccaattaaatactttacaaagtgctgaaggaggaaatcatgaggtctttgtatctaatgccagtgtgtctgacactgactttgaaagtgaaaaactacatggtgaaatgattttattaggttcaaattctggcactgacattcactagctgtctgatctcaggcaagttatttaatttttccaagcttcattttccttacctgtacaatgggaggaaagtaagaacaaaaattaaatgcatgaaagtacttagatcaatacctgttacctattacctagtaatcattcagtgaaagctgtcaccagtgctgctgtgtgattgttattgttattttttggtatttccattcccttgatggttgacaataatcagacaaaacaaatttataatatgccaattggcatggatctttctgatcagtcagagattttaaactttatttttaagtaatagcactctttttccctgcaaaataaaatttcacatgaaccctaacattgaaaacatattatatagttttacattttaatggtacacatttattttataagttcatgtttaacatttgcttattataaaatcttaaaaatttgttgagaaaaacattttaaaacaatggtgatggaaggaagttataatcttcagcctaaaaatcagtggatctctattacatattttatacaaatttattttataagttcatgtttaacagttgcttattataaaatcttaaaaatgtgttatttgagaaaaacattttaaaacaatggtgatggaaggaagttataatcttcagcctcaaaatctgtgggtctctattacatattttatacaaataacacctttcattatgtgtgttgcttagaagtttttaatttcaagtttctaatttgcttagaagttttaattgcagttcttttaatgtattgggatttgttttttactaagagtgtgatcaaccttagtgaatattccatatgctcaaaaaagtgcattattctgttgttcagtgtagttccaagtcaattaagtcaagttggttgttaatgtcactcaagttttcatcttgttctattgattactgagaaaagaatgttgcaatctccaactgtatttgtggatttgcctacttacagttctatcagtttttgctccatgtattttaaagctctgttattaaatacacacacacacacacacacacacacatctagagttattctgactgcttgataatttacccttttattatcatgaaaggcttccattatccctggcaatggtccttgttctgcaacctattatgtttattattaatacatatagttatgcttgctttcttatgat

SEQ ID NO: 33916 - DNA, 1543 bp, Homo sapiens
ctttcatacacatcatcttatccaagccttgtggcaacccttcaagctctattttatggctgtcctcatttcacagatgaggaccaccaggcactgaaaggcaagatgacatgtccaaggtgacacagctggtcagaggcagggcgaggtttgaaaccagctttctaattccaagtgcagtgtttcttgcagtaaacctagatattttatttcatttattttcctttctaagaacatcaaactgttgtgatagctttgaaagtgagtaaattgggttttaaaaataattaagggagtattatttttatatctatttctaaatgtaatgttgagtcagtttgacccattgattgggaattgtaactgggagaattgttaatgtttaaactgaaaagcatgagattgttctgaaacttaagtacaggcacagagccaggaacaagcagagtgtgctggctggtgacactcaaagaggtgaacctcagagacttgcatgtcggaagaagtgtctaagccagggatggcaagtggtcttaatagcaaatgctacctagactgctgagttgaagattggaacacaagatgcgggctcagccagaaagtgctatcatcgattagtgatgtctgccagaggctggggactgagggcaacagggctcttgggctgtgtatttactatacagttattaaaataagacaaaggcagcccagatgattaagccatgtgaggagagtgattggggtgggaaagacatttaatcaaagtcccttaaattaccatcacatttatatatcatggctggttgtttgattataactccctttcaggaagattctgagtagagcatttacccttgttgcacaaagttggaaacaggaaacaatctcaggggaaaaaccgtattcgtaatctaatctccattcatccattcatccactcattcagtaaatgctcactgagcacccgtgatttctgggaacacaggggtgagacacacagagcccttccctggagaaatgtgcagtcagttgggtgccaagaataacataatgtgataaatgtttaaatagaaacaaatacagtagaagcacaaaggagggagccacaactttttctgcccctcccacttgctagaccctaaagacattcaaaactcatcttccaaaattactaggagtagaagtttacctggaagagaagggagttgcatgggaatggttggggcagcaagtaggtaaggatgagtaaaaggagatgaatgtccagattcactcaaaggttggactcggttttggaagggcttgctgctgaggccagggcataaatgagaacaatcttggctggattatgccaggaatagtgatgataacagtggctagagtcagtgttgacctctcagaaaccacagagaggatggcaagctgcaggaatcatgcaaggtgaacactgaaagcaagagagcctctgcgtctggaaaagaaggccagcatttcagtgagcatgcacagacctccagctcattgttcaccattggggtgcact

SEQ ID NO: 33917 - DNA, 755 bp, Homo sapiens
tcaactgatttgcatctctctcttttccactctggagtttaagtcacattggcttttctgagtagaatcttgctgctgaggaaacaagtcctctgcagggtctccctcatctcccattatactcctagctttgtctggctaatccctacttgttctacttgtctctggctccttcttctgacccccacagatgccttccctgaccctgctgccctgtgtcagagtcctcctcgcacactacaataattatctgtttccttgtccatttccccacacttgactctcagctcatagaggtcaagcactctcctgagtcatctttatttctcaactagctctaacacagtaaaacgtcattaggtacttatcaaagttgtctcaaatgttcttaaagtattctgctgtgttcttaaagtctcaggatcatggcattagaggtcaccttaaaagatcgctggtcttttctacccttcaaaccctcctgtaccctcacaggcaaacagccagcctcagcttggtctcctgcaatggtgagagctcactgcctgctgaaacacctcatctctgcttgacttctgactgtgataatgatcgaccttatgctaagcctaaacttgccttcctgtagcttttggcctttgggtcctagttcttgcccttgcaaccacacaaataaaccttattcttcttcctcaagacaactctctggagggtttaatccagttctactggtctctcttaaagataaatctttt

SEQ ID NO: 33918 - DNA, 2123 bp, Homo sapiens
gatgaagaagtttataatgcagtgggtggaatagatattaatcaggttcaagctattcctattgcattaggttacctgtacctcagggccttaagtcaaattgtttcttctctctttctatcctctcttcatttacctggcaaatattcactaacctttgtagacaactcacctttctttctgactgcctcccacaccccctactgtatagctaactagtttctttcactgtgcccacattgagtcctatagtaacatctgttgtacctatagcacctataatatttgattgaacctattcggcatatagcaggcactgagtaaatatttgatgtaagaatgaatgagtgaatgaatgaataaatgaatgaccacccatttcctgttccccttatcctccatgtggtctgggctgtcctctcagtatttctccactccagaggatgggtctatttctgagtcttggtccttcccttctgccttgtcctgctagctaaccaagaagagaagaagaatggtaaacatctaaggaaaacatgtaaactttcttccaaatctcattagtggggtttgtcaaccagtccttgggctttttgggaaatgagttaatgcagtttatcctcttgatggcagaaagggccaggaaggccatggctgtggaagacattatttctcgggtgcgaggtggcagttctggctggagcggtggcttggcacagaacaggagcaccattacataccgttcctgggggaggtcattaaagtataatcctgttgttatcgattttgaggtaagtcttttcgcagttgaagaaactctacgtccatgaggaatgaaagtgaagcagaccagatcatttcatatttcttattatgagcccatcaaagaacaagattaaatgtaatggcacactgaactagtggccttgcttgtgcctgactccagggagtgcatgacttcagacccaggccacgggacagctgggatcagaaactgatgatctagtcagtgcctagttttacactgctcatcccagaagttcctcagcattaggtcacattaggcaaatcatgatttttatttatacataaaacacttcaaaaatcacatgggctaaattagggggtggcaaactttttctgtaaaaggtcagatagtaaatatttcaggctttgtgggacacatacaatctataatacacaaagtagtagtattagttcttcttctttctcttcttcatcaaatctctttaaaaatataaaagtcattcctggctcaaaggccatacaaaaataagctgtgggttggacttggacccaggctgcaatttgctaccatcctccacagttatctcatctctccattagaggaacctctgtcatagatactattccctcccattaaaaagattaggaaacaggctctgaaaaatcaagtgaaaatatttgaggtcatatagctcagaggtggcaatgcttggatttcagacctttggacttcgtatccagttctcacttctctctatcctagcacctccattaaagcagtggctctcagctactaggggcagttttcctccacagaggaaatatggaaatgtctggagatgtttttgatatttttgtcaccacccacagtggggcaaggaggtgttactggcatccaggaggcagaggcctgggatgctgctaaacatccttccatgcacagaacagaccccacagcaaagaaatatctggcctcaagtgtcaatactgccaaaattgagaaaccctgccttaaatgcttaacctcacaaagtgtgaaaaattctattttaaccacaaaggaagtgattgttctagcagttgccaaactatttctgtccatatgtggtgtagtccatttaagagactgcatttcagactttgaagcaaaagatcatcattttctcatccattttctccccacccttgcctatttttctacatatatttaaaatcccagatatggatatagtcctcctcttaaaacatatgcctacagttaaacctagaagtctattctaacaccctggtttctgtgaagaaacaggtcagatggatcaaccttgattttatttcttcttcaataagtaagagac

SEQ ID NO: 33919 - DNA, 2885 bp, Homo sapiens
tggcaaatgatagagtccaactcgagtcatgtttgactgacactaacatcctcagtctcttcacaactcatgttgccccctgagaagttcggactcaatgcattaagccacgggcaggctttatagcagggaagtaacacagctagcactgtgttttaaaaagagaatgctcacagggaaataaagggtgatttgaagaagagagagattacagacaaggggaccaggtaggggttatttggagcctgatgttcagagtggaaacagcatgttattcacttgcatataccccagagttcagcagtgcttatttatagcaagtgcttagagtttgtgaatgtaggagtcctgctatgttacgtttgtgttatgttattttgttatgttgtgttgtgtgatatattattatgcattatcttgtgttgctatattgtatcatttgacctctgagtcttttttctcatctgcaaaacgggaacaagatcactgccaataccttttcaagctctaacgtcccaagatccctcttctccacctctctctcctcttttaactccaccagtccaccctatggagggcttcccctcttcctgtggttcctgggagggagagatctgaggtggggaactggatgcagagccccactggaaagtcaaagagaaattgctcaatggtcctggctttccctggaactaacagtcatctttgagaaggccaacagggcagcctattctacgctgacttcctaacaatgggactgaattctctgaacttccagtaagtggttttctccccttggctggggaccctaccagtcctgatattacctgcctgctgacctcaaccgcaacccctgaccacaggccaaagtctgtttgccacaggtctttctgtacacatttccaggaactcagacaaagctattgccagtgccctcagttgacttctgtttccagggaagtgcgactaccgtaatgtggctcagtcctactgctgacttgctctggcacagtcctactgctgacttgctctgtgaccttggcaaatcacttcccctttgggggcctcaggttcctctccttaaaatgagagatctggagaagtgccttccttttatgaagtattaacatgtataacattataagcatgctgaagataaccacatatgcatgcaatttgaaaaacatgggttttttttttttttttactattatcacatacaactaacaaaaatggtgctttattttttgtcattcttcccttgtacagtagtatctcacattcagtacttctttagatcctcataagaaatctgggaattaagtattattcccattttctagataatgaggatcagacttagacaggggcagttaggccacatagctagaaagtgagtcacatttacttagttttaccatgtgacaggtctttcccctatatcatctcccttaatcctcacaataatcctggagggtgtgatgactgttctccctttacagatgaggaaggaggctccgtgtgtcatgtgccaaagatcacacagtcggaagcagggtagctggggtttgaagccaggttttccggctccagattcaatcctccttgtgcttcatctactacttctcagtcgaggcaattgtttcccccaaggaatatttggcaatgtcaggagacagtcttggttttcacaactggaagggggctgctggcatgtagtgggtagaggccagagactctgctaaacagcctacaatacaaggacagcccactcctgccagtaaagaattatccaacttgatacgcaatagtgccgaagttgaaaaaccctgaactacggtcatgtctggaatgggttgcatcagttgtaaataactcccacccagccacatgtagctgccacagttacaccattagggaaattgctcagcaatgacaacaacactacctgtcaaggattttattaattcctgcattgaaggctgacatttaaaacacacacttttcctgcttcctaaatgtggtggagagggcagatgagttggcacaaataacttctaagcccacttgggattgggagtgcacaggtttcagagttaagtaggtgattcttgtgaggaatgcacacattgctccaggatcactgtgaggattaagggagatgatataggggaaaggcctgtcatatggtaaaagctaagtaaatgtgcctcacgtcctagctgtgtgggctgggacttttaactgcccctctctaaacccgatcttcattattatttcttaataattgtgtgcttctgagccagtcacttaaacactgagcctccctttcttctgctaggagctgaggagtttaatacctatgtcacagaatggctgtgaggatccaaggtggtgggataaattgggtgtctgtgtctgtgcctggcatgtatcaggccttccagaagcttggtggccggttcttgggctctgggaaggtagatagagcccagggaggggccctgtgttctttctgtgcccacagatgcagcctatccacgaggtgctgcggcacacaagcctggggcctctggaggccaagcgccagaacctgcgccgcgccttggaccagtatctgatggaattcaatgcctgccgatgtgggccttgcttcaacaatggggtgcccatcctcgagggcaccagctgcaggtgccagtgccgcctgggtagcttgggtgctgcctgtgagcaaacacagacagaaggtaaggtccgtgcatccccacccagttccagcctgtcccagctcaaaggggccagtgcaaaaaggacttttggggttcccggcccctccttttggagctctcctagccaatacctaggagccacccttgagagtt

SEQ ID NO: 33920 - DNA, 1813 bp, Homo sapiens
gatgcttcaagtcattccagagtcctcaatcttgttaaagtcagaataagaattatgtacctgaaacaactagaggaggttttagggaaattaattgttgagttaatgctaaaatatgtagcacacaaagtaagtgctgaaggaggccaggtgggagagagatttacctttccattactgtgtatattgtggatggcatggggattgccccaggccctgaaggacttttcaactaggcaaactgggaggagatctctcagacagaaattcggcatgagacaaagtctgaaagtgagaaagacatttgggggtgcatgcaggtgcgtatgtgtcaggaaaggggagtgaggaaaataatgcatgtaaataaaataaggcatataaaacacttggcactatgcctgtcatacaggacattattaccctcatgcttatcgtcatcattattaagactattattaattaaagaatgtgatttagaagttaatttctgaactctttagatcttctacctgaaagaagaaaaaaaactctcctattgcttttcatcctgtcattaatttgctttttactttttaacttacattaataattaacctacattcattatttactgagtagtggcagttacatgctagaaagtgaccaagggccaaatatgccaggccacgtgggcactttaaagagaacgtttgatcttgacctaaaaaaacagtggttcttaaacttggttgtatgttacaatcacctgagcagttttcaaaaccctgatgtctacagactgcacccgaaacaaattaaatcttaatcactgggtgtagggaccagacatccatagttttttggggtttttttgtttgtctgtttgttttgagacagagtctccaggctggagtgcaatgacacaatcttggctcactgcaacctctgcctttggggttcaagtgattctcctgactcagcctcctcagtagctgggactataggtgcacgccaccatgcccagctaatttttgtatttttagtagagatgaggtttcgccatattggtcaggctagtctcgaactcctgacctcaggtgatccacccacctcggcctcccaaagtgctgggattacagacttgagccactgcgcccggcctgacatccttagttttaaaagttcctcaggtgattccaagtgcagccaaggttgaggctcctgagagtggaggaatcattatacctgcatggggaatggggtctgtgacaaaacaaaaaggcagggacagtaaagttatttgtgctattttaactagtcttatgcaagatctcttaaggtttgttttctatgtcctattgtgcagccaagaaactgaatctcagcaaggttgagcctcatgggtcacagagcaggccagggtttgaatgcgtcacatcaaacacacgcttccatttcctccacccaccctttgctcttgtctgctggtggagggatttggagaatagtgtgtggggcacaagggaggggaggaaaccagaggcagggaggctcatcaggaggtaagtgtagtaatctgggcaaaagatgagaactttgagattaagtaattgcctggatcatctgtgagccaaaaccaccagctgagcaatgctgtcttcctgtcttctgagccagagaacccaagccagcatctgtcccactcctctgaggatgctacatccccaaaagctttacaaattaaaatacagtggcagtttcaagcatagcaaccctttattacatcagcagctttccctcttcaagaatgactggctctcacaaagcaaaa

SEQ ID NO: 33921 - DNA, 916 bp, Homo sapiens
atgcagcctggtaaaggagagctgtgaacaatggcaataggtcccaggcagcaggaagcccagggacctgtgggggataaccagctgtgggagcagggcaggcagccaggacatggccagcagaatctcagacacaatgagagttggagcatcaaagaaagcagaaggaggggcacgattgtgcaggggaaatgtgcaaagtaacagagctggaaaaccaggagatagagtgtggggcaatttttgctcagctctttgggtaatggtgctggaatttgtcaggctggagatgactgagtttggaattccagtttggtcactgggcctttcctgaggggagccagttcttggtcccagggagattcccacagacagccccttttctgattaccctggggtactcttgggctttcagcaagcccacagctgttgttataaaggccatggatttgaaactggattcataaagcacatctctgaggctgatgtacccctccacctttatctctgttcagactttatgagccaattgtgcgagaaatctattgtccctgacatgaggaacaaagctctgtgtgacgagcccttggctccctttcatgtccttcccttcagttcttccctcaatcatgctcctccagccatgcaggcccttttgccattcctcatgcacaccaggccctcccctcctcaggacctttgcacctgctgtcctctctgcctgagatgttcaccatctaaatgagctcatccacagctcacttcctcatttcattcaagtctttgctcaagcgtcacctctgcaaagacattctctgtgcaccctatgtaaagaggctcacccttttcattgatttttctcatacagaattaccgttacctgacattatagatttgtttatttgttctttttttc

SEQ ID NO: 33922 - DNA, 1492 bp, Homo sapiens
aaagtgacttgattcaaggcacacagctaggaagtaatggcgttgggtgttacacctgtctgtctattgcaaagccttccaaacctgctcagtttctccactgcagggatgtcagaccaagggcctttctctgccccttctatgtaagcaggcaggtgggtatttgctctacggatgaagctggatctgcctctgctgttgtgggagacatgaggacagaggctgcagctcttggactaagctctgctgctttcaagctgtgtggtcttgggcaaatcactcaggttctccgaggctctgtctcatcacctgtcaaaggcagataatgaatccttcctgttgcaggcattgagaggattaagctggattaggtatgtgaaagttctttgtaacaggtaatgccctcggcaaatattagttattatgctgatacattttttcttaataacccagagcttgggatataaaaaccctccatgtcctttattaagacattccctaggagctaagctattttatgtctttttgttcttgtatgatatagtgggttttgcactgaaatgtctttaaagcagttttaaatggcttaaaaaataaccaacctgtggttcttgttgatgttttgaaaatccctggaaatgatgatagtaatgacatagctaattgtggaatgcttactaggttcagggtgctttcctaaatgcagtaattcacatgtttacaaaaccccaggaggctgacactgccaccatccccatctcacagatgaggaaatggagacacagacaggtacataacttgtataaggccacaaggtagtaagtcacagagccaggcttcaaatgtcagcagtctggcttctaagcactatgctatttggcctctctctatgctgtccttccagttttgcctaagaggttgtgacaacaccccccattatctctataaacagatccctgagtttctgaatacctcactatcggaatctggcctaacatttaagaatggtaactcaaagaggaaaacacaatatagaaagatctgatttcatgccaacattcaataaacagggaatctcaaagacctaacatgcactatggtaatgtgttgccattaggttttttgtggccattctaggtttaaaactaatgtagagatgagaacactgagggtgaagcagaatgtgggaagatgatttttttaagttcctctttcctacctctgccacatagtaggtaggccttttaaaatctcttgagccttggttttctcattaacctgtaaatgtgcttctcaggtttactccaccaataattgcagagtttttgttcccttccttggtaaagcttccttggggattcctggctgtccccaggaggtgtcaacaataccacctccaaacaggtattatcactcccttcatgacatcagctgttttttcttcccttttatttcactttgctcttgcactgctgcccacaaagccagttga

SEQ ID NO: 33923 - DNA, 1458 bp, Homo sapiens
attgtggctggggagaagagcacaagtaggagagtggccagagtgggagggagacatagacaagagcagataacacaggggcctccaggccttaggaaagtgattacaggattttatcctgcggcaatgagaaactgctgcagaggaagaaagtgatcagatttgggtgatttccaaaagttagttgcagtcaagattttagtaaacaaaagaacacaggaggcaagccaggatagcagcccctgctttgcaggatgacattaataaggcatagttattacctttatggcatctatactttggccttggaaatccaaaaaaagaaatgtagataaccattcacctatgccctttgtacttgcaaagggtcattctttctagaaggcagagcctgtcaggacagggacaaggcttgcagagaacactgtgaaaaaaaaaagactaaaaagctccaggctccaaaggcaaagtgggttccaggagtgtgtaagtggtgcaggaaatatatcacccaatctgacttgagaggctttgctgagcccccagccagtgaccctgcagacagggatgataaccagctgagggaacgtctgcggcagactctgagagaggagctctggctgccaggctgactcatgctgagtcttcctagtttatggtgcagatgaagcaattatccagataattggatcaatgctgataccttcagcaataaaacctactttgggaactgaatgatccaccttggctctctccattgatccaattaactgggtgattgtcctgggcttacttccacagcctctttagagtctaagcccatggctggtttggtttcccaaggatctggggaaatagcaaccattctcttttctctggcatatctattgttctcagaagtaggatcctgggtcagccctcctatgaccaaggaggctgaatgacagatattgcggaaattgagtgtgttcactggaagaaccctatacaaggaatactggacagtagcctgagtttgaggtctgcatttactactaggtgaactcaagaagccatttatctgctctgatttcctgtttatctgtctgtttaacagaaagtgtaacaacaacattgccttccctgtagagatatcagaaaacagaacaagatcaaacaccacatatttatgaagaacctattctgtgccagagattggtctacacattgaaaatgcagaattaaatcagccttcacaagttcactgtgtattgaaggtgaaaaataagtggcatgatgtgataaatgtgaggatacaagggtaataaggagctatcgaagctcataaaagattgctttatccaactggaggtagggctgaggaggagtcaaaaagctttctcaaaagaggcagctcctgagtaggagtttcaaattgtgagtaggtgttcaccagtgaaggaagtgggaaatgtcatc

SEQ ID NO: 33924 - DNA, 7177 bp, Homo sapiens
agttatccatgttgattcataaagagatctagttcatttcttttgtctggatgttctatcatatgacacacattgcatttaatttattccttctctttttgagggacatttatattttcccaatgttttgcgattgcaaatagagctacagtaaacgcccttgctcagctccttgaacatgtgccccctctacttaaggactggcaaggaggtgtctttcctggggatgcagaaaatgctgtagccagcattaggacacatttaactgggcccaggtctcccactcttttcctaacaggcgtctctgatcaaaataaagatggatccatccagtacagcaggattgggtcagcagtaaattgcaagccatcagcttatatagatggggtgcgtcaatatattttggctttcggtagaaatgccctgacacaacaactttcttgtcacacacaatttgttaagcagctgcatcccctttgcaaacagcatcctttttctttgctagaaggggcagcttctaggtggcaggttttcaatttctcttctctctgtcgtttgctgtggtagacatgaaatttaaagcaacatctcaaggcaacaaatgtgtggcccagagatggagaaacagcacagaggccaacaagtcagatacacaatgtggaggttggggggtggtggggggtggggaggggacaacgcattagtgagaagcagaaggatgcagagagagtgcagggactctgagacctgaatgaaactggatttgaatccatagttagctgtttgttaagtggatagccttgggacacttatgttttctgtttccctctctgtgaaactgtaaacagtagcacttacctggaatagctgtgaggattatagctaatgtttccaagttgctggcacagagtggcaatacataataggtcttacgacacagtgattgtgatttcatcatctgacttgattacaagagtaagtaagaacaaaaaactcttttggccaatacgaaggtggtctcagcattttctgttccagaaccaaagactattcttctactcgcagatggaattcaaatacctgtcgtgttcaagacagccccatggggattataggtggatgtcagaactatacccagattcaggtaagggtttgaaaacctcaccacacatgcgtgaatcttttcttgtcactgaggatcagtttgttctcttacatagcgagaaggagagattacacccacctcatgatgttgtagtgacaattaaatacaatttctcagactgcactctaatcaacaatttgcccctccactccctacctcagagtgaacttcctaatatatatatttgatcgtgtcactcctttgcttcaactcttcaatggcttcccaatgcattgtggtgaggatatagttcaagttccttagctggtactccagcatcccccaactctgcccatgacatgatgcctgttcactcctactctatctcatccctctcaacttcctgccgggacctgtgttcaaggcccactgaggtgtctggaagcttcaggagcaagccagctctctcacactcacgcaccgttgcctgtgctgctccctctacctggcacacctttcaaccccttagccattcggcaaacacccacgcacctgtagagattcagccctcacactctctgttctagaagcctttccaggccctatgccctgtagagctgatcattccctccttgtttcctggctgccccgtagcatcttttgtaacggtacacatagcatatgctcacatgttggcattctttgtgagaacataggctcatctctgtatcctcagagcccaacagaaagctccacccaggggcacaatgctatagatagggttgctatggttcccttaagtcctccattccggagacattttcttgggtcctgaatgcttctctgtgtacacacagtacacacaaggaaggtcttggcagcttagttattctctgggctaaatggagtttcttgatcatcctaatagctgttacttattgagtggccaatagatagtgaacgaatgctcatcatcctgtggttcctaatggcagctcaacagaactgagaccagaggctgtgtcccatgggtaggaggtactcctcacataaagtgaaaggtttgttcagatctcatttttggactaagtaaaaggaatggaattacagtccctcttcccacaggagtgtttacatggaggccggggacacatgcacacttcaacatctcatggcaggggtttctcatgcacacggagcatccccacattgctacgtcactggctcttctatcactggagcccaagtttgagctcccactaggatattttctttagcttgttttgcaccttgttaatggagactaacaatgatgaaataaatcagccagcatttaactgctgggaaccttgtggggggtgagagagagagagagagagagtgtgtgtgtgtgtgtgtgtgtgtgtaagaagggggtgggaaagaacctgagaatctgaagatttggggttgatgagcaggtagagtaggtcaatctcatttattaaaatcatttcatgaatttgctcttttgtcctctgtatgtaacaaactttctttttcataaagaatcacacggaggctttgttcagaatacagaaaaaatatcctattcttctcagcatgacaaaatacatttaaacctgtcagtttcttacaggaacttttgttgaaatcagctacttggttccacaataatttgaaaagagttgttgatagtatgttatcagatgcatgcaaattgccttaagagacgttcctcattcaataggcatgcaacaaagagatggtcagcatcatgtggctgcaccttccctgtcatattattgatcagggaattattggtaactgtcacttacctggagccaggcaaactgagacagcccagggcagcacagagaagaaatagctccaccggcgccctccaagcccatgtcctggaattcttcattttcccaatgtgacaggagatgccacagaggctgctagacccataacaagcctgtgctgtgagtgccactgtcagcttctgtccccaagagcaaatagctctgcaaagtaaacagaaagccactagtgactggaaacagactttgcacagaccaaaaacttacctgtcactctggaaaccaaccagaataatgaaaaatctgtagcagcatggtgtttattcctctgtaactttagggtaagctgccaagtggacaggctattagtgaggtggcaaggactgtgggatctaggtctagacagcctgggttcaagtacattctctgccactgactaggttggtgcaaaagtaattgcagtttttgtcattgcttttaatggcaaaaaccacaattacttttgcaccaacctaacagctttggactatgggcaagttgctttacttctgtgccttactctccttacttgctaagtggtgagaattaaacacgttaatataaggaaatgtttagaacaggcctatgttcagcgctcagatatgtcagctattattacttagtagaattcagggtttggagtcagacaggccaaggtttgaattccatgtttgcctctttccagttacatgatgttgagcaagtcagtaagaggctgtagggctctagaacccatctacctgacttcaaattgcttctgtatgattcaccagctgtgtggccagagaaaattactaaccctctctgggcctaagttccttcatcaataaaacagggataataataataccaacctcaccgggttgttgtgaagattaaataaattagattattattaattattattgtaattataattaattataattattattattaaataaattagatttatttaatcttcacaacatgttcaaaacatgttgaacattgcctggcacattctatgtgcactctctataagtgagctggtatttttattgactgtctctgattctgtttcttcatatgtaaaattaggaggactatgacaacttaccactcacagttgggagagtcagaccaaatactaaatgtgtaattgttgaacaaataggcattatagaaataactacatgacactttgggaggccgcggcgggcggaccacgaggtcaggaaatcgagaccatcctggctaacatggtgaaaccccgtctctaccaaaaatacaaaaaaaattagccaggcatggtgttgggcgcctgtagtcccagctactcgggaggctgaggcaggagaatggcgtgaacctgggaggcagagcttgcagtgagccgagatcgcgccactgcactccagcctgggtgacagagcgagactccgtctcaaaataaaacaaaacaaaacaaaacaaaaaaaacccaggaaataactacatgaaaataattatctaaatatatatgtgctgttgttgttattgtttgcatcccaaaagatacaaatgactgaggttctcaaacctaccttcctgaaaaccatccctgactccccagaatcaacatattaaagtccaaactgcaccaacctggcatttacaaaaccaacctgcaacgcataaagggctgagtccacgtgttggatggcgtcctgttgcttttgctattgcagatgtgggtgaggaacctcacatgggagaggcagcttgcaaggtatgagggtgggctagtagaaagaacactggatttgctttccttaaacacagttacagagtttctctaagactctgttttctcatctgtgaaatagggataataattcattactacctacttgataagtttgttttgggtttgaacgtacaaaacgggaagcctccccctcctgccacccctgccgagtagctgggttggggttggagaatcaaataaggaagtatagtgaggggatggatgggaaagccacagaagatggtagtcctctcacattaattgtgtccaaaacacagaacacaagttctgctgccagaccacccaggatgcattccagttgtcataagcctaggtgcaagactccatgtcaccgttgtcccaaaggatgaattgacctgaactttgacgcaattgattgtggtggttaatcatttgtaaacaagcagaaacttgtgtttcaagaaagatccatgtcctgtctcctatctgcctgcctttaagagaagccaaacccttagaagacagggctccccttcgacctcctcaacctgatgtactcacggaggagcctgcaggtttagagaggacagttacacgagtgaatcctgtgctctctcacctccaggatttttgcatgccgttccttctgtccagagtatgtgccacttagctaaatacgactcattattcgagttttatattaatgtcacttgctcaagaaagccttcccaatagattcccctggggttcttaacgctccaggcgcccccaggtctcccggagttccaacctcatcgcgccccctggtggtttcccagtgcagctcacctgagatcccgcctggaggacggcagcctcaggctttagtgatagtaatacacatatttttcagggacagttcttaacaatttaacagttttcccatacatcatcttgtttgattttgacaataagccaagaaacataatatcatcttccaagcctctaagatggggcttcacagctgtttccacagctggttagtaggacatctttggcttgatacacttttttttctgactcctaaatgctcctttttctagctctgaagcttccccttgcccttaggatgtgccagcactgctttaagtcttcacagttatcacaccacactgctcttctggtctagctgctcttactcagggctatagatctcatctctgaccatgcgagagctttgaaactgatcatatgtctctaggcctttaaacgatatgaaggaatttgtaactctaggtctgcggatccactaacagtttgttgtttttccaacttttattgactgattttccaggctccacccagttccacagccaatgccacttttcatgtttctgctatggcagcactccactcctggtacctatttttgtattagttagcttttgctgcataacaaataatcccaaaattgtagactaaaacaatcatcatttatcagctcacaattccttgggtcatcaaataggcctaggctaaaatgggtgctggccttgccttggttcagccaactggtaggtcagcaggagcctggttggtccaggatggccttactcacctgcctgatgattcattctgtctgtcagttagcactggctgttggctgaagtgatgaagtaaatgggccacatgactccaaatagactaactcaggcttgatctcagggtgatctaatggtttcaaaaagcagcaagaaaagacaagccccagtgcacaagtgctttccaaacttctgcttgcctgatgtttcttaatgtctccttggctgaagcaatggccaagcccacattcaagagctagagacagagcttatacctgttgatgggaggaagagcagagtcacattgcaaaggggtatgcctacaattttggaaggaattcgtggacattcggcaatttcttacagacatgtgacactttcgggctgaagcacttaagagccagtgtgccctgtccatttctgtcttctgtcctgtggatttggaagcatgtgttgacagaacaatgtcttatggtgaaggaagcctaaacccctgagtcattggatggaggagagcccatgttgacccataaaggacttcatgtgagttagaattcaacttttgttgtgctatgttattgggatttggtggtttattgttgctgcaataatacctaccccattctgaccaatatacttttaatatattcttacattgcataaaaaatttggtgtgtatatacatttttctgggggaaaaatccataactttcctgagattctcaaaaggacttaagatttaaaagaagtaaaacaaaacaaaacatttcctcaagagatacaactttttcagccaacataattatctgtctccttttgaagatcatgtgatatagtgtgaagtatttgaggattcagaaagactgagacatctcat

SEQ ID NO: 33925 - DNA, 968 bp, Homo sapiens
agattgcgatgtggattaaatgagataatgtacctaatgggcctagcacagggcctggttcatagatgcctgatatatattagctccttttcctctggagtgattacgatttaaatgattgtgtagcagctctgtcaagcatcacattatccatggtgggtggagaggtagataagaattattattacttgaattttacagataacttaaggttcaagtaacttactcagtgtccctggttaagtgagaacagagacaaagcttgaatctaaatctgtctctgtctctagtcccatgttttccattcaaaactttaaaaaagaaaaaaaaacaagcttcctgcatatggttgaatcacatctgttgcatctaccacagtaggcacaaaggaatcgcttgcattttaatctccttaacattaaacttgaagaataatgtagacgcatcacaatgtgagcatcccaccttgctgcagtctgcatagctcagaatttatggtccactccattaggagcatacacagagcctgtcagcaatatcggttgaaattgaaagcagcagtctctttatctcctgacctacgttattcctaaaatgattaactcatacttgggggtggtaccctgatatctagtttaacatcttgagttcaaaggtatttggctctggatgctgagtgatcacccagagttttacagaaagaagacgagagcagaattggactgggtacccaaaggcttttacggagttcattaatcctcatttggcctagggagatagtttgttcatcattcattcactacctgcataccaatttattccttggtgcaggatctgtttatttaacatgtaactttcaacttcctcctttgtcagaagcaggggattcaaatgtgactaacccacaaacttgggcaagaccacaagctcacagttgagtaggggaagaaacatgtaaagatgaagat

SEQ ID NO: 33926 - DNA, 756 bp, Homo sapiens
ttaatcagtgcattacctgataggacatttattaaggataaaacatttcttttatcccaatagctgcctcagcagttgttaagatgagtagggggaggggaaagaaagcctttatcatttcctgatctctccagcaaattgccaatttatgcacagaatattacaaatactgctgaattatttcagcctggaattaatttagagaatcttccccttcttttgagtgcccagggatttggcttatctttatttgctgaaggaaccatgccactgaaagcagtcccaggattatttcaagtgaatgaataatgaaattgcccagcttcctaacggtttccaaattctatgactacctcagtacaatctcctgggctgattcatcagctgggcttctctcactgtgggtgaagccaccaggctcggaagcaggagcttctgcattgagtaattaaggccagtgaggacaacccagtgtcaccagggttactgaaggctgctttggaaaatgtagaaaagatatttcatccttcagacagcatcattagggtaacacacacaaaataatcaattaccaaaagcagctatttttaaataatccttcactggtgtgaaatgcctttatcacatcagaaatcattgctcttgctagaggtaagtatacacgaaacaacagggcttcttgtttggtgtatatttcttggctttaaaacaagggcaaattcaggatgatacactaagaattcaaataaatcactg

SEQ ID NO: 33927 - DNA, 801 bp, Homo sapiens
acagtccttgtcaataagactcagctgaacacacaatatagaagggaagaaagggttataaagcggaatcctaatgaacagaagaaaggaataagagcttcatctggagtgaaaacagtacactgagaatcacaaggcttaattccatggaaggagagggattctgaggaggagctctatggcagtgctatctgagctatgtctcagaggagcaggaggactttgacaggccaaaaagagagaggggaacttcttccaggctgagaggagagctgaagcaaatccatgcatgctcaaaggggggcaagcaaggcgatgtgttcaaattgcgcaaggtgtttagaagggacacacaacatttgctgtattgattagtgagacagaactgcagggcccttacagcactgactttgtgtcgtctttccagcttctcaccttcctcatctgtaaacctgagatttttaaaaagcagctacctcataggaatgatctgaatgagaaaacagatataaaggtttgaatacattgcctgatacttagcaattgctgacagatagtagctaccttcatcaccagcatcctcgttattatttcaggtttggggatgcccgctgggaggtgaactaggctgatgatattattcatagatttggggaatttgcgaaatttcctggtcttcacttttacagtgcttgctccaaattaagagatagaaatgatgttttcctttaatataacattatatcttccatatccatggggattagctccaggatctccatagataacaaaatctaaaga

SEQ ID NO: 33928 - DNA, 4148 bp, Homo sapiens
tctagattactcgtaatacctaatgcaaagaaaatgctatgtaatagctattatacttgcattttaaaatttgtattattttttaattgttgtattttttgcctaatattttctatccaatgttggttgaatccatggatgcagaacctcagatatggagggtggctgactttatatccaagaggaatgaaagcagggtctcgaatagatagctgtatactcatttcataccagcatcattcacaatagccaagaggtggaggcagcccaaatgtccactgatggatgaatggataaacaacctcagatggaaaacacacacagttggccctccatagcctcaggattttatccacagttggttgaatacacagatgtgaaacccacagtcacaaagggctgattgtacatttcaatttatacatagtcaaaatccttcaagttcattttcactttacctttttatatctaggaaatgtttccttctcaatcatgtggagacttgtgcatgacaaccttctgcaagtcacagacaagagatgtgaagtgaaggggcttcccatggctttttaacttcttttctaactatacaacatattttatcatcattccctcctcttgctgaggccatctcaacctaaaggcattactattggaacctgtaggaggacatctttcagtgcaagcacaacttagtatttggtaagaggacatatcattcagtggagagaagtttagtccagggttaagaacgtggacaggctctggggttagaaagatctgtgtgtaaatgggtccctttacctgtgtgacctcaagtaagccatgcacctctctgagcctcagttgcctcttacacagaatgagaatacttgtctaaaggctattttcaagcttaaatgagaaaacatggacacaaggacacatgaacaatagatattggttcctccttcacctctgctcttgcctctcctctgcctttgatctatgtgtgttcttttgatggactgcagaaacactcagccttgcaaacatgtgtactctgaccatcctagaaggtgtgttgcaataggagattgctgaaatctcagcacacctgggaacattgtctgctcagcaaacttacacaaataatgaaatcccatcctctgagtcatttactgactatctgcaaagacaaagactctccagctccgtgaaagagcatatacgtaaccagactcacagcatatcaaggactcagagggctaatgtgaagagctttgttcttccaaacataaaaattcaggcccagtcactgccagaggcagcacactgagcttaatgaagcagtgggatgaactaatatggcaaatcttatagctcttactaccaatatggcctacatcacggtaaattacagcaccagacatgattggacacacatcacaaaaggagaagtagctgtctgaattgtaggaattttgaatgccacataataagaatctcaagagccaactcttaggggagatttttttaaattttttttctccttgtgcaaataattctcccccacattatataataattaattcaacaaacatttactgattacctaccttgtgccaagtgtaccaggtgaggaactcatagttaatggcatagcatagaaaaaagaaaaataattatagaaaaaatggggaaagtgtgataattttagtaagtacagggtgctgtgagactccttagaatccaggggactcaggtgagatttttcgtggccgtaagttcattcatttactcccttattcattcaataaatattgctgcatacctacacttttcaacactgtccttagtggcagaactaaagtggctgaaaaaacagacacagtccctgtcctcacagatctcccagcctagtgagtgataaagagaataaaccttatttaaataatggagaaaatgcaaagtggttgagagcacacagcatggtcatgacccacaactggggggcatgtgggtgggttgcagtgggtcaccaaagcatttctggagaaaagtaatctttaacttgagactaaagaatacatggagttagctttgaaacaaatacagaaaaaatgtattcccaggagaagaaaaaacatgtacaaaaccccacgtgtaaaaaatcaacatggtagggtcagggaactgcaattgattcagtgggaccactcggtgacgtatgattggcaagagtggtgaggaatgcgcctggacagataagaaggggtcagaccagacagcacctctctgatgccatgataagcagtgtggactttttcctgagggcaggaggagccactcactgaagggttttatgcaggagtgtgatctgattaaatctccgcattagtgagcagtgctgagaatggcttggagatggacagcagtgaaaacctgaaaaccatttaggagggtgctaggatgatccagatgagagatgaaggtagcctgaactaccttcggggacgggggccagtggggaagaaggaatgaatggatttgaaagatatgtagaagctcacatgaattgataatcagtgattaattaattgaggatgttaggaaactcacaatgttaaccaaaaggtgactgtaatcctagcactttgggaggctgaggcaggccgattagctgaggtcagaagttcaagaccagcctggccaacatggcgaaaccccatctctactaaaaatataaaaaattagctgggtgcagtgacatgcacctgtaatcccagctactcaggaggctaaggcaggagaatcgcttgaacctgggaggcagacattgcagtgagctgagatcacaccactgcactccagcctgggtgacagagcaagccttcttctcaaaaaaaaaaaaaaaaaaaaaaaaaaaaaacaggtgactgagttttgaaggatgaacaggagtcgccaagagcaagtgcatagggtaagagagctatccaaggtgaaatcgcagtctgcacaaaagccacagaggtgagacctgggacctgaagcttagtgtggcttagggtgggagcaagcggagtgacagaaaaggagatgggaaccacatttcaaagggcttgatgtattgtcctgtggtgtatgctgccagggttacagtacaagttcaaggaggaaaagagctatgtaggtgagtttggagaaagcctgacttctagcaagggaaccagttagaacaaggtgctgaactaagtcaccaattaaacctgaaacagtttatcttcagtgaatgaccacatcgagtgaagtgtcctgtaataaattcatgaccgtgtgaccacagagaatacagaagtctcttttcaccacagcacatcatatgatcagtcttaccataaagaagtaaactgcttggccccaaaacattactctctgcctccaaaccctttggcccaagagctctactgatcaagttcagaaaaatttatcttttcttataattaaatccttggttttgaatttctaaagcttacaaatcacagagttcatatagaatgattagctcaccaaaaccctgccaagacagaacagcaccataaatttacatgatgtagctaatcagtttctatgctcccatctccccagaagagtatagcccctataatttttttcacattctccaactctccagcatcaagccacagggcaaacccacagaatacattcagggaagatagtacagacttcagcactgctaagacctagtgtatggcaactcagacagacaagccccatgacctggggcaagtctcttgacctctgcaaacattattttcttatgtattcaatgggatgatgtaagagttaggcttattagggaaaatttgtctaaaatggctcatatgcaggaagcatacatgatggctattagtaaatctttgtagcttgacaacatggtccattttcctttgtacttcttattcattccctcagttattcttggagcaagtatccatttgaagagggacaagtgtctttttcttaccaactaccccatattcctctagagaaaagggtaccttctacctctctatatttcctataccactagagatgtgctgcctctcagacatggtgggagttgggggccacagaggaaagga

SEQ ID NO: 33929 - DNA, 911 bp, Homo sapiens
ctactaagactaaaatggagaatggggttcagtggggcttgcccttaccaatgcataagggtgtgtagaactaaagaccaaggataatgtttgaggaactttgagaaattgtagaactctaagtttcttctgtccctctctctgccacagagacaagttatagtactttgtgcaagtcactccctttctctgggcacggattgcccatctgtaaaatgggagaagaatgagcagacttgatgatctctaagttttcttccttctttaactttctatgataccatatgtggacgcttctgctggtttggctatatccaagaggccagtgttctgaattcctgcctgtgtgactcacttccttttcctttcatcctcataacctcagagggccacatgcagggaggaaaaaggcagaaaagggaagacaaagctggcaagcaagagcaaagatctagagtctagcctggagctcttttttttgggaagttagaggcagaaagaagacagccaggcagtacaggtctagaagcaggtagtctgttcatttgacaaacacatatgaagtacctactgtgttgccacacacacttattaagcatctccttggagcttggtgctgggattcagcattgaaaaaagacagatatgatccatgctgtgggggtctaagtcggggaggtgctgatcaaatttgttattcaaaaagaaaaccagctgccttgcctagaattgattacggttgttattctccctagtttacacacaagaaaattggggtttagaaagattaagagtagtgctccagctagagaaaccctgattgttagccagccccacaacctatgctggctacaatctatgtcctgtctgttacagtgtctctttctattcatgatatttgtgaagtatta

SEQ ID NO: 33930 - DNA, 630 bp, Homo sapiens
actatccctcttaacaaaaagccctatgagtaaatagtagggagggtaagagggtcagaagtgtgggaaagaggaaggtggataggttgtgattctaaataatgtggtcagggtaagtctcactgagaggatgacatttgagaagagatttcaagaagtggggggtgtcttagttcattttgtgctgctataacagaataccacagactgagaaatttataatgaacaggaatttatttggctcatggttctggagcagggaagtccgagaagatgacaccagcttctggcaagagactttgtgctgcgacatcccatggtagaaggctgaagggcaagagagtccatgcataagagagagagagagagagagagagagagagtgtgtgtgtgtgtgtgtgtgtgtttgtgtgtgtgtgtgcttgtctgtgtctgtgtggagggggggaggcgggggagagagagagagagagaaagagaaaaggctgaactgattttttaaatcaggaacccattcacacaataacccattcctgaaagaatagtattaactcatttatgagggcagagcactcatgacctaatcacctcttaacggtccaacctctccacattgttgtattgggtata

SEQ ID NO: 33931 - DNA, 1707 bp, Homo sapiens
tgggaaattgatttcgtcttgtgcactagattataagcttcaggcaggcattggccaaatctgtgttcgttgctcccagcccattacgttacacaaaggagtctctcaatatatctttctctaataaatgaatgaataaataaatttctcagtaaatattagataagagtacctagtaaccacccttgctcacatcagcatttcctaaaatatcttccttccagaagctgttaatattcattttttaaaataagggtttccttggtgaaatgaacaccagaacactgggttagacaaagccagttgatttatttataatgcagggaccttcctatttactgagcaaagtacagtcaaaagggctgggggtggggtggtggacaagtaagtgcatgctgttctccaagaacagtaatttaaccatgaaccttttagcaaagggcatttgagagacttgtgctctgccaaatatcttctgagaaatgctggactagataactaaccatgtgtactctctgctgtcaactccatttcctttgagcctgtaatttttattattgttactaatgccatccatccttgttgttccatgtcagtggataagagagaactaaggataagctctgcccctctccctgtaaactctaactctccaaactctcatactttctccctccaaggcaaactaatgtgtcacaaaaataaattaccatggtgtgctggcttgtttccgaaatactcctgagggatgacaagctgttccagtttattcctccccaaaccctcatatcaccttccattcatgatcctcatggtccctactgaacagtggaaggaaactctttggacatcctattaggatggtgttggtggcaaaattgcttttatcttactagctgagagctgagtgctcagtggccaggtggccagattcctccatggctcagcaacctccctggccattattcacaagtaatgactaatcagtcacctagagcctgtagaggaagaaaaatcaaagaaagggtttgcttgactgtcatgaatgctgaaagaatagtagcaaggggtggcgggaattgcaccggctcctgaggggatgaaataatggcgcatttcaaagtacatttaaagttgttttgaaacacatcagccaatgactgggtacaaagtcatctgtcaacatgaaaaaaaggagagagttgatcaactttcagtctcagaaaggacacaaagataaactttcctgctatgtaccagttttttttcctattgatattcatgtattaatttttattctttaacaaatatttaagaaccaattacatgttgggcaccattctagctacaagagacacagtggtcagcaaaagaaacactgccagccttcccagagcttatagattagtgagggagagggtgaataaccagataaacaaacgctcgtcagtgctatgaaagaaaagaaggaacgatacacagtgctaatggcaaatgtatgacagaacaatgtgagctcggatgaacaatcagggaagactttcttgaggaggtgacatttggactgagatctaaaagatgagcagagagtctcttatttgaacatggtaagataggtattctaatgccgtatatcagaatagttttgcctgtgagtagcattaactcaactaaaaatgacttaaacaaaaaaaaaaaaaaagtctt

SEQ ID NO: 33932 - DNA, 1226 bp, Homo sapiens
gagcaggcaggggtgggagtggaatggaggcatggacaggagggatgtggcaatggaggagtgtgaggactagggaaggctgagtgaggacggcagaaggaagaaaggatcagcggggatttgtatttgccaagcctgtggctggtttttggcatgtgtaacttagggccagaaagcaaggtttgcagaaagatgatgacacaaatctcgaaaatatccattgagtcaccaaatacttatgaagctccagctacatataagctccaccacctccaattaagccttaagtatggctcagaaatacctaaggagcttgctgttaaaatcctagcactcagaccttactatagacaagtcagtatctctggaggtgaagctatgggcattggtattttttaaaaacattccaggtgattttaatatgcatgcagggttgagacccccggaattcattatctcatttaattcttacagcatccctgtaaggttctattattattatctcagaaagactaagaaaccgctcagaaggagcagagccagggtttaaactttagtctatgtgcccgcaaaatccatcctttctgccagtatgcaagcttataacttaaaggagtcttaaagtttgccctgttccatctcctctcattttgcacagtagaaaatcgaggtctcaggattggaagtgaactgtcagaggtcactcataccagtcatgtcagagtccagactccaacctgcctctcctggccctcagcccagaattcattcttcccagccaggctgcattctgttttagtctagaatattgatccaagaagtagcgaggaaaaccacccgagagtcagacagtgctccctccctcccaaggctggaaagacaggcacggtatttcggggaggtagtgagaaaaagagtcccagctggccacctcctcatgtctacacaatagctccagctcagtgacagccaaaccccttattaagcggcctgtgccatctcacctcctgcccttgctgaacttacacagctcatgttgtacagattagggaaaaaaatcccttaaccccgaggcagagcaataacaacatggaagccaacacggaaggcagttcgttgtgttggcttgaaaaataacgaaggtgacatttagggctgctctggcctccctgtcatggagtctcatcattaattaaaccgtctctgttacagacaaacttcctagt

SEQ ID NO: 33933 - DNA, 1823 bp, Homo sapiens
cgttttgaatagaaacagtgcctgatattttgtaatacccggtttatcctgaagaaagggtaaagaatgagggaagaaatctattcatgcattttcaaggagccaatcactagactacagagcacataagaaaaaaaaaaatcagggctgacatattctcttcaaagagctgtggcaggtcaacaaacatagctggcagacttctaggataacaaaattaatgatgtgagaaaattaaacaatttggattgttagcctctacgaacatttcagatccttaattctttaagtaccatctccgaatgagcaagtgcagcactcactggcactcacagctgaagcctggaagacagttttaacaactcttgctgaaaatgactatttcttctctagtttctatggaaacagctgtcagattggcaaaaataggacatgtactttaaaataatcattcaagcaaagtacacacatgatggaaggctttaaaaaagaattggacggcagcagacttggttcttaagcttccaaatgtcagactacaccccttcaccccggctgagaatgacggagatgaacctaaatccttttagcgagggttgcacgaccttgatcaacgcctgaatgccaaataagggattttcatctccctggactacaatttcttgttgaggattgcacggcacaataaaactgttgctccacacacaggcgacatttaaacagtatacagtgagttctgtagacgagtttacgaggaaattgttaaaactccccggaactgcttagacggggaatgttctggtttgccctgccgagtttaggctggaaaacgtgttcagtttctcctgaagagggaaggggtgaaagagacgaatgcccgacgcgccgggaggcggtcccctctggcagaggtgccgggtgaggagcccgaagccccgcgggtgagaaaccctgctctgaaagcggagccgcggataagggcgggctgagggggagggcaggcggcccacgaaagtactgccacggggcagacacacggggtcaccggcgtgccccgggcaaggctaggggagaaccgggctcccccaggacagatcccctccgtctcccgccccggcgccccccgcccctcccctccacgcagccttatcgcccacccacgcctcctcccgtacccccatccccaaggatccccactccttgcccgggcgcccccgcaggcgctctgcgctccgccccctccccactgccgcactctgcctcctcccctgggcacgatcctactcggaaaagctggggaaaagcgtcaccgtgaggactgactcaagcagaagcgaaagcggtgacaccgcagacccgacctatgcgcaggcgcgcacccgcacttcctgcccgccataccggccggggcgcccttcgctccgcccacacccggcagtcaatacagccgcccagagtcgttctcccagctgccccgggccccgcggagactgtggcgctctagcgcctccgtgtggcttaaggcgggacatggccctgggctgggctgcttgcctaggaacaactttctcccgtctttggtgagttgggtcctctaaagaatgatccacgcaaggctgtgtccgttgtagtctctacggcagtaccggccaaaagggaagagactcgaagactgccaaaagacgaaggcttcctggttctgaatctgcattcatagaaatagtctttggagtatgggaacagtgctttcatatgatttttggagggacgcattttaagaaagatgaagtataatcttaagtgtctggaggttaaagtagctg

SEQ ID NO: 33934 - DNA, 852 bp, Homo sapiens
aggaaacaggggaggtaagtgacttcctgacccaaaggaataagatttgacctcaggtttgtcaacatttgggttacttccagtaagtcaatggctcaaagaagattatatgtgtgaaaacgctttgcaaattataaatgctataaagtgcaagaagtcacagtcctgaattaatgcagaaacctaaatatcatccagaagcaacattctgatggagtaaggggctttttcagggagtctgctttgttcagttgcccactggatcctttattttccaggcagacaagtgagtttttaaaagtgactcttgaaacaatgaggctttctggttccagctgtgctacagaaacattaatcttgagaattcacttgctcttttcatgtgtgaaatgcggggttaggtcacaggtgatcaccaaggtcacttccgtcaaagcacttcagtgactcagaagtggaaagcacccagtgagacctagagtggggagtctcactctcattgttagagagccagttctaacttcaggtacttgggccacccttcctactgtaggagagcctgctcacatccaccctctccccttggtaagtcttatttgaccctggaaggaagtttggagcctggaggagtttctcccttgatgagtggcagcagactttgagatctctggcaatcccacagtatccactccaccagcgcatagcagccacagccctaagttgagaagccagtagctgagagctatctctccccaattcttactggtgtttcagtcttgggaggtcctcatagactgtagaaacaggatgggaggaggggcatgaaatggattccaggggaagaaactgcag

SEQ ID NO: 33935 - DNA, 1996 bp, Homo sapiens
aatgtttgtaataaaaaaattcacatcaattcctcaaagtaagttttggaggaagtatttgggagtaatattttctgtttttgcttcctctttttctccatttctgttatttttattaatataagctgtcatttattgatcatcatattataaattccttgtaattcccccagcaagcctacaaaataattactcttgtccccattcacctgatcaggaagctgaggcttagggtcacatagttagaaatgagtccaggaaggatctgagccaagtctcgtgactgggacatttttccattgcacagtttagtctctcgctgatgggtcttgaataaacgagagaggtcaaagatgttctgctggtaaactgggtgtggtctgggtcctggctgcccagggaatgtttgatcttttcacttttctgggaagacaacacgtttctgtttgtgcttgctcatttgggtgggcccaactcagtttctttcaggagaagttgcctgtgatgtgtacagttctgcttggtttttgtggttcatctggatttgaaaagtgactgcagtttcaccttacaagtgtgtgtcatggtttcatttcagaatcctgcccatcatcttcttttcatggtgtccttgttctgaattgcaaaccataaatggcctccttctcattctggtctcttcatctaggggcagtcagcttctcctgtaagggctttacactctggggaaagccagtaaaacactcagtgacttttaatttcactgggcccaacagcttccagacagatttggcaacaaataaagagagattgggaaaccttctccctacattcctgaggcagccacaatgctcgaaccccacactgatgagtcacggtgcttcctttcccagagctggcccggcgatgtgtgatgccctgttaaggggatgtggaggtgtttgctgtttttaaccactttcagctgtccttgagataagggcaggtggtgagaggtcttaagtgggctgctgctactgacaaattcgtctgcctttctggacagtcctgatccaagtgaggctccttagagttatcaaaaggggtcttagaggacatgtattccagtctcccacccaaagagaggtatctcagaatgctaaacaggtgcttgtaggctacctgtgataatgcaacatccttacctccccacaagacaacccattccagtcccaagcagctttactaagaagttcatcataattaaggaaattcagtgcctctgtaattttcacaaactgatctaaatttctactcttggagcaagaaagagtaagtaatgttcccctttcactccttggttcctcaggaatttgaagccagttctcctgtccccagactttcccctttcctgctctctccctgcctcttccattgcctttctctagtggaacgtccctatcccgtcatccttcctcctgtgccaacctcacaccctaggtggtggcaagcaccatctccaccagtggcccagcccagcaaatgacattatgagagataccagcagaggattctagggaagctttgaggaggttttactcctgttgtcttgcctttctactcccctgtctaggaaggcaggagtaaccctaacagccccttacctatctatcaatttcctcttttctaggaacagatggtttctgggcaatacttacaataaatatctacactgtattgagagcctattaccagccagcaactcaacatgtgtttcctctatccctataacatctgaagggagtgggttttgttattctcactttacaaataaggaaacaggcagaagggcgcttgtctaagaatacacaaatagtaaatggaacagctgtaattcacattcttttctaaacatattttagagacaggatctctctctgttgcccaggctagagtgcggtgatgcaatcatagctcactacagcctcaactcctgagctcaagtaatcctcccacc

SEQ ID NO: 33936 - DNA, 1475 bp, Homo sapiens
atctgcctaagcatttttacatgatgttagctcatataatccatatggcatgaataccaagtagatactgccacaattggtgggaaactgaggctcagaggggaagatctttgcccagactcacacagcaagtgagtttcagagcctggattccaacccagatttctctattctaccatctgcattccttccactggaagatggggctaatgttatgcagacatgccaccagagcatctgatgtgacacaggttctcagtgtatgccacattcccttccttttccctccctctatttctgctccatcccagagaaattcagaacctgccaaaaggcaagagaagtccttgagtagaaaaataagactcaacaattattgaactctctgtgatataggctcaaggattatcttattctcacaaatacactgtgaatttaggtgctgttattagctccactttccatctgatgaagtcaaggcttagacagataagaaacttgcccaagatcctacagctagtaagggatggattcaagatcgaaaccctggtgtttttgtctctgaagttcatgctcttaaacagcaaagcctacctcagcccctgaactgggagctcccatgccagctgcatgcctggcagcctgcctgatagagcaggactgggcaggctgattaatgaggggaacgacctggggaaggaatgaggtcacattccaggaggctgaggcaaggctgttcacgaatcacttcaaaatactcactctcttggaaaaatactagcagggttggatactcatgccaaataagaaaactagatatacaaaatggatattaggactgagcatagtattcaaccttccagggccataggcctaaaggggaccaattgctcagccatgggtcatagccttccaaggactcgttcatgtcctgcccccttcccatacctatccctggtctccagaagatcagatggccttccctctgacttccacccctctttgtatgtgacttaagcacataacatgtgcttgaattattaataaattcattggctttaaagatattttttgggcaccgacttgatgtcaggcactgtgctaggagtagtgaatatgacatattagttacccccttggcccttacaatctagtgaggaaggtagacattaaactggagatgaacattttgataggatagggtgctataggaactaacattcttcctttcttctttcccttccccattcctcccttctttcccttccccattcctccctttttctattatctccttccttccagaaatacttattaagaacctactatgtgctagtatcagtcgaggtgctagagaagaaagcagtgaacaacagagatgcttgcccccttggagcttatatcccagtgatgactggggaatttgacttgggataggaacaacttgtgaaggaacttgtgagccatgccagagt

SEQ ID NO: 33937 - DNA, 506 bp, Homo sapiens
ttcagtcaagaattcttcagccataaagcaattggtcactttgctcagagtcttcctcatacactccaaaagctagttgaaaagaaaagttttatatttaaatacagaaaaagtatgagggtttgcattactatcactatttcgtccctttccagacctcacatttcctaatgctcaaatgagaaacactctccttaaaaatggttgaagattaacttgtgtttaatagtcacagagctggaatgtaggaaattgctgctgaggaacactcagcttagtacttttatgattttacataaggagacaaacctgagattgtttatgtgatgctttctacttcggacgtatttgcgacttttctccatttgtagttacacttacaaagcaaaataatcctgagtatacacacacacaaaaatctaggtacataaaaacataggattctgcatttcaaaatgaggatgctagctggagtctatttccttggaaatgtgcacatacttttt

SEQ ID NO: 33938 - DNA, 1564 bp, Homo sapiens
gctccctactcatctgcaaagctttgagggacaatgaccatatgagtttaatcacccctcacgtctttatagggctttagagttcatgatacacttctaaacacactatcttagtgcctcaagcgctgggttagtacttctcccctgttcacagaggccctaatattaggctgaactacatgaagttgccgctttatagaacaaaaatggtctaaatattggcaatttcatatggttcaagctaatacagttctaaggaaattgtacataattataaacaacatagctggctgactttagaactcaggctttctgattcctggctagtctaggactcttcatgactaaaaggagactcatttttgattcagaaagcaaggagtcaaaggaggttctgtgtcaaatcacactgggctgtttgttctgctggaacaggtattttaaaaaatgtgatcccttactggattctcacagtactgtccccgagggtaacaggatggtaaagaatacattcagagggcacctaccgtatgctaaagcatatctcataatcatttcatttgatcctcccaattacatatcatgactcccagtttaaatatgagcagtctgaggctcagacaagttaagtgtcttgcccaaggtcacattgctattaactggtagggcgagcaaatgcagaaggaaaacccagaactgtccaactctaaaacctggcccatttaagtcaacctgcttctcgggaagttttacaactatccccatgtggaagaagggatgaaacgactcgcccaaggtcacacggctagcaagccatagaacaagagtccctgacctcaggtctcgtccgtagccgctcttgttctagttactgtcgatgagatcctgaaaaggagggaacggaagaaggaatctaaatgtaaatcaaacgcaatgtggtaggcgaaatcggtgccctcacagcatccggcaaaaggtgaaagcgacccaggagtacctgagctccaggtaaccgccctgcccgctgggcttgggacaagccggcgggcgaggtgcctcccaggccaacaagagaccctggcccaggggacagtcttctgttcccttttcccttgccggacctgcagctttcccagggcccgctccttcaatccactcccctctccgccccagagagacccggtctctaagcctcaccctggctgtgcccccgccgccgctaccacgtccccttcgatatccacatccgcctcttcagccgccatgatgggacctgaccccgtccgtcctcccgagagatcccgcgagacgaagatggcccgggggcagggcctaacgcgtcacggggcgggattgaagcgtcgtccggcccctcccgtgccgggaggcggggtttccagagcaaaggcgcccccagaggcctggggcttggtcctttctaacttgttgacatgtagagaccttgggaagtggcccacgcctgagctttttttttttgagagggagtttcactcttgttgcccaggcttgggtgcaatggcgcgtatctcagctcactgcaacc

SEQ ID NO: 33939 - DNA, 353 bp, Homo sapiens
cttcactgtttccctcttttccagtcctgctccataagccttgggatcacttcctaaataaatcatgatcttcaagccctatctcaggttctgctttcctggggaagtcccaaattaagacagtagtgtttgacctgggttttgaaaattgagcatgagttttttaagtggagaaatagagatagagaaagaacattccaggcaaagggagaaacatgagcaaaggtcagtgggcatgaacggtacagaatgtgtttagggattagcagtaatatactgtggctgaagcatggggtatacagagagtctgaggaggagattactggtgggaagttttgttggttgagaaacac

SEQ ID NO: 33940 - DNA, 4376 bp, Homo sapiens
tcttagcggacttttaactttccagattcttctaatttttatttttattttgaggcagagtctcactctgctacccagactggactgcagtgcacaatcttggctcactgcaacctctgcctccaaagttcaagtgattctcatgcctcagccttcctagtagctgggattacaggcgtgcaccaacgcttggctaatttctttgtatttttagtagagatggggtttcaccatgttggccaggctggtctcgaactcctgacctcatgtgatccacccaccttggcctcccaaagtgctgggattactggcatgagtcatcacacgtggcctagattcatctaaattttaaaacatgggatgttgcaatcagatagaagagccagatccagtattggcagctgttactggttttgtgacctgaagaagctaatcaatgtttctaagcctcaattcccttctctgtaaaagtgggtgctcacagtgttgttgagaagattaagcagggaagagtgtgtgaaactaccttacacatagcaagggctcaataaatggtagtaactgttctttgttttaaaaaatttttgcttaatccactgcacaataaagtgacccatggaagaccttgggaaatgtttacaggtttcaaatttggtgtttgccaagtattgcaaaacatctacccctcctcactacacacttgtactcctgttaaaatacattactgtgcttgaaggtgtccagtcttctattgtcttgcatagtagcacaggcgagcttggtgaaggtaggtggaatcagggtgtgttttcagcaacaagtgagcagaggagctgagcgggtggttctgagcaaagggcccgagaagtgacagcagagggggagtgatgccgaaacgataatattagagtacacagagtaatgcacagctgccaggtcacacaatttgagaactgcttcagaacagtcaactcttccacgctgttgctaagagacgggggaggtggggaggcattcatcccttgaacaaaagggaggggaaaaacacgaacagacatgaactctaagttttggaaatgatttcatggactcctattttctgaacgttagtgtctttggagacattttcatgtgttgagttcctactgtgtgctatgtgtggctcaaggcactggggagagagcagtggacaaagtccctgttttcatggagcttctattggatttggtcttctcctttgatgttgaggggactgactgaggtcctcagaagggaagaacttgcctaagaactgaaggcaacctattggcaaagctgatatttgaatccaggcctcctaaatccaagatcgagactttttccatatactacattttacaaaagagattcatctgcagcagattttaacgttagctaggacttaagtacctcagctaggtcaaggtccattcactggagatttctgcaaatgagtccaaaaaaatgatgtttttttaatttcaagtgtcccacggagaagtttcatatttattcagagtccttgtcttccattattacacctagttgaatgaaactgtatagtatgaaaggaggtagggagaatcaaaacaggaaaaagatttgggtatctcataactgctgaaaattagcaagacatggaagtcaagagatctgggtgcagaagcagtttctacttcttcctacctgtgaccttacctctttaggcctgttttcccacctataacatgagggattgcattataataatctcagcattcttctccagctctaaatttatgatgagtcacccaacagtgccatgcagtgaaaatagccctaaggccctaagatgtaatttcagagagtgactgtggttcaaagatgaaaaactgagtgttaattgccccttctcctgtgctcccatggtcctagggcagggtgctgctgtagtgcacattctgctgtgcatgctgagaagctggctccgggtctgcaccagcagaaaggtctgtgcttatggagggtgagcactgtgtcctgtgcactgccacgtgactgtttttgtaggcctttcttcccatcagaccatgactactttgatggcagggaccatgtcttatttatccttctgccttagtgcctgccgctgagtagtctgtagatgtttacagagtgaaggaatcaatgaataatgactgagtgagaaaactatactttttcagggtcaataaaggaaatagcacaagagaatctcccctgataaacttgtcaaagtgatcccagaattaaacattcaggctggagaggttattagtgacttgcttaaggccacattgtttaaaagcagcaaagctaggactcctttcctctctccttttctttcttttattcagtaccccaaaagggtgtttggctccagcattgaacacaggtgactttgaataacaatttatcggaacaagatgaattttgaagcaggtaggagggtggcttttgagtctgacagatgtgggttcaaatcctctggggccgctgactatcagtgtgatctatggcaacttaacctcccggaagctcagtttcctcgtgtgaaaagtagaagtgataacatctccaccatctcccttgcaggctgcttctgtggggtcatttgaaggcttatggttaacccagataagaggtaggatgggagtttctaacacaagtctcttactgtcctgcacgatttgttgcttcagagaaatggggtcttctctatcttttttgaaattccattgttggcttagacaatgagtagccttctgtgtatgtgatgtacattctcccccagacctactgttatgtattttccagcctactgaggtagtccaggcccattcactatacacatcagtgtgtgctggcttgtgtttttaccctttctgcagctacagcctgaactaagactgggtccttgcagctctccaacacatgattgctgcctgccagaaccacagacctttctcgggactggcacgaatttcagccaacagagcctgcacagaaacacatggaaaaggcttccggtggagcttactgtgagtcacagacagccatagttgcactggatagagagctggcagatgccatcagcatatgcccttagaaactttggttgttttgtggcctggagaagagcccagaattatggagcctaagaggcagcacctctgctttctgaagaggaagccgtagtgccgtggacttcaccacgtgcacagtggctgcatccagacctgaatgcccctctcattactcaccggaagtgagctttgaacacttcacacaggaagatgactcgctcctccaacaagatgcagaaagtctttccaagcaaatgacttgaagtgtttaaatattctgtttcttagtctgctttttttctgttaaatccttcagcttgaatgagcacctttatctgcaaattgatctggttgtagcatcccttgaccatgtaggtggatttttaatttgtacttaaggccagttacaatatgccatctgcaactctgctccctttatgctcctgtagcactgctatagagaggaagggtttgtcgtagcaatgggaaataaaacaatgagcatacaacttttacaattggaaatgaagaagcataaaaaaaaataacggctgatatttgttatcggtcaggcctgagtatgagaattatgggtctctaacatgcctgaattagcaagaggatgaaattgcaagaaggcaggctggagaacaacctcttgaccccactcagcattttggagcatggcagcttaacagatccaacacagaaaacaagggaatgggttagtctggtgctcattctcaaaggtagatgtgtctgaagtgagaactcttgtttgcattctctggaaccaagtagggatctgtcatcttttgggaagatctgtccttcctcagcaggtgtcccatcagcaaggacaaaatctggaacccagattccagggaaagaaactaagaagagctaggcatggatccaggccattcaacaataggctagggacaacagcaggctctgagctcagggaagggacgcttgggcagaaactagtcttacgggattggggaaggtagcacagtatcacagggagagcatgtctttggacttgaagagacatagattataatcccagttttggtgcttactagctatgtgattgcaggtaggtcagtttccttcatgggactcatctgcaaaataattcttacagaggcatcataatacccaagatcatagtcaaataaacttggaatagaaactctggcccatcatttatgaaccattagttccttaacttttgtcctaaccttcctt

SEQ ID NO: 33941 - DNA, 3557 bp, Homo sapiens
tgggacttgaatgattacattttttccatcaattcaacaaatatttgctagaagccagctagccagaatgctttatagaagatgcactcagaattggctagttatgagggagctgtttgtcaactgctaattttctgtggtttgctcttcttccctttccttttacattcacaaattgggaaagttaaacttgtagatcactttggggattgtcaaagggtggcttctggtagatactggtttctccaagccaggcaaacctgcattcactcagcatatattttcaagtctggactatgtaccgtccactatgacaggagtcagaaatacagtgatgagtgctggccctgtcccatgtaatttacagcctttttggagagagaggcagtttcagtgacctcacaaatacatgcaggagtgtaactgtgatgagtactgcaaagggaagagggcccttgttgctaaaggacttataagaggagttggccatgtcagaaggatcagggaaggccttactgaggcatgaggcttcctggtgtgaatagcagttaacaggtggagggagaccaggttccaggtggaggaaataacatgtgtgtgggctcctttccagaagagctggagagaagagagatgaaaggaaggtgatgcaggatgaagctggaggagtaagaaggggtttgatgatatagcaggcccagtcaaagaatcttgtctttatcctaagagtcaagagaagttgctgagaatttttaagcaggaaagggtgatgatcatatttatattttggaaagatcctccaacctgctctctgtgttaaaacagttgagttcatatatcttctggctgcaataatgggaatgaacacaaggcaggacagagtacatggggggaggccggttagcaagctagtgttgagttcagaaggaagatgatgttcttttgactaggatgctggtgatggagggcaatgaaaaaatctgagagataaataggagctaaatcaacaatataatgggctgaacatggaggagaaaaaaagaaaagagtcaaacatatcttctaggttcctctctgccatgcataattggatggatggaataccattcactaaaatgaatcaccacttggctttgttctaagactgctgtgtacagttgtgtgagttgtgtactacaccagggcatctggctaattaacaaaggcagaagctgaaagtcagcccattctctgcttgccaagacacatatccccatgtagggtcatgtctacccaggtgggaggggcagcttcttataatttgcaaaaaatagctatccatttggctagataaaaagttataccttttaaccagcattgcaggcatccaagaaggcccacatagggtactacgagtgggagggagcactaaaggtggtaaagccagggccaggatacctggatggtagagacaagggctgaagaaggtgatgagaaaatgagagagtgcaaaaaatatcaagctcagtttatttatcctgcagtggctatctctggcatttcctggactcctgacccacagggagggatcctgcctgtggctcacccttcctgttattttaattcttttgttggatgcctttaatgaatgtagacatggacactcatacatcagagagcagaagtactttaagaaccatctagccctactctttcattacacggatgagaacgctgaggtccagggaaatggaaagctttgctctgtctcctgctgggacaagatccttaatcgcctgattcctcacatcatgctgatctttcctctaacaagaaattgactgagctttcacagacaacgaggcaacacctgaaagagcaaagataccaagtcagattcatctgagtttggatctctgcttgccattctttgttgtgtgatttttgacaagttacttaatctctccaagcttcactttccccacctgtaaaatgaagattaaaaacaccttgaaggtgggctgtgaggattaacgtaaagcctttgggatagggtctgatattcacgagccaccatctagaccacattctctacttatgttgacttctccagcccctgtctcttccctaccctttctctattctcaaagggtttgcagggattctgcagaaaatttattctttggaaattctttgtggaactcaacacaaattcagcatatcaaataaacgaaatattaagaaatgactctaccttttcccctaacctttcacttagggttctgatccctaagatgcaaatggcaattaaccctgcaccccacactagccctctacctctccctatgatgactctgcacagatctcaggaagctttatgtgaaaataacaccttggaactagaagcagaaggaactagagaggtttctgctggaagcataatataaaagccagttttgaagaaggcggggggtggtgggggctcagaaaaatgagcgattaccagaaggaactttttttctcccaacatgatttttgatggctcatagttactttcatttgttccgtgactttgagaggctgacaaatagcagcctcattctgaatgcctattgttactcctgaggttttatgtagagtagaaaagattgttttgaacgtttctcatggacaagtggaagctgtactcttgctacaaatgattcatgtgggagaaatgatatataaacaagattgcctgcttggagagtggatgagagggtgagttatttcagaagggctcttcactttcatgccagcaaatgataaaagctagctctcagaatggcaggggtgctatggaatggaggcttcagaaactttttgactcttacattttatagtcaatgtcaaaaaaatgtattataaatttctgactaagtccagttactttttcatggtgatgtagcaataggttgattcaaccttgggccttgtcctgtcagtgtgttgaggctgaaagagcctgggttctggaagctgagcctctggggtaaggtaggtgcctaaggggcaaaatttcaggaggcacctactctcagggtcatacaggcacagagtcagcacttgcacaatcctgtaagtgagtgcctccttaaattttgccctctgggtcaccctcttttctcacccaaatccgggccctggaattgaattagaatcaagactccatcacttattggtggtgcaactttagggaatcagttaggattagtcttggctataacagaaaaaagccaagtgagagtggcttatttctctattacataaaaatctagagcaatacaggacagggctggcataatgtccccattgcataaagtcatcagatcctagttccttccagtgcacttttctgccattccaagggttttgccttcatgattcaaaatgacacatccacattctaggcagcaggatggaggaaggtgactaaaccatgtgactatattactgatttttaaaatataacaaaattataattataaacatgtagaatagattgtaaaagcccaaacaatacaaaaataaaatatatt

SEQ ID NO: 33942 - DNA, 7379 bp, Homo sapiens
ataaaatgttatcatgctcattagggaattattcattccttttgaagatggagttactaagggaagctttacagagaaggtgtcacttacgccaagacttgaagaatgggtaggatttatcagttgaactagaaggaaaggtattccaggcaaatacatgcaagcagaaacatgaaggggtgaaagagcatgggatttagatccatacaatgatatgtttctgatagtgggcatgtagctggtcagttcatggtttattaacccttttttttgagtcatggaactctgggagggtcgaataaaagcaaaaatttctctcctcagaagagtgtgtacagacacacaaacacaactttctgggcattttcactgagttcatgaaccctctgtcttgatagacagagagggttaaatgtccttgattgaattattttatatatgtaacatatatatatgtgtaaaaaaaattaagaggattaatgacgatgtgtcaccagcttcatcttctccaactattagtgttaccttaattcaaagattaactcattgaaggcccataataagcttaaccattaagtgtttataagcagttaatcttttgtctccaaaatttaccagagatcatgggttaatttcctctaccacaattacttttttctaccccttttggttagaatggttagaatttcaagaatatacatttagaatgttaattgaaacaatcaagcatggggataggcctgagtttcagactttttttttttttaacactgaaatctaaagcaaactggggagtggtgtggcttttctgtgctgtactgttgtctgggcttagtctacctttgcaggtaattaattccccagcctgcttattttttctagttggctcttgtttagcttccacagagccccaccccaaaatgctttattgtccctctgctatttctacatatggtcaaaatcatctcaccttccgggttgctgacatcggcaaattcagtttggcaaactgggctctgctcccagtaaccctttgttcaagaagtgttattacaaaggatccgaagctaacaagcctgtccaatctcttccactcctagatatactcctaaggagaaactctttgtgtatttggatttacagccacaggcaggatattagcactcccagacctactgggtactagaacactgctaatgagcaaacagccctgactcaattagtggtttgtgaaatattcctggatatcaaattgcttttgctgcctgataatcacactggctcttggtatgaaaagcaaccaagcaaaaaattgttcccttgttaagcactgccttgttgatctcctaagttatatctgtaggtagaattcaagtttcccatttccccagagctgaggtttgatttacgcatgtaatcattgagttagtactagttcatgttttctcttgtgaatcttttccatagtattagattactatcttttgagacttattctatatttaaacaaggttgattattttagaaacaaattaagaaataagctacagacagacccaaaatgctaaactgttagtttccataggcataggggtttatttgggggtgaggtagtagagagagagatagagatggagaaagagggaaagaattaatgaaattgggagactgtttcattcagatcacaacttctagtttgactcttcctaaattctttgcttcttaattttcaaatcacttcagattgcagcaatgttaacctcagcaactaaaaataaaaacttcagtatataacttgggaagaaaaaagtagtaaagggaagcaattcaagatctgttattggtatttgaatacatttattgtgacaagaatgctgttataaatattcataagcaaaggccatctttttatctaggaattgtcaaagagaagattccaaattggaaggatacatcttttgtaaaatctgccaccaattcctgctttgagaataagcacctattgtaaaatttctactaacattataaatggtcacagcacatgccacttgatacaatccaaactttgaaatgtttgacttctcagtgggctgtccctctccactgcaaccccccttcctccagcctcctgaaacatcgcactatcctttggtaagcaattccatatagatagctgggggaggaggagtataacctgaccatagcatcaggtacatcaggtacatttatttctaaagtctaatagagaacagtttttactgcttaatagtaagaagcactgagagtgattttaatcgacattcttaactctttcaactccacctagatagctagtatctacagatgatgcagaaaagaggttaggggagtactttccaatagtttattgtattttcttaaatatcctttctggaattttcagaaacaaaacataaaaaaattatatactttattacaaatggtaaactcagagtgctccaaatctcttatttacaaacaacactgggcaggatacccaaacaaacaaacaagaaataacttacaaaggcatgaagctgtttattgacagtaatcagctttcatcaaattaaaaaatatatatatgtacatacacagttaacgaaggcaggccagaaagagttcatctgtaggctcagcctcgctctcacaaacctccctcctgccgcccctccccaaccctccccccgctttgtgttcttaaggagtactacagaagcaatctacagtctctattgcagtttgtaaccccctccccctcccccctttaatactgaatgagatcgaatgttaggtccatgcagttcttggtcaatgttaacgaaaagtccaacgttccgttcgcgcggggacagcccgtccgcaaagcggggcagcccgcaggcggccgctccctggctccacgccaagggagggcgcgccaagtccttcccactcgtgcacactgggggcgccgtcaggacgcaacccagtccaacttggatacccttggctttagttctcggacacttcttttttctctccgtcgcaacttgtcaagttctcaagtctgtctctctgtgttattttttttcttcgttgcccctcagcccccgacggtctctcttcaaaatgtttgcaactgctgcgttagcatgagttggcacccactgttaacgtggttcatgactttctgtttaagctgtgccacctgttccctgagcatgttggccgtggacgccagctccgagttctgagctttcaaggttttcactttttcctccagccgggcgattctctccagcttcctttttcggcacttggaggcagcgatgcggttcctcatgcgcttcctctccgccttgatccgctcctgggactccatgtcgatgggggacaggggcggtgtctcgccgggcatctcgggcactgtctgaggctcctccttcagggcctgcagccgcgggtgctgcacgggcatctgctggggcaggtggtgcggcggctgctgctgctgctggggttgcgcgggaaaggccaggccggccgcgccgtaggagggcgccccgccgccgctgctcagcgcgcctgggttgaagttgctgaggtttgcgtagaccggcggctcgctgtgcaggctggcgctgaagccgccgctgccgctgccccctgccaccgaggctaccgcgggagccaccatgcctgccccgttgaccggctgcgccgccgacgtgacgctgggcagcgtgttctggctgtgcagttcggccagggcgcgcacgaagccctcggcgaagccctcctgctcatctgtcacgttcttggggcacaggaactgggtgggggtcggcgtggtggtgatgtgcccgttgctggactggattatcaggcgctccagctcgggcgacgccagcttgagcagccccacgtcgggcgaggtgaggaggtccgagttcttggcgcggaggtgcggcttcaggctccccactgggtcggccaggttcagggtcatgctctgtttcaggatcttggggttactgtagccataaggtccgctctcggacgggaggaacgaggcgttgagggcatcgtcatagaaggtcgtttccatctttgcagtcatagaacagtccgtcacttcacgtgaggttagtttgggctgcgcgcacaagtttcggggccgcaacagggctgtggcaagcgggggacacccgcgccccccggagcctttgacagggaaagtttctctaagagcgcacgcacccgctggctgtcgtccccgctgcgccctcctcaccagctcgctccagggagcgcagggttaattaagatgcctcccgcactcttacttgtcgactcgcgcgcgctacccggctttgaaaagtcgcggtcactcactgagcgctcttcgtgcgcagcggttcctcggagtccgcaggcgaactcacttcccagagcagcggctctccccgcggagcggatcagtgcggaccctgcagtggccggccggcggcgggtcttggccgcccggactccgacgacttgtcccctcctccgctgctagggggagggggcgcccggcagccgcggctcgcgctcgcccaagttcaacaaccggtgcgagcgaagctgagcgcacgtccttcttctcttgcgtggctctccgccgccttctggtctttaccgccgtggagaagcctaagacgcaggaaaggcttgcaaaagttggctccgggactctgccacttgtctccggtcctcccagccgggaaagttctttgctgctgcagccgctcgccgacttcccccggcgggcgcgtgggtaccgctgctttccgccgctgtcaacagcgcctgggcagcagggctctcctcccgggggcggctggagaccaggctctctggacactcccgaaacaccagcccgggagccacaggcgctagctctgggcagttagagagaaggtgaaaagaaaataagatttgcagttcggactatactgccgacctggctggctggctgtgtctgtctgtctgcctgactccgcgcacctccactcccgcctcgctgcttcagccacactcagtgcaactctgagcccttatccagcccgagctcaacacttatctgctaccagtcaacccctaaaaatagcccatgatgtcaccccaaggccttcccattggctcgcgtcgctctcaggggggcgggcccgcccgtcaccatggagactccaccctagaagattcttctctgggcccgcggaggctcacgggatgaggtaatgctccgctgccctcctacagtcgggcccttctttctcctaccctcccccctgccgcacgcctctcggccctctcttccccggtcccctccccgggccgtttttcccggcccgcccggtgcattgtgggctgacgtcttggggtttgactgtctagtgacggtggctgccgcgagcgggcggacgctcgcaacctctgatggaggggggctcaagttcacggctgcggacggggatgcgggggatgcagggacccgggaggccagggaacctggccagttgttttgggccaggggtgcgggcgaggggtggttgttgtttccccacttgtggggcccgaagtcatccaccggcggccgccaccgcgcggggctggaggctgagaatccaagtacgctgccacccccccgcacttccgggggggcgggaataccgcccttaaggtggctctgtgaagtcccaggtgggggcgagcctaaggggacttaagtttaggggcggtctcccgagagtcggccccccacgttgagaacactccgaagtttgcatctcggtcaagttcaggagcgacggtccgcggggtcgtctggctgctcgtagaagccgagagatttgtattgcccgaaactggacgctcagctgagtctccgttgcaccccacttcatcctccgggaccgtgggggaaagggcgcgggggttcacagctttgcctcggaggggcagtttttatagtgggcgcaattggtgggtaacagggtccagatgggaacaagcgtgtaggcgatccgaaactcggggaaccccggtgttagtctactccccctcccgcccccggacaacacgcacacgcttaacacaacacgcacaacataacgcgcgcgcgcgcgcacacacacactccatccgcgccgagttgcttccgggaaaacaagcccagaaggcggcggacactcgcataaagtcacgcagtagtactcggagcccggggtagaacctggacttcaaatctctgcactcccggccgggtggtgggcgcatatcctgggtagcctctaggaagcgctagacacatgtaagtggttccttttccgcggttattttattctccccccgccccccaccccttagggacgaaagtgtgtggtggaaagaatcccgaagtcgggaatcctggttctttcgtggccaggctaccacagtgtgaagcaagcaaatcacggaactcctccgagcttcatttccctcatctgcaggtggggccggtgccgtccacctcactgggctgccaggagttagtgtgacagggtcgcctgcagcactagggaggtggtggccaaacagcccgcttccctcccctgcctcgcagtttccatcctcgcagagcctggataggatgccaggatataagagtgcgatttggcaggaccaggtgtactttcctgtgagaagcatcgaggggaggaggggagggggaaccgggttagaagtcagatctttcccaagcctctgtctaaaactggggcttgaagttggacctgcagcagtttaagttcctaggttctaaattcagacttcgctgcttctgaacttggaattcagccttgggttcattgcccccagccctaaggtatttgcggctttgagtgttcagaaaccaacagcagctggtatcagtgggaaacctgccaacttttcttcactccgggcactcacctagctttcactgatctgcagagggtaactgaaagcctactgtgagccaggcactgagctggggagggggtggggtaggtaggtatacagtgatgacaagatccagttgcttcctcaaggagagaacattctcctctgtctgttgccctgaatcattttctgttgtattcagggagttggtgttctaaatattttttaataacagtaataaaaatcagtttcatgtattaaacacttattatctgccaggcattctcctaagcaatttaaatacgctgttttctccccacaactgtcttgagagacatatattattatccagatttaacatgtgaggaaataggcccagagaggttaagtatctttgttgaggtcacacaggc

SEQ ID NO: 33943 - DNA, 477 bp, Homo sapiens
tgttcagtcatttaacaaatgtttaatgaggacctaccacatgtcagccacagtgctaggtaatggatagaataacaaacaaaacagacgtagcccctgccctcatggaacttctagtctagtataagactgtttggaagaacttcctcatctcagatagttgaagaagttccagggctccaaggggaatgtcgttagttaaaagaacaatgtcaggaatgtaataggtgctcaaatatttgttaaatgaataaatcaatacaagcacctgaaggaagctcttgcagtaaccctagagttaggagcagttctttggagtccagaaagactgtgggagctctggcaaagggtgtatgtaattgctaaatagtttgtttgttgagacacctgtggatgggaggatctgcccctacctgcctggttctcaaggtggccacttactgggaacaacgatggcttcacttgccaggtcttttc

SEQ ID NO: 33944 - DNA, 2805 bp, Homo sapiens
gccgggaaaagaggcgcctagaccagttagtttcctttgctccaggaccggatgcggagccgggactcaggtggaggcaggagaaatacgcaccctgggtgcacctgtaagtcctccaggactacattggttttggctatgacatgaccaggggctctgggtcggtggtcaccgggcgtggggcttctggctgctaaatcaggagagtgagcgggccgggcggcggcgaatgagttgacgggtggagctggaagaggctttggcgatccagcgggcaagcgaaggacaccgcgggaaggggtggtacccggaaacgcagctgggcagtcgcgccgctcccctgtcctcgccagcgcgctttctcttcctggcccctgcgcctcctccgggccccgcggtggcgtgaaaggcgctcaggacagacttgtatttgaatccaagctgttccacccacacgcttttgttcttgggcgagtgacttctatctgacccagagttttcccagacgaaagtgggaagacggtgcctaccccaaagcgtcgtgggaatgaaagtcaatgaagtgacataggaaaggtgcctagcacatggcaggtgctgagcaaagcggggttccctttccctttgtttagccccaagatctcactcctagccctgaagtcgcgccccaaaggcagccccaggacggcggggtctgggaggcaggaggcctggcctggcaataactcatttgaatcatttgatcctcaaatgggatgggggcgagtgggcggattctgaggctgcctttggaatgcgtttctgtgatcctaggagggaatttcaatgcattcttccattcacgtatttatttattcacagattcctatcaggcgaaggccgcctttcctggcctcccccacaggcccgccagcgattcgtccttacaaggctagcctccacgggctgccctctgtgtaaataaagccacagacttccgcccacaggtcgccgcaggtcccgcccgcagcgccgggccgcgggggaggcgggaactggtgctacggccgctacgcaggcctcgggaggctcggagcccgccacgccccagccctctcgcagggccggggagccacggggccaaaaggaggagcaggtggaagaaatccaggctcagaccgtcggagtccccacccatgagcacccttctccactgatcactcagaacatggtaggccctagagagacagcagcccgaatcttcccagaaaccctgcaggagattccttcttcccattttatagaagggaggctgaggctcggcacgttgaaatggcttgaccaaggtcccacaggcaaaaaaatggtacagcaagatattgtaacccaatatctggctgcaaaacccagtctctccccaacccacctatcgtcaccgagattgtaaaacttctaaccgggaagaatcaaatacatgcacaacgggttacaggttaacagacagatgggagcggaaagggacattccagcgcttccctgggcgtgtcgcacagggcaactccaaccacaggcgaattttcctgggtgacagttaaactcctttttgcatgaaaaaatacagattcttattaaaacaataatcgattagactataaaactctcaaagttatttcggatcaaaattattttcggctgtttccacacctttttttctcgattgtgcagaaattcttcacaccgtctgcacagatgggcaaactgagacccggacgagtcccattgagagagagaggcagagccggggttgggagaagactgagatttctgggatccggcttggggtgtttccgctgggtgggggcgccggtttgcgaagagctttcctcggacagctactgctgatttttgtcgctcagccagccaagtgggggcgattctgagtaatcgcaggcaatcagcgcggctggggttaaaagcgaaagggactcgcgggcgaacggccggggagggcggcgggcacagagcccagacgccggcaaaggcggggcgccgccggggttccctcggtgcgagcgcgcgcggcacttcctgcttttgctcctccctgcggtcctgccggccgttgtaaactggcgctgcgggccacacccgtgttccaggcccgctaacccaccggcggccccagagccccaggcggccccagagacccagcctcaatcctcagtcctcgtacagtcctcaggtccaagttctggccataggaacgccagccagatctgcagctcagctagctgaatttcaggttccagagacctggcccttttcttccatgtaggggacagtcaggttctctggcctgggttttctaaaagtacccagagttgaactaccttccactcagcaatcccattactgggtctgtaccgaaagaaaaataagtggttcttccagaaagacacatgaatccctatgttcatcgaagtgctattcacaatagcaaaaacttggaatcaacccaggtgcttgtcaatggtggattggataaagaaaatatggctcatacacaccacggaacactatgcagtcataaaaagaatgaaatcgtgtcctttgcagcaacatggatgcaggtggaggccattatcctaagtgaactaatcaggaaaagaaaatcaaataccacatatcctcacttataagcaggagctaaacaatgggtacacatggacataaaggtggacatgatagacactgaggactactagagttagtgggagagggagcagagcaagggctggaaaattacctcttgggtgctatgctcac

SEQ ID NO: 33945 - DNA, 3701 bp, Homo sapiens
aagtacgaaccaaagtcatggagcaacttggagtcaggcacactggcctttgaatctcaagaggaatgtaggtgtggacaagttagctctcctctctgagtctcagttaccacatctataaaatggggtaataaatactcatttagctataaggctgctggaaatatcaactgaaatgaagcatataaagtactgatcataacaatttgcacaacagaaattatcaataaacatagctggcattatcccagtgtttgggctgaggagatctgggagggcttcctgaataaggcggattttaagctcagatccgaagaatggataagacatgggaaggacattccagatgaaagtgagttagtatattagcaagggcaaggagaagggaaagtaaagggcaactctgtagaatggcaacacacagactgatctaaaatgaaggattcaagggtgtacagaggaaaaaaacaggaaaagtaggctgaggcttcagcaagaggaccttgagtgctgagccaggggtttagattttattttccaggtagtagggagccagtcaagaatttctgaacataagtacatgatattcataatgtgtggttatggcaaatcacttaacttctttgaaaagaaggttgatagagtggaggctaggagtccaggcagaacaaaagatgattggagtcaatgctgaggacgtgacattggggatggagaaggggcacctctgagtcagagcccaccagtcacagtgacgggataggtgttgctctttagacgctcttgtgggagatgggtgtggatctggtgtgacatccttgtccccgccccatcttcaccccatgaaggatttcccaggtggtgtgctcagctggactgagggatccctgggcacacccacctggcagggcagccctgctccctcctcaggtctgaagttcacctcagcccatgactcagtgtgaaggctgatggctgggttcagtgacccccagggaaagctgagtcatgtccaggaaagcaatgtcatcccacccgaaccagagtggcctgtgttgtgaaatctagcagaaaggtcatcaccacaggttccaagatgcctggcttagccactgattgccaggccactcactgaactctgtattcagtttttcctccatctataggatggtgtatctctctggggtcttgggggataaaattagataataagtcattttatctgtttactcaacagatgttgactgggcaccagttctatgccagtgtgctggggacagaggaatgaataagacataggcttagaagacatccccttcaaggggatgaagttctaatggggaaacagataagtaaatagaagcactagcacagaactaaactttccgacatgtagttgcacactcactaactcacttaagtcatctcacatggggtagtaaccaatttcattcatttgacacacaaggaaactgagggccaaactggcaaagcgatttgcccttcctggtgttccataacccttcagacataatttcatcacagcccttagcgctctttctctgggatagaagttcaaatgtttatttcccccattaaagtttaaattccctgcaggcaggtctagcttcttttaatctgttgaccaccagcatctagcccaagcttggcacacggttatggaaggtgtggtggggggaatggagctagaagttgtggagcatcaaccacatgctgggcttcgctgggcacttcacatttgctgttggttaatctactacaaaaacttggtatggtgggtattattatctctgttttataggaaatatgccagaggctgagatgagtgatgggatttgcccaaggtcacactgagcgtaatctgagaagctcccaactcagaaatggcccagaagctggtgtgtgtgctgcgggtgggggatgaagtgggtgggagctcagccgtccaaatgcagagccagaacgagtctcctgtaaagtgttcagctggtccactggagcatctttacccacagagcctgatcctgtgctcaggcttttattagcatctgtgttctttccgccacagcgcccagctgccccggcagcctcttggtgaacacttgctgaataaatgcttcaccaggagaacaaagacgtgaagaaacaatcacaatatgtgccaaggcacgaggctaagccatttatttatcctttttcttttcattctctcaacatcacgatgaagttaagtaccatgaagaccccagttttacaggaaaaaaaaatggaggtttaaaaatgtagagacttcctacaaagctggaaagtggctttgaagccaggcttatgtggctccaaagcctgaactgcaaaccactacttgaaaatgaatgcgtgtgtggatgaattgcagctcccaaactcttctgaagcctcagtcaaggccacagtggcatttgctccctgggcagggtgttttccagggacttatggatcaggtctgactctttccaaaaggccctctgactgccagccctcccagaggggtcagagagcatttcccagcttcccactgggcctgcctatctttgggagctttgaagtcctacatttagaggacatggatcagccccaaacctaagagctcccccaaggtaactgccaagggaatccctcaggaatcccgcttaatgcaaccaagagaggcctttagaaatcaggccaagtagaggaaagaacaatggacaggaaattgggacatgagagagtcgtgagtcagcagcgtggtgagagctgccaagattgctgatgtgaactctggttgtatcacgaggagcataatgtgttgaataactaaggtgatattgcacttcctctgtggtagagctggagctggaatgtggggtgaaggtctggttccacattttcacgtagtcatagtcaaaccggaacttatccaatagagcagaaccggaacactgaagggaacggtactatcatctttgccaaggcggaaggacttgtatttcttttcctgaagaagaaaagaagcaaacatgttgggaggataggctttgggtatttcagagatttccctatgaacaaggcagtagacttcttctgtctgatcctaaggggaacctaggactcaagtgaggaaataataggaagcaagattcagacgcgaactgaatcaacaatgcctttgttctagtcaaaaagatagccaaagaaggaaatatttttgaagaaagaagaaaaaaagcaaaacactcaatgaacctcctctctcccctctatgtgaccctaagcaagtaacgtaatcttcctgaggctcagttccttatctgaaagtggcaggtggtgttacatgagactaacaatgtgcagactgaacgcagtgtggagagacggctgtgcacatggccctgcgactctggctgctgcaatttaaaccttagcttagggtgaccttggaaatttgtttttactttgcagtgcctcagcttcctcatctgtaaaatggggataatatatgtaaagcaatcaaaagggtacctgtcacacagtgggcactcaactttcttgttagccagcatcatcatcattgccactctttatatatgaaagggactgtcacagtatctaaaatataataggtgttcagagaatgttttccttttcccattctcctttag

SEQ ID NO: 33946 - DNA, 754 bp, Homo sapiens
actagccacatgtgctattgagcacttggaatatgctcagtcataggactgagccatcaacatccctgttttatagctgaggaaactgacgctcagtcagggaggttgttgaggttgcagttagccagccatgtcactgagacttgaagctatcctgtctggcccccaagccatgcccttcaccaccacagaagcctcttgttccactccccaaggagggtctttgcacccttctgaaccagacaggtgattgggtcatgtctgcctgtgcgaaggggtctcccttcctgcttggctccacctggctccaactctagaaagcacctgtgttgttttactgataacagtgtttgcccttccaaagccagagccataaaaggcagctttcaaagtcactgccgcagaaatgtcaacatgagggggaggccagtcatggtttctgaggcccaatgtcacctccaggctgctgcaaaggctgctacaaagaccttcgggtcctggaatctggacttgcttctaccacaaacttgctgcgtttccttgaacatatttcttacttcctctgggccttgtttttatcatcggtgtaaggagagggttgaatttaaagatcttaaagggctcttctatctctaaaatgtttagtgtcctctgcacgggatcctggggtcaacatctaaatctcctatttaatgactgtgaaataccttatgtagcagccttcaaaacaaaatcacccccaaaccttaacctg

SEQ ID NO: 33947 - DNA, 586 bp, Homo sapiens
ctgcagccaggcctggcagtctcccctgctcccttccaccagcttggttcctgtttctgctggtcctgggagcccccagcagatggactgcccttatcagccggctccaggccagaggaggaatcctccggtcacgtgtggctctctggagggagagagacctcataaatacatacagcccacgcagaggaaggggggagggtcaaggggaaagaaaccttgacattctggcgactgggccaggattaaagtccaccaggcatagtccttattggctatttctatgaggaatctcaaatccacatggcttccctggatgacaacgctgactttgactagccctgggatctggggcattcccagtgtgctgctggcttgatccaggcctaatcctttgcccaggactgacctttcacagtttacagagcactttatctcctggctcagtgaagtctcacagaaccctccagagagaagggagtttatcatcaccctcaatttacagatgaggaagctgaggctgcgattgtaactgactgactgctggctacgcagctacaagtgaccgagtccagcctgaaagcca

SEQ ID NO: 33948 - DNA, 1767 bp, Homo sapiens
ttgtctatccgccagaccaccagtgtccagcacagtgcctggcacacagtaggtattcaataattgtttaatgaactctggggctttgattaataatttagttagagagtaaattaattgtgagttaaatctagtttggtcaacaacatactttacactgtgcagtcagtggggcaggagggaatcacagaagggtctttgaagatgaaaagtgcagggactattggcctagatcagtggtttacacatgaagctgtacttttagacgagcttgccttccgggatttcgatccctggtctgaggtgctgtttgagcttcccaggtgattctgaagtcaccagatcggtattgagggatgccaaatttgggggacttcctgttctaacgtatttctttttgtcccccgaactcattcaacttgtgcctgaacggtctcagcaatgggagctcattatttcacaaggcgagctgcccaacccagcgtaaccacaacgacaacaatcacagtgacaccatgtagggaccatacattgagcatttcttaggtgtcaggtaccgtacatacatgctgctcactccaaaggcgaggtgggtagtacttgtctgcatatgacagctaaagaaactgcaactccgacgttggtggcgctgggagtctcagtggcggcggggcggggcagggccgggaccgaggccacgtcccgcccgccgcccggcttcccgcccatgggcctcggcagtgcccgcgggaggagcgggtggagggagccgctcgccacgtcagcgcacgcccgccccggcgctccgcccggccctcctgggcctccccatagaaggttaacccgggccggatcccacgaggactggtgggggccgggcggcccgtgatttcagtttccgaagagtccggccctgcgcaaaggcgggcagggaggaggagttcgggaagccttcccgacagtctgtagatgaaatgaacgcgccccgcctgagcgccactcggggagcgcgccgagccagtgcagcaccgcggcctcccggcccgccaggctgagggtttccgcgggccctgaccctgctggcccccaccgggccagtgaaagcagcaggctttatgcggctgtcgggctcggggcgaggagccggctccaccctcccagtctgggcccatcctccggcctcggccagccccttccctccctctctttggcgttcgcgttccctcggcctagcagacctcttagaatgtttgttttccttctgagaaagagcggagggacgtggccaagaccaacatgaactgcaaacacgggacatcctctgtgtggggggacatttttctgggaccaacagacctgggtctgaatacccatcctgccgcttcctcgctgggtgacctttgtatatctttctccatctctctcagcctcattatcctcatctgtaaaatggggataatgacgccttacctatctttaagatacattctgaggattagattggataaatacggatcatacattttaagcacttagtgctgtcaatggcaattaacattattattcattatattgttattatgaatgactgataatgacactcaagattattaatgctactgtgtcaaaaatatgctcaattaaatttatttttagtgagtgaaatagttttatgaaaggtaaataaagaggaataatactgggtcgggaagtatatacacgttatctcatttaatattcaaacagcttcagaaggtgggtgttatc

SEQ ID NO: 33949 - DNA, 719 bp, Homo sapiens
agggaaagcaatgtcctcaacaaagggaacagcctgtgcaaagtcccgggggtgagagaaagctgagcatgctctagataccacagagattagcacagctgaaaagtcaagtgtgcagggccagtgttgcaagactactctgcagaggcaagctttggtcatttgaccatgaaagattgcataagccataggcaggaattctgcttctctctcatatgtctatgggctccaggtgtctttgaggacagtctggcatggtggctaagagcctacctttgcaggcagcagacctgggtttgacttctccatccactctgagggggctcagcaagctacttacccactctgggccttggtctcatcttttaaataggattaataatagccaccacttcctagggtttgggagaagattgcataacttaatagaatgaacacactcctgggcacataggaaaagcttaattcatgtgactgttacagtgataacaataatatcctgtattattgttaccactgttactgttctcactatttttattattggatctcaataatctctgcctctctagtggtggcacccagaacacctgcccacatcttggtcctggggaaaatgggcaaagtccagcattagagaacaactcctttgccctccacaactctgtgtgggccaaagtatgaaatatctgtggctgggtggaatattctggcagatg

SEQ ID NO: 33950 - DNA, 971 bp, Homo sapiens
ttacaaacatgaattcattcaacctcacattggccctgcaaggtagatattatccagttcatggataaggaaatgaggctcagagaagtggggtagcttgctcattagaaattggcatagaaacatgagctgcatctcacactagaactccgtagaataaaccagctgcccccactttcctccagcagttaggttcatacaagttttacccatgtcagcagcacaacagagttcatttggttttgttttcatgttcctttacttcctctccagtatctctacctttttcatgctgaaagttggccagcagtccagaccatcagatctaatctgctctgggggagtaggggcctggcctggttcacaggcagtccccagactgggtggtgcctcctgaaccctctttattccttctagaaggaatccactgtttactaccttgttcctggacctctagacacatttataaagccacagaacctgggaggggtaaggaggttacatgaagcgtggcagctacagctgacagaaggtttcagaaagtcctgtcgcttcagtttcaagtctgatgaaagaaaaaaaaaaaaaaaaaaaagctaagcaaagcccaacgaggctgcctgccaggagtctgtgaaacatggcccaggccaaagccagtgtcagccaagagggaaattacaggccttaaatggcagacaagtctgcaaaagcctcctagagttgtgtttggcaaatgtttgtttgcatacatgtttgtttgtgtggatgtgtttttcagcatgtatttttttttttagttatgtatttagctctaagatcgtttttaaaaacaatgtcaaaattgtactttaaaataatttattcctggtgaatatttggagcaattccattcagtttagttcaagtcagcaactatttactgacagtctattccatgccaggcactgagattggcactgggcatcctg

SEQ ID NO: 33951 - DNA, 1391 bp, Homo sapiens
ggtaaatgagacatgagacaggagcagaagcaagagataagtagaaacagatcaagcttcttgaggtctcagcccagaactgtcatgctgttgtttccacccccataactttgcccagggcaagtcaatggtcaagcccaatatcactgcacaggaagacacatttgcccactctagggggaggcacagcaaagtcagatggcaaagggtataattctaaaagaaacagaacatgaagaactgaagaaagattctaggatttgaaggtagacttgacttcaaatctgaattatcatttacctgctttggagactagagaaatcgcttaacctttttgcatctgtctcctcatctgttcttacctctctggggtgtaataagactatttcccatcctcacttactgagtgctgacaatgtaccactcactgagcttagcattttatgaacatcatcacacataagacaggtaaggtaggaatccatctcccatttaatagatgaggaaactgagattgatagatgttaagtgacttgcccaaagtcacacagctacattcgaagtttcatgccaggtctgtgtcacctctacttaatgtaaataaggcgtgtacactgtctgccacatagagggtccttgtttcaggtgaatttctgtatctttccctcttagagagtcctggaaacttctaggtcgctggacttttactttctgatgaacttcacccaagctgatgtgaccagctaccatcacccaagtttcaaagttcattgttgcttaaaaaaaataaggctattattagcagcaatcagagggcaatcacatttcccagtcaggagtctttgggaggaaggttgtttgaagcaatgcctggatggtgtttgtggtgccacatgtctggtgtggaggcaaatttcgtaatggccatgcctgtcaggtgatgccgagacctctgctcagaacagatatctttccagtcgggagtggctgctctgacatcgctggggaaggacagctagcagctgctcttttgcaagacttgattcatacagcatggaagatactagtaagagcaagtctttagataagagacctgatttaaatcagggttgtgcctctgactggctgggtggccttggcccctggtgatgctgttccctctgcctgcacacctcctcagggccagctctccaccttagtgtcacttcatctaggagatcttccctgacgttctcaagctaacacactggacacccccaggctctgcacttagatgatcttaattgcttgtttaattggctgtctgctacaggataagtgttgtttgagaacaagccctgatcaatgtttgccactgaaatcctacttcccagaatgatgtctagtgcata

SEQ ID NO: 33952 - DNA, 739 bp, Homo sapiens
ctagaaagaaaacacccaaggagaagggcacacagctggaggggagtgtgctgctgctctgcccagatgcgtctgactccactacccaggagtttcctttccccacactgggaagcattgttcgtagatgaacagccttcctggaagaggtgacacttgagctaagtcttaaagaacagaaggctttctgctgggtaacagtggtgggaaggccatgattgaaaagggttaaaaagtgtagatgcttttgtaaacacagccaggcaacagggtcaagcaacaggggtgaggccagtggtgaaacagcagacgtggtggatgtggttgtttttagtctcttggatgaagttcaaagcaaaagtccctgatatcccctggagagagaacatccaggttgtgttcctgcccagagccgagtaaacaggattattggaacctgctgtggcctcagctggacacactggctgcagcctggctggcgcagagggagagagtgacaggaaaatggctgagattaggaaccgcccttgcctctggacttgggtctctgaggaaatgcctctgttgggataacctgtcttgggcacttggaatctgtatttcaggtcagaaaatatgcatagcctttgacccaccaattccacttctaggaatacaagaaggagaaatagttgctgatgtgtgaaaagatatatgtacaaggatgttcaacgtagtattgttgataataaaaaaaaat

SEQ ID NO: 33953 - DNA, 1099 bp, Homo sapiens
tcttctgtgcttcatgctggtcccttgacttagggtgctcttctccctcttctctagctggaaaaacaaaacaaaacaaaacaaaaaaacaccctccttatgcttaaaggcccaattcaaaccccagctcctctatgaagccttcctgaattcccctaagcagagtgctgctccctccaagtatttctgaagcagcttgtacacatcttcacactatatcccttctacccattgtagagtctggcctatgggagagacttaagacggacataggaggccttactgagcctgtttcaagagaggcccatgtggggatgtgctcgtggtgatgagggtgaacacatggcttccagcattgcttggaacaccatggatagagctttgtctaggtctgagggtgactgaggagactggaacagggcaggggctgctattataggcagcaaattgtgtccccttcagagatccccttggagaataaaagggaaatcagcttggacctcccctaactccaggtgccacggattgtctggatcctcctgccaccaagtacctccatccccttggacccatgtagggtcaagcctaaatttgtcatgtcccttaaacgtgaggaattaaagtaagcgccagcctggctcaggctcccacctcccccgactctgatctggccctgactcagcttctgttgcataggaggaagtcccaggatgcttccaagatgatctcacttgtgcctgttggcacatgtttcatttaggaataggatagcaaagaggctctggggttgagggcaggggtccccctgctaagacttgaatgagacagtaaggattctcaggtctgagaggcctaaattccagtgcttgattcactcatgcaaactcactcttcagagagcctactctatgccaggcattgaagccagcatccttgtcgtacaagaactcttaactctgtgtgggaggtgacttcaggggtctgcccaacccctgtctgtatgatagggattagcacccttgctctgtttgcagtacaggggtggggtgtgaggacctgctctgtagacccctgggtcaaagttagggatgcgacatgt

SEQ ID NO: 33954 - DNA, 1548 bp, Homo sapiens
ggcagttgtctaccacaatcgacactctttgtatagttattgtcaaccagccataactattgttacatgttacatgagtttccatggctctccagatctccctacccttctgtacccacctctgcaccctaggaggccgacctgcatgggccccatcaatgatctcccttgccttctagctcccaattgtgcccagcctttgcaagttaccagcaagagatgcagggagtggcaggagagtgaggatgggggatttattctccctgctccctccttttaggattttgctagggcttggctgctttcttctcatgaaggcagcctctttttggggagccctctccctacaactcccgtctttttgttccaggaactgctccctcttcttgccttttaagagatagggaaggtaatgactgcctgctgttataagccccagagtttcctttgcatctaagtaaatgatcttttccttaaattccctccaagttacacagtttgagtgtaccatccattttttgctagaacactgactgagacaacttttttttcaaatactgggactgctggcttcacagaccgagactccatcctgataaggaagcccttgtcccttgtcccactggttagctctagaacattcagcaaggtgatcacattgtcacaagaccacttctttttcattctgcatgaaactgaaaatgtcaagaaaatttctgagtttaatagacaacatgatcatactccagactagaaaatgaaaccaaaaccaattgacctaggcagaaagttaggttgtaacgggtttcctgcagccaaagagccatgagtcacagcagctggctcaaggctgggaggggaagtaaaacactaaatctaaggaccactctattcaccctacagtgactgctctttttccctcctgccacagtccagggtaggagatacttctccaggctctcacttatgggggctttcctgctggctacatcactgaaatggaatctcctagtggcccttctccctctacagctctggtgttacactgaaaaactagaaggtcagtcccttttatatttaccaccattaaggttgcaggagcccagcatgtccccataggcctccttctccattctcctcttccccttgttttgtgcctggtttgtttcctgtccaaattgggtcctccttttctagaccatgagcttgctgaggtcagggaatgagtcttcgtatccttggtacccagttcagagcctgcctttagggagtgtttactctagcactgtggttaggcaaagagatgtgagtttgagtcttggtttccttagtcttttatcactcacttctcaaattaagccatttgtatttttttttctctctctctctttagagacagggtctcactctgtcacccaggctggagtgcagtggtgcaatcatagctcactgcagccctgaactcctgggctcaagccatcctcctgcctcagcctcccaaatagctaagactacaggtgcacatcaatgcctctggataattttttt

SEQ ID NO: 33955 - DNA, 608 bp, Homo sapiens
tcagtaatttaaattacagaattacaggattttagagctaccagaagtgggcaagacagcatttgccccagggccggcctaaagcaagacacagacataggagtcaaatgttcttggggttctagtcccagttctgccctggtgtttcttacacatcttttggcaagtccttaccttccctagccttcagtttcccatctgtacaacggagataatcatctgagctctgtctgcttcctctggctattgcgaaagctttggaaggaatgacacctcggctgcctcccaggaactaaccatcccactctgcccttttggcctctccccagcttgtcagagtgctgccttccttcacgtccttggcttccagccctcacaggcatgagatatctgggccccaactgactgatgaccagcagattctagtatgtggggtgagggtggggaaggttcattcttgcttgactggcctgcattgcccatcagcctagattcaagccatgcaaagaaggcctctgagctcagctctcaactgatgctttttgaattgagcagagtgaccttgctgaaaagtaagtctgatcatgacactcaccaacttaaccctt

SEQ ID NO: 33956 - DNA, 583 bp, Homo sapiens
aaaaaaaaaaaaaaaaaaatagtagctaaccatggcagccactcccaaatgagaaatcagactttagaaaattaaggaaggttgggccatattgtaatggcctggtcacgccagagttcacctacagttcactcttaagtctgtcctgtaggatgcagcaagtaagagcggctgcatgaaagtaagctctgtttctctgcccatgtgcggggctcccacctccatcagataagcacttgtgtaacctaagtctattttgatctcagtagagatctgtgtacacatgcacacatttggcagccatgggctacagccctggtgctcttgcttgcgattcgagccatgttatcaatacttatgtgtgtaaacttgagagatcaaagctatcttggttgggaaggctaatatttaaattccagacttgcaggcacagcactgaaattccatggctcaagatcaagttcatgtataaaatcaagtcaagcatttgtttgacacagttgtagggctctggagtgtgggtgaggtttgaattcaggagaaatttaggggcctgcccagaatggaattctgtgaaattcta

SEQ ID NO: 33957 - DNA, 1116 bp, Homo sapiens
tcctcccattcccaagactctgagcccacaaatcagagacataggctctagggctgataccactattcacatgcaggctcagtcaccattgtatgaccctctgcgtgccaggcatggtgcttggcaccataagaccttaggcaggaagaccagatgatgcctgactcactggtttcaacatctaatgaatcttttcctagggattgagaaggtgctgcccacattcttaaaattacatctcagcaaaggcacgacagttaaaatcatgtatgccaatctgaggcagcaccaaattggtgggtcacgtggcctagggaaagagcttagcctgcacctcttgggcaaacacacaggcagcttgattgcatgtgtcagtctgcagtgaagcaagacttctaaattctgtgtgaggatattgattctctccaaatttcaaaaatagtttctacgcccctttcaccactcaatacgtttgcacctgctgtcatttcctcttcctaaactgctcttctagcctgttctaggtatctactgccgtgtaacaaggcaccccaaaatgtagtggtttaaaacaaacaaacaaaaaaagccatgtattttgttcaaaaatccgtggttcaggcaggctgagagggaacagctgacactcagtgtcagctgcggtggctcaagggctgggggctggaattatccaccatctccatctattgctatgatttctccatgtggcagctacagggttgctggactcctcacatgttggctcagggttccagaggggtatatcctgagagagaaagagccaagcagaggccttatggccttttggtgacccagcctcagaagtctcatgcatcatttctgctgcactgtctgggtggaagaagtcacacgcccccacccagattcagaagggaacacagacccccccacttctctgtgggaagcatgccagtcccattgtaagagcatgtgggatgggagatatatcttggtgagtccatcttcggaaagtacaatctgcacctactctttttctatctgagaaacacttcttatatttcaagacctaactcaaatatcccttctttaaaaaaaagcatccctagctctccc

SEQ ID NO: 33958 - DNA, 1537 bp, Homo sapiens
ttgccacactagaagttttacctggcacatagtgggtctgaaataaatgttagtttccattttcctccctttaaagccctaaactaaagctatttcttccctgggtttttccttacccggcccctggtatttcctggaaaacccctttgacaatatcacagagccgtggagcctctcctttgagaaacgcccatatatatataaagaggcaccacacacaccctctcacccacacaattttgcttatgattttaagaagttcagattccctgaagcttaatttagaagcctgtgatagcacccatatgacacaaaatatcttctgccacaaagtacagttcttcagttatctgatttccgtttgtagattaaaaattacaaggagttggagaccagcttttcttcttgtccaagtctgtgttctatatggtgactggagggtgataaatacacggtgaatgttaatttaatgcctgggtggacaaatggatggatgaatggaaaggtgggtggggaggtggatgggtgagtaggtagttgaagggatggtagtagataggtgggtaatttgggtggcggaatggatgggtggatggataacgtaggtggataagatggtgaaggggttgccaagctcagagaaaggcccaggcaagcagtgagaagataaattagtggtcacgggggatcttaacactcctggcagaagacgtctgatataatcagtagaaagtatgggatctggagggttcaaagcagagaatgagtggagaaaacaatgtcttagcaggttgggtctgaagcagggctcttagctgggtggaacaggaagaatctgagtcagaaagccaaataggaaacagggcaggagataggggaactcctagccaagaaagcagtgctgatgctgaatggaaagcagaagctgcaagacctgtttctaaggaaaagtggagagtggacaggatccagggggtaagggagaggactgaatagagacacaggaattcatggcatgtgggattctctgagtcataagttcaacgatcatttgttgagttcttcctgtgtgtcaggggttgttttaggcaccgaggataagtccttggtgtcaaataagaaagacagaaacattaataaaagttgagatttacggagcatccgctatgcatcagacactattctaagggtttaatgtgtctcttccaagcaacaattgtatgaaggaggtatcattatcatcattgcttaacagttaaggacactgaggcacagagatagtaagtcacttccccaacacaactagttaagtatcagagccaggatttgaacccagtttctagggcctatgtgcttctttgctgtgctattctgctgccgttaaatgaataattaaacaatagttgtactgcagggtgatgagagatatgatggcagtctttactggttactgtgggacacagagcggaggtggtaattgactttggttgaatgggtctaaatgggttttagggagaagactctttgaagctggatt

SEQ ID NO: 33959 - DNA, 1297 bp, Homo sapiens
gtgctagtcatgaacaatgctggcacatactaggtgctcaataaatagttgaacgactgaatatttttctttgaatgagtgagtggcacaaaagtgaaagtatgtgaataatagtttatctcaagtaggcgacctccataggataaagctgtctgctttaggttaataaactaattctggttgaggtgttaatagctgataacagcttaacttgttggcatgagtcaaggtaagatgtacattttaattgcaactctctagaagtcagataaaagtaggctttttaattctactgtgaggtcttccagaagcaaggttcctttagattaaattaaaaaaaaaaaaaaaaagaagaggagggaggggacaaatgctgagaatggggatggaacagaggatggagggagatgcggagaaacttcagagcggcaggtgccttcgtttcccgttacctgctgagtctagtcccttccagggcacacagtgggcgcttagtaactgtagaaagaagtcgaacgaaatcggaagggggagaggcagaggccacaatcaagacacggaaacgacagtcagtcgaggcagcagagagggtttcacgcgggccagcggaggcgcagggcagttgagaagggaacttgccacggggcggaggggccgcgctccccaccagcgcggcgcgggggcgctaggccagggaccgccgggccagggaccgccggctgcgagcagcgggaacggacctgccccgggtcgcagcggtttttcccgggcggggctgaggctgcagggaggcgggcgttccggcggagggtcacggcctcgccgccgggactttcctggggtggaggtgtgagcacgtaggagccctggcctttccaacttcccaggtcagactggggctgggaccaccctgcgcggccttggatgcagggaaccaacccagtgctagtccgccctcgcggggacctgtcctctcgcctgacctatgaagtccgtccctgcctccaaggctccaacaaagtccttctttcccccagagtagcagttctcaaacttgagtgcatcagcatcacccagaggctgtattcaaacacgttgctggctccctccacggtttctgattctgtgggtttagggtggtgatgctgattcctctggtcaaaggaccatccctggagagccactgccctttaggtaacgattttcccctcatttttcttctgaactcggtcagcaccttgttcagcctcccactgagcctggaacccttgacagctggggaaacaagtgcgttgct

SEQ ID NO: 33960 - DNA, 1564 bp, Homo sapiens
ctgtaaaacttgccactttagtctccacaccctttcagccttcttcagccttcttccagaaagccctctcttgtgccatgttggttcctggaattttcttctctctctagttctcatagatgaagtagttcccaaccacagtctatgaattttgctgcttgttgaagaggaatgccagacacctaaaaagggttggcacttgcagctcagcaatctcaaagctctccatagagttaaaagcactctgctacagggctttttccattacatccttaatgtccattaatgcattttccccactagacccctgaatgttatgggcagatatagcccatgtctatctctggatctgagcccttagcaatcagctgcacacacagtaggtgtggctaaacctgtgctaaatgcatatgtgaatgcatgatgcataagtgactgtgattgcttccccaccaaaatgcacagaagactgacagatgtgtgcggtgagaagctagaatgggaggaggttggttgcttgtttaaaaatgaaactgaacaggctgagaagcttactcacgcatctgctttccttcagtgtcctctggggaggaaggggagggagagggggagttgggagcctaggagggctgacaaggtgccctcttcagcactgagtcagcaacacccggccctgtggacacaggatgatcctgatttcaggggctgagtcacatgaataactggaatagttgtttagatcataatgaattcccagaacctttccaagccaaccagcaggcacaggctctctccctacccgcagcactttccagctttgtgacttagcggaaagaaagaggccgagcctggatcctgggagaggacaggctgcaagggagtagggcacagggatcctcaccgcttccattgccaagcactgcaggttgtttctggacctttttgtgtttcaaggaagatgctgaaagagactggcattgcaggcatgaatcctgcacagagtgcacagctgttgtgttgccgggcaaatgtatgggccagggccctggcaccttacagtgagtggttagggtgtcagtgatactaaatgccctgggagtccaggaaaatatcctctgtgaaatgtcattagaggtctgtgtaccttggatgaaacaagatatctaaactctagccctagaagaaactgtatatgagagggggacggctagcctccaagggatttgggaatgatgcatgattctacaggttgcatcttctaagctgcaagtcaagagctcagcatctcccagaaatgcctgttctgagctccatggaagtcctacgtgagtgccttgtccaaaatattggctcagttcaaagtttatgtctcagtgtttccttcctgagagtatccaaagaagatctcagccttctgtgattttgctctcccctccttgatatcacatccactatgaatgtctcacccaggccagtgaacagaccctattgccacattattcatgtttatgtttgctctagggcagtggttatcaagcttgagcacacatcagaatcatctgga

SEQ ID NO: 33961 - DNA, 774 bp, Homo sapiens
tttttgtgctctttaagttgaggtcagtctcagcaaggtgtgttctgaatggctacattctccccaagggtcacacaccaccaccagagagggtgtgcatcccatctggtgcacaacttaagaagggaaatcatgccttcctgtgtcctttctccagagcctcctgtcttcctcctagcattgctctgctggcccaggtttaagagctggagctgctgtgctatgggcttacactggtcaggcagccaggaggaagaggaaaccagaataaacatgttttgcaagaccaagtctggtttaaatgaaagcaattctaaataaggacaatacagtcttatagagccagtgcctgggccgcctgttggcagtttcctctacagaggggtttgccatggaaaaccaaaggtcagactgataagctgaaactgcctgcagccaggctggcaggaggctcatgacaagacctcctcatccagcatttgaatccatcccaggccagaggatgtgattacagaggcagggaatccaaggacccagtctggcctccaatcctagctcctcactcactctctattgtaaactaaggcaatgataaacattgcctatctatcaaaaaagaagaaaaaagaaaattgttctgggttcctatgaaaataaaaagagatattatgtcaacgtggttataaactgtaaagtgattagcaaagctcaagagttagaaataggttttaatagttcccctgcctgctagctgtgtgaccctgggcaagtcca

SEQ ID NO: 33962 - DNA, 881 bp, Homo sapiens
cctcttccctgactcccccaaactcctctgtgaaacccaaggatttagagcaaatgctccaaaaccggctgacctaattcaaacccctcactgtatatgaggggaggaggcagttggcaaagtttccaaagtgtcctttgttggcctgagtgggtctgatttatgccctaggccttcatcaacagtttgcctcaatatcttccaaagtgtaaagtcccgtaaatcttccctgagagcaacaactcgaccaccagttcatgttatacaaacacacagaaatgtcattaaggcaacaaacagctctgctggccccggcagaggccttttctgccaggctcaagttacttaaaatcaatatttgaacaaggacaaaaccacatgttttcaaaaccaaattagaagggtctaataccaggcctggagatgtggttacatcacgcgcattccagctggccccttgggcctctgccgttgggcctgatcagcctgcccaagctcctaccccctgatacagtcactggacttacttgtcctgagcatctgacctcaccagacaggtgacactgaggaagagaataagcaagaaataggaactttcacagagccaagcacaggacctgagtttacaaaccaaagcaagttagctgtgttcactcattcaatcctgtcatttattccaaacctgcatgagactctacactaagatctgggcatccaaaagtgtaccaactcatgacactctgctctcaggggatttgcagtatagtgtggaaggcagagaacgcaacgggacatttcaatgcagtaagacaagtgccagtgtttcaggtaagttcagggagctgtgtaggcacagggcagggacaggtaaccagggcctg

SEQ ID NO: 33963 - DNA, 554 bp, Homo sapiens
cactttggggagggctgtctgctttactcattccataaattcaaatgctaatttcctcggagacatccacagagacacaaccagaaataatgcgtaaccagctatttgggcatctcttggcccagtcagattgacacataaaagtaaccatcccaggcagcttctgaaatggttcccagtgaccctttgtgttagtttactagagttgtcacaacagagtcccacaggaattgagtggcttccgcaatagaaattgattgcctcatagcctggaggccagaaatccaaaatcaaggtgttgaccttctgaggtctgtgagggacaatctgtttcaggcctctccccatggcttgtagatggctgtcttactgtttatatgtatgcattgttctccttgtatgcaggtctgtctctaaattttcccttttggtaaggataccagtcatattggactagggcccaccctagtgaccttgttttaacttgattacctctgcaaagaccatatgtccaaataaggttacattctgagctattgaggtttaggacttca

SEQ ID NO: 33964 - DNA, 1162 bp, Homo sapiens
gtactcaataaatctttgttgaatgaatgaatacataaatgtaggaatgaataaatgaataataagatctatttctgtgctatgattctaagaatcttagggaaaatatctcttttctctggtaatgggcaggttgctaatgcaggaaaagctttcatagaatgcagttagagcattacagggcctccacagcttaccagagaagctccgtgtctcctctctgtctactatatggaaccatctctgagcaggaaggaaattacacaaactttcagctcagctggttccagagtttcacaacccagctctgtcttgcttacatctgacgtgctacttcactggtgtgacctccagtgtgcttagtggataatgacactgcataatccccatgctgccccacaatgaccctgagtgatgtctagactttccagtaatcaagtcttataattcaatgcaatgcaataaccttttatgtattgttggggagaatagggaatatatagatgcactgataattactaggcatttgatatatggcctgtgatagagataagggcaggaaactaaagggtacagaggaagctatgtggcccagcctgatgtgaaacaatggatgtatggttggataacatttatatattttcaaagtgtgattatatatttcatcccttagtctccctgtagtcacggggaagtatagatagcatttgcattatttgttcttattatatatagagagaaattgaggcaaatgagggtggtccgggacatagatctggtttcagtggctgtcttagtctgttctgtgctgctataacagaatgccagaggctgggtaacttataaagaaaaaaaatttatttctcacgtttctaaaggcaggaagtccaatatcaagttgctggcatctggggagtgtcttcttcctgtgtcatcccatggcagaaggtgagagggtgagaaagaggggttgggaaatcaaacttgcccttttataatgaactaattcctgtgacaatggtattaatccattcatgagggtgaagcctgcatggcctaaccacctctcattaggcctcacctcccaacactgttgcattggggattaagtttccaatacatgctttcttggggacacattcaaatcgtagcaatggcagat

SEQ ID NO: 33965 - DNA, 4035 bp, Homo sapiens
gaaaaggtaagatgaatacatcttattattcctattgaacacttgattcacacagctgctaagtaacagattccaacgagtctatagctaggtctttgggtatgttgctggtaatgaaaaggtgaacaatcatggtgcagaagaaagaaaatgagccaaaccaggatccctggtagagttgtagtgcaaagactggggttaattgtgtggcctcagcctcactgggctgttctcctcacctgtaagaccaagataagagcacttatttacttcggggttgttgtgaagatagcagacaatcttagtgcacctgccacttaagatccgttcagtgaaattattacctttcacaggtgtgtctttggaaaatcacttccctttcctggatctcagttttcttttctaggaaaacaacatgtttggactcagcgactgctaaactgtctcccaaacctcgaactccctcagcctgggatcctgccttttatgaaaatagttcggattggagctcaggttggaattctcgctttagttgcttgctagctgtgtgtcccagtaaaagctaaaaatttcggattccccacatctgtagaatagggatacataacatgcagcttattagaaagggaaggcatgtgagaattaaattaggtccgtgtccagtacccactaaattgtaaaaacttctcaaaggcagggacccatctgttttgtagatttacagaatgtcatacgttgaagtacgggggttcgccacgggattagaaaatttctgtagagtaaggaacaagacacaaggtaagcattcaagaattgtaaccatgcaatattcttatttcttacagtcgcctacaacagtcctggtgtttagtaaacggtctgacacacacacccatcaggggctgcggagagtccgcctgggtaagctccgcaaggtgagtccccagagccgggaactcgcagcctgagcagacgcagcgtagccgatcttgggtccgcgctcctcccgccttgcccagccctgcccgcggttggctaggccccagggaacgctgcagccgcggggtgggcaggcgacggccaatcccacgcccggttcaaagggccaatcaggccgcgctttacaggggccgcgctttacaggggccgcgctttacaggggccgcgctttacaggggccgcgctttacaggggccgcgctttacaggggccgcgctttacaggggccgcgctttacaggggccgcgccggcgggggcgggatcgcgcgcaaggcggggctgtagccgccccgggaccgccctgctcaggcgccgtggggttcggcgcggctacgtgcagaatccgtctagctaaaatgtaatttcagattggacaagtactgtaagtgaccctcctctcagtcccacgtgggcgctgggggcttttgctggtgcgcaggctcttagcgcgcacgcccagaaagaggcttctccaacccggcccggcccttccttcccctttcccgcagtcgttgcctcctcctcccctgcctcctcctccccttcctcctcctggccgcttagtctcacacccgccgggccgttgttcccgagacgttgttgagtcccctgtgtcctcttctgggtgaggcgtccggccacttaagggaagggaagggaagggtcggccttgactgcatccccaaggctgcctattaggtgtctggaacccgtgctgcttcctctccgatcagtgcccacttatctgtattcagtactctttctctcctccccttacccttgtaggacattttcctggcatttgaggagcctttaattcacgtctggctaccgaaggcatttttaggctagtgttgcttgtagatttaaacgcttccagcacttgtgataatgtttgaggcacagctgagtttagatgagataatgctgtttggttacagttatcctgagtagaaaggcctagggatatcttttcatttttagccgtttcctttttatttaaagattgacaaggggccgggcgcggtggctcacgcctgtaatcccagcactttgggaggccaaggcgggtggatcacgaggtcaggagatcgagaccatccaggctaacacggtgaaacccccgtctctactaaaaatacaaaaaattagccgggcgtggtggcgggcgcctgcagtcccagcttctcgggaggctgaggcaggagaatagcgtgaacccaggaggcggagcttgcagtgagctgagatcgtgccactgcactccagcctgggggacagagcgtctcagaaaaaaaaaaaaaaaattgacaaggtgcaaaatggtgaatttccctcatcatgggctgttttccactaaagcacttctgtgtcttaacacaaatttcttccccgaagagtcagtcatgacatgaccaaagtctgaaaagcagttaatccttaggttaaattttaaagtatgagaccaggaggggtgaggtgcttattcttttgacttgtaaatcagaatgaaagaagggaaagtcttttattttgtggctgttatttaaatggtagagttttgctttgtatagtttttgcttgcttttcctcttttttttctatgatccaccacgtgtatgtcctgatttttttcctttttaacttgcttgctggattttccagccagatgactgccgcttggtcttctgggagtctcctgttaatggggccctcatgcttggctcttgacctgatggccactggcctggctcttggaggacctcctagtgggaggcccagagcactgttattaaggatgattgggggaacagatcagagggggtcagctgggcctggagatcaattttgagggggagggaggttgggagcctgcctggctggatttggaagtcaaaacatgtgtgctgggagaagggcataaccccagagggtggagagccatgtctttctggataaaattaataagtttactgggaggaggctgggccttccaggctgtgttagtttttgttgtgggccttggcttttcctggaatttggttccctttccctaacctttcacttattagtttaaatagttccctttacctaacctttcacttattgatttaaatagtttaaatcacagtcaattaccagctggtttttaaaataatttgaggtaatgaatcttgcccttaatctcctagccagagtggaaccccctacctccacccccagggggatttgaaatgattattttaccagaacgtgctacagagatcacttaccttctcacccgcccacctttttataatggagggacatagaatcaacccaggtggtgtcagagatcatccaaatcagttcttcatgtattcatttgttcactcatcttgtccacatactttgggcccagaactgtggtagtctctgggaaagtgcagatgagtaagacttggtctctgctttcaagctttcatccagtttgcttcaatccactttgatgagggagattatgtgatagtgagatgagtacattgaaaaggtatgccgaagactcccaggagttgagagaagggcaaatggctcaacatggggaagccatttggggaggacttcccagaagggaatactggagccgagttccaaagcctaagtatgagtgggctggagaaagagcgagggattatatgaaccgggaacagcatgtgcagaactacacaagcatggcacatggttgattaggatggctgtgcaggaaaggataagttggaaaaaatcacctgacaggaggctggggagggtgaaggccaggtcaggaagggtctggtgaatcatcttaggggagtttgaaatatatctccagggcaaacagtgatacatactctcaggtttatgttatagaaaattaattctggctgcagtttggagaatgaattggattggcgaagcccggagagaggtaattgtagtaatataggtgagagacgtgttagggtaatagttatgggagtggagagagattaggaaaatagaatggttaggaatgt

SEQ ID NO: 33966 - DNA, 2414 bp, Homo sapiens
acaggtatgtctagatgaaaaatgtgttgtgccattgctacagactctaaaagtttggggaaccatggaagtgtttgggtttcttttgagccagtcttggcaaccttaaaacttttagaactgtctccccttggagggaaaggcgaaaaagaactgaagaggaggccttaagaaattttcatgtttagaggtaaagttttggttagcaagctggtcttttcttcctatttattgttggtagagcccatagagaaacaactattattgccaaatcagctctttccttctcatttcaaatttttccaccatcttagagcatgtaaaaattgttgaaagtggtattcagtcatttctattaagactgaggtgggcaagcttaactcattgttcatcttttttcttcccaatcttagcaaatccctgattgcagtataactaactaaataaattgcacaggacttgtgtacatcaactcccagcaaagtccaaagatcaaagttgaaagaggatactgaattccttcccagatttctgggacactgcttctgtgcactgtcaccaaataaatcctggaggagtggcgccttaagaaatagggtaagctcatccgcttctgggagattgtcatcataggcagcaatcttaatgctctgagatgcttcagagggaaagaaggggaaaagtataaaagaacaatccccacattatcggtttttagctcagtatttgtagcttgtacccccttcttaggattgctaaaacccgtttgcaaaggacagccctctatttccaggtccccttttccttttttcacactgcatttgagcagtttgcacatttgttgaagaatcagccacaaagtctgtggtttcctgtggcacatttctaacaatatttatacaggctattatttaatgaactgtataaatatttatacagaacagtcttttgatcataaataggggctaaaagtcagtccagtccatgctgaggacttggacaggaggctgtttctgtgctttgaaatgtcttgtagactgagaagttaggtatgtcccaggacttgtacgcagcacagcttgaatttctgttatttttctttctcttggccgtccacagtccgtgccctcatttctttccgcctgaccaccctccccatatccctaacagctgttttctttttagagtatttatctttgcctaagaagaatgaaatgaaaccccagttccgactctcaccattcataatgcggtctttggagtcacactgacttagcctcaaaccccagcccctgtgcttctgtaccatgcaactttaaacagcttcctgtctgagaacctcactttccttagctgggaaatggggctcatactgcctacctcacagggttgctataaggattaaatgaaatcatggagtcacatggtgatctgcagctcagagctcaatagatatttcttgctgcatttgttgttcttattgaagaagtaatcaaagggtttggctttcagttttagctggatgttgtggaaggagccctaaacttgccgcaagagactgtggttcaaatcctgatgccatttgctgtttgtggcactttgggcaaattactccacccttctgaggtataataaagtggtgataggtttaccaaactgattgggtttctgtgaatgagattaacattgtgtgggaataagtgacacgatgatgatccttatccttgtttactttacaaactagaaaaaggaataatgctttccactttacagttactttactttttgaggccaaggggtactggttgcataagattaggagtctaggacgcagcagatcatattcatgacccaggaacaaagggcatagagggggaagagcaggggacctatgatgcagaaagtcctttgctggagctcacaggtcgaatttcagggaagctgcccaagggcttgaacatccctgctttcaggttccaggtatggaaataatcacagagatcagttaaaactataataatgggaaaagtggtgaacctgaaatatgcaagtaggatctatttcatagaaaaacatgaactgggtgatgtgtgtgaatgacgctgggatggtttgactctttgctgcatggtgccctggtaataagttatagaaatccatattttgctagaagcaggccacctggtgttgtggaagggtcagtctctgaagatgaacagcctgggttctgagtcagccaaccttaggcacagcaggcagaggcccccagcagagtccttgacaaatgggcatttagtaaatagaggaatagcaggaggcagtggagcatcctgagaaaggttagggctgatggaaccggagggaatggattactgtcaattgtattactgcctagtaatatggcatactggagc

SEQ ID NO: 33967 - DNA, 1610 bp, Homo sapiens
aaatttttcttcatttttccttcttctctgtaaattatcaagggcctttgaagagaattcttacatgttattaagaaattgcagtcagggagccctctgttcccagatcatttagaagattgcttttccttttgttaaatacaaaaaattgtcaacctgtattgttaaaatgtgccaaaaactgcattcaccaataaaaaatgtcagctctcattattgcccagatattattcttttcaaaagcggagcactcttgccaggctttctaaacaatcttcagctcattcatcttcctggttttgttacattttgaacctctctgggtctatataaggtggcagcctgtcttttaaaaattaatggattccaaatgccattcaaacctatttccgcccttaacctcctcctcttctccccaaccctgcctgttaggagtcttatgttctgtataaatattgagctggagatagtttctaaagaggtgtttggacctttaattaacattgacagcctgtctgcttaggattttgctctgctgtctccatggaaaagtcaggtaggtcagtatgtgggggagggacctctgcagtggatgtgttcctggcggctggccctagagacactgcactctgagccaaccgtgaagtcattttgaatttaaggagtcttgctaatccaaggcaatgtgtcttaatttgacaaagtaaaggctgcccgataagcaagcctcactacaagttctgtgaaacagggggtgtttgtaagtttagattgtgctagagaaatgtggtgatgtggaagaacgggctcattttctcctgtttactccctttcccaccccatccccctcctctctcccttctctcttacttactttggcccaaatcagccctgcagtctggcctctgcagtggcttgatgtgaaatttgagaaacatatgtagttttctatttcaggaaaatgatctcagggattgaatgtgtttttttgttggctgttaagctctgatcttgcccagtgtggttttttgatgatgggaaagaggcttcgaagtgctttttatcagaatttcatgtaataaaacttaaggtttggtttctttattttggcccccaaccccctcccaggctcaggacacaatgtcgtctattctgtcagaagtgggaagaagtacacattgttcatattacaatcacttctttgctgcttgcacacacatatataagaatggccactgtgtctatccttcacaaaagctattttaaatgtagttcagtggaggaccaaaggtctgcgtagtgtctcttacaaaggaaaagggatctgttgggggaaaagtctgcctttgttttgccttggaagggccagtatttttctttgttctagaggtgagtgccaataatgggcctagtgccctatcaagcaaacttcattaatccagccctgcaaagggtacactgatcagataaaagggacctacatcctcaaagctcaaggtatttgtttttaaacttttttcttactgtaaataaatatcactattgtacttaatctcatattcataattgtattccttttcttaaagagcctttacataaaagcttcaggc

SEQ ID NO: 33968 - DNA, 1251 bp, Homo sapiens
actaaaaggaaagacaggaaaaggaaaggcaactgatatttattgaaggcctactattatagtaaacttgactcataatttatattttcttctttaattttaaccttggcatgcaatgattattacccaattttgtattcagtaaaattaaagcccagagaagtttagtatttttcctagagtcacatagtaaacacgtggcagcaggggtgtttggatactattgtgccaggcagcctttccgaacactccagcctatttctcaattctttcttggctccagaggattgtgtagcaggaggggaaatctgttcagagatcaggaaactggaccaattgggcaagctgccagagcttcctttactggattgtaccagcaagtttgtttttctctgtccaatactgggtaaaggtcccaccgaaagcctttgtctctgctcagaatgcctggtatgatctctgggaaactatttggcaaaggagtgtggcagctgaagcacagaagcctctcctaggtggttcacccatatctgatttttttttctttggcaccttgtaacagacctgagaatgttgaaattttgtgccaacgtggacaccattcagcatgtcagatttctctgataccgtgaagatcaatatgttggatgcaaaggaaaagtcccagcaatagattccagccctcactgccacttacctggtatattacaacagcctccatactggtcttcctatctgcagcctgtcctctgctttccggcccacttttctcagggggatcctctttcaaataaaggtctgattatgttcctccaatattaaaccccttcagtgactccccagttcttgaggaaaaaatgctgagtctctgagcatagcactgaatacccttcctggtctggccctgtttctccgcatgcttctcccactccacccagcttctggcaggtcatactaccgtggctcaccaaagatgccttggaaaccaggtactttcatgtctctgtttctccagctggagtttcgttccttctttgacctgcctggcaaactcctatgcattctttgattcctactccttcatgaagcctttcagcagtttctttcttagcacaactctaccaccttgtctcacctgttcacagacatctgcctgcctccctctctaggctatggtgccctccaaggggaggcaaggtgttgttttcaaatcattcacagtacttactacataggccacttacagtcagt

SEQ ID NO: 33969 - DNA, 2640 bp, Homo sapiens
ttttcagtgtttattccacataattccaaggaatatgattttaagagtgttcacaattcatatttttttttaatttttgaaattgaataagtttcaaatacgaaaatttaggaacatgatacaaaacttttctctgtgcaccactggagtactgcttttgaaatcaattctctctgtcctggattacccttagagctcctgtctcctgcatggaggagggtggagggcatttaacatgtccatctctcaccccattctacctgagcttccagcaccaccacctctgggcagttccgcttttagtcagcagctcccagttcccataattttgacttctgtccttgctagtccagaagaaatggctcttctgggattgaattcctccctttccccagcagaaatggattggggcagaggaattgcggagctccatggcatagagggtcctggaaggcttgtcattagggtatccagggtgggaaggggagtgaagggaggggaaggaggaaggaattgagttgggaagagtcaaggaggatgaatgaagttgctgactgatgtctggaataacattatttcaccctcaaaaataccagtaattcaggactgaaaaataaatttcacaatatgttttaatttcaaaaagtgatagtgtatttgacattcttatccagcctggtctcacctcaggagttcccccattggagaggccatccctgaatttctaactcacaggcctcccctacgttaatatatttatgtcctcctggcccttgtttactttttacttgtttacttttgcttttgtttacttgtttacttttgctccatgaagtcagggacctgcctgcttgctccgcaatccctagaactgtgtctagaaccttagttggttgcagtaaatatttgttgaatggatggatgagatggttgtagcaatctaagttgctttggatgagattaacactgaaaaaaaaaaaaaaactggttgcctgcaattctgtcagccagtccaggcaatgctaatacagctttgattattatgatcatgattattattttgttttgaaacctttttcagaggccaagcatgctggggacttgagggacataaaaatctttcaactgattatgccacctgcaaacaggataagcctgactttctacctcacccacctcttgctatcacagatatgaatcaacgaacacacaaaaaaggttttcaattctccctttggaaagagggcacatttaatattctgagtcaggcaaggaaagactctagccacaaagacagctgggaactcaggtccatagcaggcacccaggacggaggtgaagagaaggcgcctccctgtctggtgacagcagctggggcccttgctgcctccctccccacaaaaatccagttgggaccagtgcatgctgggaatctgcctgcctgacagaaacagatggcctcaggtggtgactgatctcttggtgacactaactgcatagctgctgctttactcatgaccgaatgagacacgagatggcggaggtaagagttggttaccttgccgtctcctcctcagctgaaatgactcacattgctgtagcttaaatttcagtccaggctctctggactcggggaatttctttttgctcatgctcctgagaaccagagttctccaggaacatctgtagtctctgtcttcaatcaaagcatttgagagatgctttatttttcccctttcctctgtacctgtcacagaagggggcctgtctgaataagatggcacataatctgctgagtgcagcaacccctctgtgcagccttgaggaagaagacaaggcagtcaaagtaccttccatcatttcctggaaaatgtgtcggtagcttggagaggcagagtgggagatggaagtaacactgcatgaggagttaggtggtctatgttcaggggccagggttgtcacttactagataggggacctttagccagtcacttaactccaatggccttctgcttcatatcatctcttatgtagggtggtgggactggattaaggacagcagatagattagctgtcagtcttactgattggaagttgctgtccagagtacagtatgggggatggctgggaagcccatctcagctaagtgagaaagagcagtcaactattggtatttgccaagtgtgtgacagtggcacatctgcctgctattatgagacttgatggtcatttctgcctctgtggttttatgattccaagtgtcctgcaagtgattctagagggatcatgaaacattttctggtcttaataattactcagggatctattaacaatggtgaggaacatactcacaaccagactttcattgagagtttaccatatgtatattatatcacttaaccctcatccttacggatagggaggctcaggctcatagtgattaaatgacttgccaaggtcactcagctaataggtgatggagctggaattcaaactctggtctgtctgcctccagaaccgaagcgctgaactgccaccctatactacttcccagttggagaatacctcagtacagtaattagatgccagtgtgtatggctttgcctatcagtacacagaaatcagaaaggtgattgagag

SEQ ID NO: 33970 - DNA, 4076 bp, Homo sapiens
gcagtctgtggtctaagctgagaattttttctcataagggcccattttcctctagcatttttctgttttgagactttgcccagctgcctctattccctagtatgtagacttaataaaaaatctcttggttcataataaacatggaaaggagatggtacacgttttccatttgctagtagaggtttacctgaatacagttggtcatatatctcagtgtcgtcagagtacaacaaaatgtcatgccttcccatgatttcagacaccactcttcagtaatgacttatctgaatatcagccctgtacctctcctgagctccagccttaagggcacacttttcattgggtagccctacctgctgacccatagacaccctaggctcaactcattttccctaaataaatttgcttttctttctgtgttttctatcatggtaaaggtgctgtgatccaataactcaaacaagaaaccttgatggcatgccttccatatccattactgttagctaagtgggggacaatctatatattgcctcagatatcactgggatccattgccctcctaactaggctccctgggtccagtcatctttgcctttcctccaacttctcccccatgtcacctacctcctcttttctctacccccaccaaaacagtacttcatacatccctagtattgtctttaaatgtaaatctgatattatttaactatttgaattctttagtaacatcccactgctggcaggaaacaagtcctaacttcctagtataaggaatataaggtccaatgtgatccagctgctccctgactctccagtcttacctcctgtcacactaccatggatcaagccccatggttccctttattctctttcaactctgtattttcgcatatgtgactttcttctgctagtaatgccctttcttaattggcctgtacctttgactcctacacttctgtattattaggctatagcactagatgtggcttaaataagttagattatttgtttatctgatagtccggacgtagatgctttccatgagatcatccaggaacccaggtagcttctgcattggactgtgcttaacatgatgcccctttctgcatgatccaaagtggctttcaaccacagcttccttcaaggcagcaagatggagaatagatgaagaaggaacacaccttctcccttttggtgctgtgactaataagaaatatatttttagtttctgttccaggtttgtgacacagagctcctaaaagccttgtaatttccagagtgatcaacattctaggagtatcttttgttgtactatttagactttgactctggttcctaacagagcttctaaatcccttggggtttcctaagcgatagagcatcttttgctttaatgaggcgactcttgggctcctggataacttcagaatgggagttggtcagaatgggacttggtcactagaaagaccatgtgatggatagcagctcagaattttcagccctactccccacatccacccaatccaccaggaggggagagaggctggagattgagttaataagcaatcatgcctgtgtgatgaatcatccctaaaaatccctgaaagatggggtttggagagctcccgggttggtgaacaagtggaggtgcctggagagggcatgaaagctccccaccccttcccacataccttgccctatgtacctctttgtctggctgttcatttgtatttgtattctttataataagccagtaaatttaagtagagtgtttccctgagttttgtgagccattatagcaaattatcaaacctgaaaaaagggggttatgggaacctccagtatgtagctgatcagtcagaagtatggaaggcctagacttttgattggcatctgaaatgggagcagtcttggattgaagccttaacctgtgtgatctgcccttactccaggtagttagtttagaattgaattgtgggacacctggttggtttctgaagagttagagtattggttagtgtgggaaaatccctcacacacgtgatgtaaaaattgtcatgagtatgcagaaaaaagtttttcccctttagtggcagtttccagagtttgtaaatatctctgcttcccaatcttttgtgcctcctgtctgtctggtactccacctctgtagtaatggcagcagcagcaattctagtagtagtcacagtggtgtttctctagtagaagctgtaatagtagtaggaagaagaggtgtaggagtagtatcagtatcataatttcccattcctagtttcagaagagattgaaaggctaagtgacatgcctgaggtcacatagttaataagtaaacggcaaagctatcgttctgactgggagctctcttacttcagagctcaccactagactgtgggtagttttcaatccagtcacactaaatgccagttatttccttacatgattacctctcccacaagattcagaacttcttgaggaaaaggacatatccaactgacctttgtatctgtagagcctagctccaaggctgggcgtatccatcagttttagacattgaaatcagggtttcttaaccttggcaccattgacattttgggccagataattctttgttgtggggctgtcccattgtgcatgacaggatgtgtggcaccatccctgacttctacccactagttgccagtagcacatatccccacccgcagccagataaaccaaaaatatctccatgcattgccagctatctgctgggagacaaaatgtccctgattaagaaccactgatttaaattaaatgaaggccaaggagccttgagtagtgttcatatccgaaaagggcattttcagaattgttcaggctgctggatctctcaaagatgatgatgtattttccaggcctcatgtgtctggagcacaggttgcctgtggtggtggctgcaatgatctcagtgtgccaggccttcacggggaataccagagagggtccctctggagcagctcttactgggtcatggagaccatctgtctggcatggtaccacctggcaaaatctctttgccttaaccaaaaatatgcttttgtaaatttcctggcaaagcaggggctgcattctgtttcctgatttctctcttttatttccagatgtgtcactggtgacacatagagcccaatgagaactctgttggaaactcaagtttctcattcttcgccagctccgttgtcatgattttcccaccgtctaagccagtgtaggttacgttacccacgtgctggttagtgcttggatgtcagttttcctttttaaattctagatctgtagcatgctttagggaggaaactttatggcttattacacaaatggagttaacccttccctgctttgcagtgtttttgttagtgacagagacatgaattcaagatctgccatttattatttgtttcattttggacaacatgcttagcttctttgatccttgatttgtttaccttcaaaacagagtaacctacctgtcctgtctacctccatgggattattattaaaacacaataagataatctgctcaaaaggcttaaactccctagtatgatttactatcagtataccttttgcacccaagaaaactctacagtatcattgttcatgggcaccaaattgtaagttcagttaaggcagactttgtgtctttttctgccagtttctaggacctagaaggtattcagtaaatatatggtgaatgacagtatgaaaaaaattgggaagtcagattctgtggttcattgtaccagtgggggctggagggaggtaagtgaatggtttgtgtggctttgtgtcatttgtatttgtgacagacattccaagcaatagcattttcaagggttcacaagtgagtgcctgcagaggcaggacacacttaacactctggcagatatgcgacaagacagggtagggaggggcccaagggaactagagagggcatacccagctgtcttagtcattttgggctgctattaaaaaatgccatagactgggtggcttataaacaacggaaattatttctcact

SEQ ID NO: 33971 - DNA, 1062 bp, Homo sapiens
taatcttaatgaatagcagtagtctgttctgcaagtccttgacaccaccctcttttctatatgctgtatctaatctgttaccaagtgctgtcagtcttaggctccaaatacgtctataattcatgaactctttccacctcaaaatgctacctagcctgtgttcccataatctcgcaactggattattcaacaggcttataacacttgtcattgaatggaaacttgcctttttcagtccatcctgaacactgcagccagcatgaactttttataatgaaaatctaatctaatcctgtgacctcccagcataaaccttctcaagtcttcccaatgcttttagggcaaaaaccaaaaacccgaattatggtctcccctccttctggcaccactgttttcattgatctctgacctcagttgccctcttttggttttctgcacacgacacccttctcaccgcaagatctgctctcatggtcttgttttgcttccagtatcgagtccatgttccaggaagaaggacaaggacaaagggcaaaagtatggactttgcttctgttccagtgttaactctgaaacctcactcggtctcttctgcctacatgtcaatggccagaaccgtattacatactactacctgcaagggaagctggggaaaggtccattttttgccagtcacatttcagccttcaataaaatgagagttgtgttatttaaaaagaagaggaggaggggcactaggtaagcaacctggagtcccaccttcaatgaggaagtgttttctaggtgaagagttgagtgaaggagatgctgacagaagtgacagcatgaatacagtttagtgctgagcaatatgatgtgggaagaaggtgctggaacactgagtttgaggcagggaaaagggagggaggaaacagagaagtaggcagggatcaaaaaatcataatgcccttctattccagctgaggaacttaaacttcatcccgtgtgttagcctctaaatgaggtcttatatgccaggtgatgtcaagcaagatggtctactgggtatagacaaaaatgttg

SEQ ID NO: 33972 - DNA, 2833 bp, Homo sapiens
tgcgtcaaaatcacctggtgagggaggatggctgggctccacaccacagtttctgcttcagtaggtctagggtggggactgagaatgcacacttctaacaagttcccaaatgctgttcatgctgccatcctagcacttgagcatttttcccaatatgtgtatgatccccctcccccaccaactgggtgacgtagatagaactttaagtgtcattaagttatgtcatgttttgaatctttctctgctcgatttccacgtcaacatgagtgagggcttcagggattttactccatcattttggctaaatgccaacttggcaaattccactcctcccccggagggactgcaaatgccagtgtcctccttcattcaggagtgaggtcattgtctgtgtggttaaaagtggacactttctgctgcttctgcttttgcactgtagtagaagtttcaaggagctctattttacagttccaaattaccatccctcccctctttaatgcttccaagatggatagtctctcaccataggttaatgtttagattttgatctctatttctcagccccccaaatctggatgatcctctggtgccagagctgttgcatgtatcacccctggacactttcttctctgcttgaaccagagaataattatatatagtagttcccccttgtccatggaaaataccttccaagacccccagtggatgcctaaaaacatgggtagtactgaaccctatgtatactatgtttgttttttttttttttttgatctggtaactgagaggattactaagcggacgacagggaggtagtgcctacagcatggatttgctggacaaagggatgattcacatcccaggtgggaccaagctagataacgtgagaattcatcacactattcagaatggtgtgcaatttaaaacttatgaattgtttatttctggaattttccatttaatatttttgtactagagttgaccatgagaaattgaaaccatggaaagcgaaactgcagataaggggagactgctgtgctagagtgctatagaggatttcatttggaaaaaaaaagttttggtcctggaaaaaaagtttaagaacatagtcgtattccatttcttcatatgtttgagatatttctggctttggtgaaacataggctaggaaaagaacctaacatcttattagtgtaactgaacaacagtaacagcagacttagcctttcttccttatgtgcaacattacctgtgacctgactcttgaaacatagctgctattaaagtacaagtgagtcatgcatagcagcttctccttgcccagttaatttctctgtaaaatctttactctcttttattcatgtatatatatgtatgtgtgtgtgtgtaaatatatacatatatatgtttgtatttccctttaaggatttcaaacacaaagaccctagtcatttgattgtctctgtactgtcgaattttgcctacaaccctgactgtagagacacattgttacctgttttccatattctgtctagtaaatgcttggttgtcaggacaacggcatagaaggtggaagctcattgataaccacgtgaattctttaaacaaatatgatcagagcaaattccagggtatgcttgaaagtagatttaaggaagagcaaaggtttcagacatatccttccttttataaacttgatattcatctttaaggatcagcaacagttggagttactcataattttatttaaaatcctgaataaagatatcaccttagttttatggtacgtttgtcattccagcttgttaggcatgagtgtgttgttactgacagagcccctggaggacaggcagacactgtggttctccatggtctctcagtaccaggcacagagcaagcacccaatacatattataggaataaatgatctcaaatcttcacagtgcctcttatagatggcttttatgatatatatctgcagagaaactgaattcagggattttaagtgccttttttgcaaggcccttaaagtttgggaaagtaggtgcatggaattagaactcagattatcctgacttctaagatcacactcttcattgtagcacactgccttcttgccaaaaaaaaaaaaaaaaaaaaaaaggaagaaacatgtaaaaagacagaccatttctaagatgaaatgtgtgcttttcaaaacaatagcagaaaaccttcttcaaaggtaaaatagttggaaatagaagaagaaataatatgtaatttagcgttcgttgaggataagcaattaatcctgccctccaggggtgaatttatgtctagcctatttgcacatgaaagtacaagttgggcttcatttctatgcaagtaagacatctggttgggaagtgaaaaattttgtcagttacctgaatcatgtttggtctacatgatagaaaagcccctgatgtcttcagatcaccagaagacatttggcattgtatagttaacaccagatccactgactgagtggttcacctgagagttgctgcttgacatcctgtagattcacccattgttaggaggctgttaccattttgtaagtcagcagtttgcaaacagtagtccagacgagaaaccaacgctggcccttgacaaagtgttcactggtgtgtgatgcaataaatacatgaggtcataaaaggaagtgtatttaccttaaaaaagaacatcctttattttgagatcctctgcttcctatgtttttagtgatacaattttgtgtcaaataaatcctcattgtaagatttggttttaattagtaaatgagacaggataaaaaattgagaaacctata

SEQ ID NO: 33973 - DNA, 652 bp, Homo sapiens
agtgctatgctaaaccacctgcctcttatggatatattatctacaaaaagagctctgccctcaaggcgattataatctaaattagaagagggaagcacaagggaaaaagccattatgtagagcagaatgatgtaattccaaaaaacatgctgttggattgtagaggaaagagtgattaattatgatctacccagggaaggctttttgcatgtggccttaggctaggtgagaacaaaatagggcaccagcaattatctagagaattgggtcactgtgggtgccaaagtggatgatgatttcaagctaaaaagactatgctctgaatagttcagaattggccgcccacactcctggaatctgttgaatttttgccaactcccttgttctctttgtgacttattgccctggcttagatgagcttcctactccaggtgggggaagatgcaggatggtgctgccatagcagggagtgctgacaacgtggaagaagccttccttgagtcaggagctctggattcaatctagactctgctcccacaactggttgactccagggaagccacctccttctctgggttcagttttctctactgtaaaatgtatacactgaagttgatggtctgtatgggccattcaaaatcccgtgtctctg

SEQ ID NO: 33974 - DNA, 879 bp, Homo sapiens
ccagcaacttgagaagccgaggcatgagaatcgcttgaacctgggaggcagaggttgtagtgagctgagattgtgccactgcactccatcctgggcaacagagcgagactctgtctcaaaaaaaaaattacacaagaaatgtagaccaattagaaattagagaaaaaagaaaaaaaggaaagaaaaaagaaatcactcataattcctccacccagagaaaacctattttctgtatttttttcccctaggaatgtatttttacaaatagttcatctactttcattgttgttgttcttacagctgttaaaagaaaacctttaggcaaattaaatttaacagtttaactgtgcaaagaatgattcatgaattgggcaggtccccaaccagaataggttcagagagacttttgctcagccacatggttgaagagaaattacggacagaaaaagggaagtgaggtacagaaaaatggaagtaaagtacagaaacagctggattgggtacagctctgcatcggccttatttgaacagagtttgaacagttggccgcctgtgggtggttgaagtatgtcttctgtgattggctgagactcagcttctagttacaagagtaggttacagtgtgtttacaaatccagttaagttacagtcactgtgtatgaagaaacctttaggctgaagttacaaacggacacctttaagttaaacttaatttaacaaaaggaagtcatatactgcatgttttgcagcctctatttttcacttggtttgactgttttaaatataaaaattattccccaagcttttctttacactgtgtgtttatcttcttttttatttatttatttttttgagacggagtctcattcttgttgccca

SEQ ID NO: 33975 - DNA, 488 bp, Homo sapiens
aggccatccaggcctctcaccaacaaaccctgacaactgtagtcacttcaaatgctgacctggcatggcctgcttgaaaccccacattctgactagtatgaggggtcagcactctgctttagagaaatacccctggactttcattcccaagggaggcctgggatgggaggataaagatcaaagaagcaagcaaaactcaacccatgcttttcccagttctggaaaaagaggaggaagggctttgtgggaataaaaatcaatgataaaagaacattttgttcttaaggtgctggttagtaagttctccagcagacagtcagaagataggagtagctttgtttgcactttgtgggggtggttctggccagggctcctgctgctgatatttttctagcttataaaaataacattaacttttttccaggtcttttcttggctccagcaccccaactgccctgaaaggcaataacaacctgatttctgtctca

SEQ ID NO: 33976 - DNA, 1492 bp, Homo sapiens
ttggcctcccaaagtgccgggattacaggcatgagccaacacacctggctttttttacttttaaatcatcatttcccttttagagatgggatgtcagaggcccaaaaaactcagttcatttgcgtgaggtcatgtaaatggtgatatctggaagtgtctccctcaaagtcagtgccctccctcacaggcactcattccctaaggcacctaggatgggcacagagaaaggagaaccaagcttggctggggctgctgtccagagaaggtgggcaggtgtcaagagcaggtgcagaggtggagaggagagctaaatcttgtcctcagtagaagcagagatgtcatttcaactgcaggttttgaaaaatgtcagtgcatacttcatgagattttctgaattcatttttactctcatcttctacactatttatctaagctgttgttctctttgaaactatgtcagccacatgtcattcattgtgccacaaccctgggctttttatcctgcttagggttttgttttgttttgcttgttttttctccccagctgctctgcctatcacttaattctctgagccctctggcctgagtcttatccggtggtgtgggtcaccttacaatcccgtttctagtctcctgggagtagtggtggcaggcgagggatagaatcaacatccaggttcagaatctatttgtcttttttggtcttattgtccgaagcttgagtcaaggataaattaatcagtctagaggtgggagagccctctaaccctccccagggaaaatcctagcctttatagaaacttggcctggttttggctctcagatttaattccaagctgtgaagaatctgtcaatgttcaactaaccctgacaaaacctttggaagtttctgttgcaaccgaaactcttatcacaggaggtggtactgagcttggcatcagaggttggagagagaagagagctagcctgctaattaatattttttttccttaaatttcaggcttttttttttagtttaaatgttctaaagaacctgtcctgtcacttcccatctgtttcctggtgttttcctcaagcatctcactggtttgttttatgtttttgaggggattatctggggtgctgattactttccctaccttcaaggagcctttgaataattttataaatgagaccatttgtctaggggcaagagaaggttgctgaaggcaacctagtcctgctttctcccaagagaaattgtacactaacatttgtttagtagtgcctatatcccaagtacaaggctcttgccttatacctaggatgagcaactattccagtttgccccaagataagctggggggtttccttgggtcctggaccttaaatagagtgtagacgaggagagttatcttttcttctgtctatcctaggttcatagctggggcccttttaacaaaagatagattaacaagagagaagcatacacatttatgtaatatgttttatg

SEQ ID NO: 33977 - DNA, 1261 bp, Homo sapiens
aattataacacaaatgcgagaactcaggatgtttttcttctatataaccttgtaagctttcaaaactgccacagcgtgataaattataggaaaatgtactcttaatcataacatttgcaaagtctcttttttattttacataaatatagtagggactcaatgcttgggtggaagtattgttggttggatgaatgggagagatgaagggagacagcatattaaataagagagctgttcatgaagttttaaatgttccttttttaacattctttttaaacattgcttgatatgaactatgtgtgttacatggagggttgggagacatttaattcattgagttagcctgtttttctgctatttgttttttagttcaacaaacatttattgagcaactgccatcagttgggcattgtgcaagtttcagggaaaacacagttgatgatgtcactgtttttttatgcctgtttcttcatctgctaatttttctccttaaacattttgaggattgcagaataaactgacactggtatggtcatatgaagggccccagcggtaccgagggctgcacttgtgtcaaattgtttcctgatgtacacatgcagcctgtgagttctctgtggatggcaaaatatgtttctccggaaagaagaaagctcctcccaccttttcttgcttttccctgcttatctctgaacctcttttctcggggatagcccatcaaagcactgtgtggccaaaggaaaaataagatgtcagctctccgactcatgtggtcttgcagtgaacatcagctatgcatggctgctgaattggggtggacattaggcagagtgtagagaacctcttgaggggaaatgaggccagtcctgcccaatatatataattttaggtaaggagatacctcagcttgtattttaggagaagcactgtgtatatactgagaatggctgaggaaggacctccatttgtaattcatttctctcattgtggggatgagagaaccagttcaaacttttaggccatttgtggcagaattggggctgaaactcttgtttttctaactcttagcccatggctctcactgagtttcatggtgaactagcacttccaagtatgttttcattatgtaagacaattataacatcataaagtgaggagtatagaaagaacataagctttggagtcagacagaacaaggtcaaatcctggcactgcttcttaaatccatgtggccttgggcaagttacctgaacactctgct

SEQ ID NO: 33978 - DNA, 3424 bp, Homo sapiens
cagcaacttgagagctgataggggattcaccaggttcactcacatctctggttcgcaaggggaggggcctgtgagtagttcctccctgctcacaactcagggagcttttggcagggtaggaaggcccgggaagtgaatggtgtttggaggcactgtcttcaaaaacgtcccaggtccatagagaaggcttgatggtcatagtcgcacacccatctgtatcattcctaggattcttcaacggcttgcagtgctctctcctgctggtgtcagcacagccctgtagtgtggcctggcatctgtccttcccctctggatggttgatgggaacctttattgtcccttccccacttatccagtttttagtccaggtctagtacatgcatagaggcttcacttgccatctacctgaattctaacagtagcagccatcatttctccagggcttactgtaggccaggaaatatgctaagcaccaagtgtgtgccctctcattaagcctcacaacacacctgtgtggtacatcttatcatcatccccattttacatttgggatgatccccatttgcatttgggaaccaaggcttaaagagtgtaagtgacttactggacacagagctagtggaaccaggaaataaactcaggtctgagcttctcccagcattcccaccccacctgacaccatgttggcaatgtcttaagtcctggcccagttgagagctggtattcctaaattctctggggtgtctgtgggaatttactcccctgccctttttctctgggtagctggaggaaagaattgagtggggaagtaatgggatgtagagagagtgtcttctcagacaagataggaaaagaaatctaggctttgggaaaataactcttatggcttgagtagaagacagtttttacaccacaagtttacctctgtaaagtttgctgccatctcccgattagcagactaatctatacattatagacctaagaatcctaaattatttctgttaatcttaaacctaccatgaaccctcaacctctgggcattggcatatggagggctcctccctgcctggtggactcctgctcacccttcagatgcctgtttaagcctcatctccaccgtaatctgtgatgaccgctaccccagaaatgtaagtgactcatcattcagtcacttaccatgtgctagatactggtctaaatgccagggattccgcagtagtcaaaacagagtccctaccctcaagtagcttaagtttttggaggggagacagacattaaacaagataagtaagtaaaatacaatgttggaaggtgggatgaagcagttaagggggtaaggagtgttgagggaagttgtaattttaaatctgatggccagggaaagctcagtaggaaggtgatgtttgcggaaacacttgaaggatgggccggcaattagcatgtgggcatctaggaggaagtgttccagacagggaacagcatgggtaagggccccgaggcacactcaggaagcagcaaggaggccaggactacgtggctggaaggagaagaggaggatatcagagagggagaagtggggccagatctgggagggagagccccttgtcagccactgtaagggctgtggcatgcaccctgagagaggggagaagcccctggagggatgaatcacaccctctcttgctatctcctttcccttagcacatctcagttagagaaccaaccccctccgtagccttcatctctctcatccatttccctctgaaacctgaatagcagggcacagtccgattcatctcagtattccctcggccagcagagcgcttaataaacatcagtggatctgaacttgaatcaaatggcaggtagcagcttgcagaagcctgaaaaacctgggcactgaggtctcgtgagttgatatatatggtgttggttcccttgggctcttggctactgcaccagcaggcacaggcagtgaaatcttttagaaccaaataatcccaaggaataaagaagggaggactgcagggagtcgggcggggggcctgctgctgccctgatgtcaggtgtttttgccactgcggctgcttgttggctcctcacactcccctggctctgctccctaaccaaggtgtggccttgtcctgcgcaggcatgcctgtggtcctgtcgcaagaggtggagtccgttcttgtgggtgctgctgttctgggtgcctgtgcctcaggggatttcgcttctgtacaggtatgtgaagaccagggggtgggctgtggctcctcccctgtctgaggccatccttcctcttgacagcagctcgcattttacaaaatacacacaggatataattaagaaatgataggttccagccagggaaagcacaaacacttctagcctcagacatatttattgcagttttcatttgacttggcctcggttcgtgttggtcgttctgtttttcagttgttttttttctttcttctttaaaataccttttaaattattccttttaaatttccccttgaccacttttctttgagcacatgaaacaggtaaggctcaaaacttcagtgtttcatgtgtatttcagatttttatttgcttatgtcaacctcaccattttctaaataccttgaaggcctctatcaacaagagacacaaatgaaactgtcagtatgaaataaaaaaggaattaaaagggaaaataaggaacaaagatataggaagaaggaaacaatttggtggctgtgattaaacacataatttggctcagagcttcctggcaggcaagacaaaaaagaacacatgataaattgcataattcttactttcaaaaagaggaaacatactagtttctggtgagagggaaaacttttcctcccaccaaattgcgaaagaccttgcacacatggggctttgtggagaggttttgagtgctaaaataatacaaggtaaacaatgaatgtggtatggaagctaagagcatacaggctctggcattagaccacctgggctcaaatcctagcttgattacctaccagctcttgtggcctaaacagtcttctctgtacttccactcctttatctgtaatagtaattgacagcgcatcgtgagttctgtgtgtcaagcatgctcatttagtccctgcaatagctctattatccccattttatagttgaggaacctgaggcataaagaagttaaataacttggcctaaatgaaacagctagtaaatgccagaatcaagaagtctggctcccacttctcaactgaacgttcaagagatatttgttcagcaaagcagcagagtccaaatgacttgcccatggtctcaagcttaggactacaagccaggtatctagtagctcagtaattagagctttgtttattgtgaacctcttatgttccagacactatgctag

SEQ ID NO: 33979 - DNA, 532 bp, Homo sapiens
ttgtattcttttgtttgtttgtaatacacataacataaaatttatcatcttaaccatttttaagtgtacggtttggtggtattaagttcattcacattattgtgcaaccatcaccaccatccatctccggaactcttttcatcttgcaaaactgaaactttacccgttaaacaataactctgcattgccccctcccccaacccctagcaaccaccattctactttctgtctctgtgaatttaactactctttagatacctcatataagtggaatcatacagcatttgtcttttgttgactggctaattgcatttagcataatgttctcaaggtttatccatgctgtagcacgtatcagaatttccttccttcttggttgtattcttaatgcaacatagcttgttctctgtgatctgctgattataaccatcgtcgctgtgaagactttggcgtgcttaacatttttgtgacttctttccagtgggggaaatagatagctcagttgtggacgatagcagcaatgggaagcagt

SEQ ID NO: 33980 - DNA, 2660 bp, Homo sapiens
ctgctctttgagctgtaattcactaatattatactggggtcatgtcgatgtggttttaaggtatggggaaggaaaagcattctataatcttttgattatatctgtcttttagtgggactatgtccctgagctatgaccttcatagatgttcttaggcccctactcctttaggtgagacagaaggcttgcaggcactagagttgaagagatgtccttcccctgtgtgcaataggcttttgtaaagtctcttcctcttaaaaggtctttattatggagaactctgtgttatggaaaaacactgtaaaaaatattttacagtgtttacgctttccctccccctgccagagccaagaggggatcattcttgactctttggattcctggaggtaaaaccgatgaaagtgtgggcccccttccactaagactgttaccctcaggagttgctcgctttcctattagtccacactcagcccccaacacttcaaattaccactgaagtgtccctaccagtttatgactccagcagctgctcctccaagtaagatctcagctgtgactgtctgggttgtcctttctcttcagatttcagggtgatagtttgtcctgtaacctcagttctcttatggatccaacaaaaatcactgatttgcagtttcttagcttttttttttttttttggagtaaggatgggataaatgacttagacagtttttacatgttggagctataaccacaagtctctacatgtctttaatgtacttgctgactttccctactggaatgtaagcttatgaaagcaggggccatgtctgttttattcatagctacagcttcagtagccagaatagcacctgactcaaagtaagcgggccaataaatagttgctaatagactaattaatctcttggcagtcattgagcatattgttataccaggcactgtgcttagtgtggaaagacatcaggtgcctacattattacagtggtgtgggggcagggcatggtggacatacaactaaaataacaataaaccacagatcagagaatagggaagttttaaagcactgaggacacatacctcatctagcccaagcaagagggaggtagaggtaaagcattgccagagaagaaaaccatcacctgagttgagttgtaaacaatgagtagctgttagcctgtatagtggagagggacccagccaaggagacagcacagacctgtcaaagtccatgtcggacaacatgcaaagtgatttacttaacccacctcatgaacgtttagtagcccacgcaaggcaggcccctgttaactcacaggtcaggaaactgagcctcagacagtttaagtgactcgacaaaatgtcaccaatgctgagtgatggagcaagtcggcttgaggccaaggtccattttctccctgctacaaagatgactaagcacgactcagagtctggtggaggagcagaacacataaacagtctttgatgatacccatgctcttttgaatttgctctattgttgttcattttctttaagatttcagccctagaagtagcaagctgaaaatcagggctgctttgcaaatgcccacaaaccactgaggggagttttgtcaaagaaggcgggaaagaaaaataaatgtgggcttctgctctttaaacctcagcccagtgaggcagactttcccggaatacttcaggcctcttcaaaggcctattgtggaaagtgtccagatgtgcgtggaaaacctcactgggaagcttcccggtgaagaggccttttaagcatgaaccgagatgaaggaagctgacgccatgagtcctatcaggtggccttttttctgaaggagcccagattttcccctaaccttaagaaggttgtagggggttgggtgattagccagttcgtattcctttgattacaggaagcagtggggttagttgttttttgttgttgtctttcctttttttgctgaagtgagaagaggagatgggggtggggggcattctccatatgatttatctacctgtaagttgttagtgacagtctggtcattcctccagcataccttgtgagggccaggagggatttctggattggataaagttgaggcactgagtaagtcctgctagtttctatgatgatgcctctgagtgttctaagagtcagaatcccctggaatctggctctgatcccctgctccgaatccctgtttaagctctcttcccaatgccctgtttatcctaggtttgaggccccatcttcctcttgctagatacagttaagccagagagacccagatttaaatcctgctctctcattagctgtgtcatcttgcacagagtagcatcagcctcaccgagcctcagtttcctcatctgtaaaatggaggtaataccagtcccgtcatcatccagttgctgtgaggattaaatgaattgctgagttgccgcacacaaagcatctggtccagttcctggcacagagtgagggttcagtttattttcattccttttctctttaatccagttgtacaaagaggcagagctgtcccatttgaccagagaattttacttctgtagctctttaaattctctccccgccatgtacatatgggcttagctaagtattttgagatcacagtgtatttaggggaaagtcc

SEQ ID NO: 33981 - DNA, 1555 bp, Homo sapiens
agtagctgggattacagtcatgtgccaccacccccggctaatctttgtatttttagtagagaatgggtttcgccatcttggcctggcgggtctcgaactcctgacctcaggtgatccacccgcctcagcctcccaaagtgctaggattacaggcgtgagccacctcgcccagccggtaggatctatttctgaagacaatgtggaagcagagtgtgggccctccacaggtgtagcgaggcggcgtgctaccgcgaagaaggagggaagacgcctgagcccagccggtgccctgctgcccctctgcctcttcggccactggggctgagcttcagccttaccaatccccgccgcgcacgcgcgctcgcttcccgcgcgcaacctcccacccccgccctcactgcacctgccaggtcataaacctcttcccacccactctcactctctacccaaggctcaggcttgtctcacgttgattggccagagcccacgagggcacgtccaatcagcaatcccccctgcgcaacctatcccggttcttcccgcccccgccccgccccgcccgcccccccgggtacctaccgtctctgtgactggtgcgcggccaggtcactcagggcggcggggcgaggtgtgcgggagtgggcaggacgggtgggaggaggggaggggtgggagaaggcggggctcaggtgcctggcagcgcggccggggcccaggaaggggagggggcgaacgctggagcgaggcgggggcgggtgaggagggggtgacgccggacgcgtcgacagcgcgagggttcgcgcgtgagctgcgcgggtcgggcctggtaccgagctttcctgggggctagcaggtcgtggacgccggctcctggaggagagccggtaggagggagtgtgaaggtgtccgcggcgtcgtcgacggcggcgccggccatggaggagacgcagccgccgccgcagcctaagctgcccctgtgcgacagcctcatgatctgggtgagtgcgaggaggcgagagggcgagggggccagggggccgaggcgaggagcctggggcgcccggttctcccaggtgagctggggctacctgcacagggtcccggcgcaccctgcccttctcacctcgtgcccttgaccgagagaatgccacctgcgggtcgacgggcaggtgtgtgggcgcgggttggtgtccgggggtgggggtaaaggaagctctgggagcgtaacagtggaggctctggtctcaaccagaggattcgacctgcctggtgccctaacagctgggatatgaaccaagcacccatcctcttttctccccgctgccccattttctccccctgaacagcgcccgagccctccactttctggatcgccgactctcttgccttggtccgcttgggcgtgaagaccctttccgaaacctaaccctgcatcctcaaactaccttgctctacctggacacaggtggccaggaggtggctggctgttttagttcccggaccaatgctccttcaggactctagaacatccgattttgtagaagccgcttcaaag

SEQ ID NO: 33982 - DNA, 913 bp, Homo sapiens
actggctgtttctgttgacttcttttttttttttcaccctgtgtataggctattctgtttgtgtattttgtatttttgttgaaaatctgacatttaaaataatataaaatttcaaatctggaaatcagactttttccattcttagggtttattgttgttgctgtttgtttttttaagtgactttttgggactaattctgtaaagcccacattctttatgttgtgtagccactgaagtctctgctcagttaccacagtggttagttcatgattggtcagagattaccataggtgccttgagtctttggtaaaggctgtgacagtatgtgtgttataaaacaccttcagtgcttaggcagtttgaaattctgcctttgccttcctgtttgctcagggcctcatgtttatccagtgctgagacaatgcgggccctctcatgtcttttctgggcatgtgcacagccctgtacttggctgaccttcgagatctccgggaacatgtcagagctttttaaagattcctatgggcatcttatttctcagatctttcttgcaaatttttggccaggctcttgtgtaccatagccattatcacagccttcagtacctgtggtggcaaacagttgctgatgattctatttgccaaatgtctcggaaatatttcctgcagagcaagcagtgactcaggtcaaatcatgaagagtccctacaaatgggatttaggaagctgcaagacaggttaaacagtgacaattctctgtggatggggctttttaagggagccccatatccatccagtctgtgcccattctggtggctgctagagctgctggttttcacagctacagcaattgaaaggctgcttgttttcaaggttactgcagagctggggagacgggaatcatagttagaaaa

SEQ ID NO: 33983 - DNA, 835 bp, Homo sapiens
gaatttctcttatgaacaacaattctcatatctcttcattcacctttttctttccaatttgaaactcactgattctaccaaccattcctcatgatactctgtcatctttaccatcatcttctggaaacttcaatttgtccaatgttgctcttaatgttaatgatcccttccttacctgcacaacatatagcgagtctcctcctctgaggagaaaacaatacttctataaatgtcataccaataaggtgaaataagagggaaagaaatccaccattctttccactccagaagtaggacccaattcctgatgtgtaaagatgacagtattgatgcagtgatatgtgttaaccagaggggtaactgtgttaaaggtcacgcatcccatttggtttcttcctcacctctggcctataatgttggaaagtgaaaggtacaaaacagaagggaaggcaaagtccaactcaggccttaataaagttggcctttaaactctggcatccaactcagctttacttgtgttctctatgagggctgcgaaaatggtaggtcattgggtctaggcccaactaatgatagaacagagctttgaggattaactgctatgttccccctttgtgtatacctccaaataacagtaaagggtaggggatgggggatgaaagggctgtatttgggcattcacaggacctcaaaccaaatgctattaacccttgtctttatctctaattgcatcatcaatcctgagttaatgctaccctacattttctgaaatattgcccctatttttactcctgtagcaggctgagtaatgacccgcaaagatatccattcacat

SEQ ID NO: 33984 - DNA, 1551 bp, Homo sapiens
ggaaggaggttgaagctggagggctcagttagtgtagtgggaataactcagttgagaaatgatcaagattgaggtagtattatcaccattttatgtatgggaaatgaagtttctcagaaagaaagtatagcatttttaaggacaatcatataaaagagggcaaggtaatcacattacaagtaaggtgttccagtaatgtttaacatgacaacatgcaaatagtaaacatttaataatattccatccctagaaagtgcaggtggaatcatgccagttaatgggttaggaaatgaaactcaaagtgggttttaccaggttaccagcgttagccacacctcttcctgcccttcatcccccaccccacccacgttgccggaacgtcccttgtgctgcagaacagagttagggtcaggacacgctaggcaccttctcccactcctaccagctgaacctccaggtgcgactgctcgaagtccacaaggaagaagttgccaaggaagggcaggcgccagggccccggcgggtagttctttgggcgccgtcttttgagaaagtcagcagcgagcagaaaggcgacagtgcccagtaggagagtccgaggatggaccactgcccagagggcagccgccagagagcccatcgccgcgagcatggctcagacgtcctcctgctcttctgcggtccaagcaggcggcggtcccagcaggcgacggtccccgccccgcctcgctcccagccgtgccccgcctcccagcccgccccttcgcagcaccctgcgaagatgccaggcgctggattcccgggaggacacgcaccggtctcagaaaaggccaggctaggagcagtttcttttctatttagaaagctcatgggtttactgagagcgccacagacatttgagcctctgttcggttcaatcaccgtctctcctatgattggaactgtgcctggtaaacagcgataacaacagcagtacctaacatttcttgggctcttactatatgccaggcagcacatccgcctctttacatagattattatttcattttgacaaaattatgaaggagaagctctcggtagtctcatcttgctgttgaggaaacagaaaagttaagtactaagtatgtggtgaacaaataaatccacccttctgaaacacatctaaacgaggtcctgtatttgaaagtgtctggaagattaaaaggcactacaccaaagctgctagcactgagcagcagccataataagtgcttaattaacatttgttgaaggaatgtcttagttccgatccttgctggtttgctctattaggctcctctccaaagccccaagactgtgggacctccaggttccagcctttcataccatctggtgagtgcctgcttgggtttcacaaatggtgagactgaaaacatgaaacatagctcaggaatagtatagtacacactcatgtactcaacatagagtcacatattctgcttacaatattttattttatttctttatttttgagacagagtcttgctctgtcgcccaggctggagttcagct

SEQ ID NO: 33985 - DNA, 2248 bp, Homo sapiens
tgaggtgatgaatatgataagcagcttgatatcagtaatcacttcataatgtatacctatatcaaagcatcacattgttcaccttgaatatatacaaattttatttaccaattatatttcaataaagcagaaaaacataaaagataacccaaaagaaaagaaaagagaaatagttatatatctagcaaaacatgtaaaaatagatattaagtaaactacaaaactctgatgaaagaaatcataggaggtgtaaataagtgaagagatattccacgtacatgggtagaaagactcaatatcatcaggatgtcagtctgatatcatcttttcagcctggaaaaactttacttcttctatgtgatggagttttgctcttgtcacccaggctgaagtgcaatggcacgatcttggctcactgcaacctccttctcccaggttcaagtgattcttctgcctcagcctcctgagtagctgggattactggtgcctgccaccatgcctggctaatttttttgtgtttttagtacaaaaaaaagtttggctaggcttgtcttgaactcctgacctcaggtgatccacctgcctcagcctcccaaagtgctggattacaggcgtgagccactgcgtctggcccagaatatactctcttacacttgagatgtgaatattaatccaccacttacctatgtgctgaatgtcataatgggcctttttacagtaactatttcactaaattcttagaacagacttcagatgtaggtgctattgtcttaatttttaagattaggaaactgaagtttgtgtatttgaaatcatttgttcaagtttaaaatgccagtgagtggcaaagcaaaaaatcaaacccatctgtgcttgacagcagaatttgtgttgttttcctaaactataaaatcaggagtgaattcctttaccctgcgtcacacgtgaacacctctgcttagtctcccaaaactccataatcatgccacacttgctcttccgcctagccctctgattgaatcatcaattattttgaaccatgcactttagccccagtgactccaccctttcatctgaataaatattttttcccttaaacacatgcaccttggatttccttggggtgccgtctctagtccttctattaatctaaatcctgttcatcttcaatttaggtcctacttcctccaggacattaggtatttttgtaccttgctctatgttgattatttacttttgtttttttcccctgctgtctctgcctagaataaatattgaaattctgcacaaacatcaagggccaggtcaaaggctcactgtcccacgacatgggatcagatattccctgatggagtgatatctggaaccagttttcaaaggaattgttaactggccagtgaggtgtcaagcagattacatactaactttaggaataaatgttcagttattatgggcacatatcataaatacaaattgatttctactcagagtaactcaggttacttattggtttataaaaagcaatgagagtactgaatattagctcaggcatagggtaagctgctgtagcaatgatcccaaatgcatgtgattcaaacaggattaaaatttatctctgacagaacattccagagattggcagctggtcctgccaccagacaggtggttctgttccacgaaccctccagggttccagttgctttccatcttgttacctctccatttcctatgatggagtctttatccccaaatgcatatctggttcaacagcacaacagccatattctagtctattggaagaaaaacattaaaatggcaagcatctattttttgaaagccatgatctgaaaattgtcttcatcacttacactcatatcccattgtccagaatctggtaataatggctatggctagttggcaaggtagactggcaaatgtagtttctagctagcagccatgtgtctattaaaacccaaggcattctattactaaaagaaaaaaaaaaaggaaaatcgatatttaagggagtaattagtgttagccataggctgtgtgccaagctcattgggaactaacttaaacacagttaggaatcttcttctttgggttaaatctgcttagcgttctataattttcttgttctatataaccttcttggatattgatctctttctctaggtttggggagctctttgttattatccctttgaataaagtttctacccctatctctttctctatctcatct

SEQ ID NO: 33986 - DNA, 1507 bp, Homo sapiens
agcagattggatattaaaatggtcaagaaaggatttgattgaaaatcactaatttcgaccaactgatacctttgtcaacaaacattcattgaacttctactatgtaatatgctcttgggccccaaggaggttaaaaagcaaacaaacaaataaacaaaacccaaaactaaagaaaaaaccaaccattcatcgaagttcatcgacatgggatcctccacatgcccttgcttctgccattccctgacatgtgcttttagaatcaagcacagggcatgaaacatatttggtagatacacaatagaagtatatgtacacaatagaaatgtatttggtttatacacaatagaagtacataatttttcccttttaatctaatacataaatgaatgcctcacttaagatataatctagagcagagctacccgatagaacttctctgtgataaaaaaaaaaaatgttccactttggtgctgtccaacaagggagtaactggctacacagggctattgagaacttgaaacaatgcaattgaggactgaattttaaattctactgaatatttaatacaaatttaaatttaaacagccgcattttattagtggctgctgtactgaacagtacaagtctagagagaagtgttttataaatagcaaataaaactctttctccctgtcttcataacactccacagttgctgaagctcttttccaaccagtctaattgctatgtttgagctataatgtggactgaggttctaggaaatctccaatcactcctatcctgttgttccacgtttaaagttctgtttaatccatctttacttatctctgtcctgaaatggtgaaatgggggtagcagaagatgatttcccaattgtaatcattgtgatttcttgcatgtatttacacctgctgctattaaaataccactgccttatttagtagcccctgtagtcattctaactaatcacaaaaaggcttggttagcctttaagtatgctcagacatagttgctgggtgactaggcaaatgaacaaaaagttcagaagttcaaaacaaaaagttcaaagccttttcaaagtaagcatcataacattatgcaacctcaaactgcccaccattgacacatctcagggtcagaacctatattgcactgaagcaagcctcaaaaaatctaaggaaaagatattatgtatctagtttttctagtcttattaaactattttgtggttctctgcatattccacatttttccatgtgactacttctgtgcaaattctgtttctctaggcagggatacccctcatctccttggttgactgacagacttcagttcgggttgtgcttcaagaaccagcacaaatggcacctcctttattcagttatttacctgaactcccacaatagagtgaaatttgcacataccttaatcagaacaaatggatttctgtagatattccttggatttgttatggatttatgcttgtgcatcatgagcctattgaagg

SEQ ID NO: 33987 - DNA, 1198 bp, Homo sapiens
ataaatgcatatgtgtcattctattttctctgcactggagtttgtagagagagagagttcaaaagcattagaggaactgagtccacgttactgaggtcagtcaataagcttcatacaataaatttgaatgaataaaaggaagaacaagataattgagaagatctcactggaaaaatgtatattcagatagaaaaatcgttgtagaattgctaggtatcacccttaaaatagtgttttaagcaccaaaatttttaaaaagtattatctttaggggttgtggctaaatttacttttcaacacctctactaagctctaggcctgcctgagagtagctgaacagtagcagtatggtcaatatgcacccacaccaagcagtgctcacatgattataaatttagaattgtgcaatgaagtaccacggtattacaagaataatgacaataggggctcacatttaagagcccccttcctgtgtgccacaaatgtgctaactgattacatattaccatgtttgatcttcaaaataattctatgagttagatatcaatattcctatctataatcagggaaaacaacgctaagcaacataccacagctcataaagctgaaagcagcaaagtcagtatttgaccccagattgactgactatgaaccctgtgttcttttgcatatgccaaagtaaacacatctgtaaatattatgggactggattacgagaactctaggaccttctgactttctatgtttctgtggcccgacagtgtgaaaagctcctgctagttaaacgctaccccagatcatcgtttttcttctttcctcttttcattcttttctgtttctcttctgtttgagagttccagtgggctaattggaaagatcttgcataaatacagtaaaagtcattatgaggttatccaaaggacaaaatggggagggaaggtatggtacaagtggaaaattgttgtaagtttgaattacaacgtggttggatctgctcagggcttagcagaggaagacattatattgctaggacattgctaggttttactttaagtttactttaaattctaagatacaaagaaggctttaacttaaaaatggaagataaatatttcacaaatatgttcttatatctcataatttgaaagattaatctctgaagaaactatggagaatactgatcatcatcatcgtaaga

SEQ ID NO: 33988 - DNA, 736 bp, Homo sapiens
gacattattcaaaagacttgataaataatgattctcaatcatttgggacatgaaatcagtaaatgagggcagacctgtaaaaccaggacaagagagtgaatttccggagtggtttcctgtcgagaggcacgcagacagcgagtgtgttcttacacatacacacaatgcatctacggccgcagcatttgttctaattccctgagctgcagtgagctctggattccagcaggggacatccatagcccagacaagggaaactggggccagctcagccttagaggtgatgaatgaaaatgataaatcactcagacatgagcctgagactggcctgttctgatactcattccataaagacgaaagttctggaagggatgaccctcacaggcttcgttagctctgagtttgtagaatgtcaatgaatttcaagttctcttaatcctgaatttgcaagctgaggtcccgtggagttttgtccatgttaaagggacataattcctttctccccagggcagatcaaaggaaccaggttttgatgacttacagctcacacaaggtcatcctgggaaaacagatcctgagaagtactgcagagcttgtgaagtactgcactggctggtgtctggattctagagtttatgatctgctccaaagccagagaggtgatgactagaaggtagatatgaattggggacagtggtgtgctgataaatatttaacaaccagctccctgggggaa

SEQ ID NO: 33989 - DNA, 2390 bp, Homo sapiens
cgaaaggatcagagagtaaatattttaggctttatgggatatatggtcttgtcacaactattcaactgtgctctcgtagtggagaaaaaaggcaataagtaaatgaatgagcatggctatgttccaataaaactttatttaaaagatcaggcatggacaaagatttgacctgtaggccatagttgccaaccccagatctaatgtatggtgctgggtatgagaaaagtgcctagcggtagcccttatgtacagatgatctctaaagcctggatttagttggagcactttgccaatgttcttgaacaagtactatattttatatgattttgacaacacaaaataagaaagcaggattagataggcaagttcaaattgaggataaaagctgatattgctctttctgcatattatgagctgtggattagcactgtattagaaaaaagtttgaaactgggaggtgatgtactacttagacatgctgctccttagttatgtggctcaggcaagctacttatcttttttaagtccaagtattttttttccattaagtctacataataatataacatatcttactggcttcttgtgatgataaatgatacaataagtgaaagacacaacatagtccctaacagagcaaatactctaaagtcataattagatgcagatacaattgtacacttaaatatggaaggacataattattggtatatgaagggacataggaataaatatagacatggatgaatggtgaaatcataagctagctcctggtcactgcaagtgttcaagtggagactgaagagtcattatttacaaaagaacaagttgtaccaggaaatgctctgagtttctaattttaaatttgcaacgtaatgacagagtcaggatgcttacccactgttggatactttcaattaagttttcatgtcagggctaggttggatattttgcatcatatggaggcaacactctgcaggaagaagcatggacttcagcatcaaacacacatgagcttgaactttcagctctactattctactatctgttggcattaagcctgttgattcacctattttaattattcaaacggggtcaatatccctaaaaggactaaattaggtaataaagtaactggcacatagtagataatgacactttccttcccagcattttttttttttattctgaataccccctgtacactctaaataaggttctcaccttaggttttcctcttcatccttccattttcttcatcaggagcaaaattaagtttctatcaagtgctcactgacattaccctggcatctgaactatccaatgtgacatacacaaaactttaatgtgtagacatgctaatcagaagggaaatgtcaaatctgcatacatttcaaatgacccaacaatatttaccttagagctacgtctcctatttttctgacaattgcctcattgaggaagtgactcatgcagcataccaagccccattccatctgagaactttacctccgactggtttgaaagcatcaaaaagatgaatgtcactgccttgcagttagtaaggaggctaatttgatttgacaaatgatgctgattttgaaggggtcactaatcattagaactaccgaggacaaagagtgccttgaagctggataaaaattgaatatttaaacagtttgttatgcaaatttactttctacctgtcaggagtgtgtaaagcacagggttagagagtttgtggtaaggccatccctaggctgatgacttctctgcacagtctgtcctcaccacccagaggtctagtggcccaaagcccttggatctgcaactcctgctcacccaggtggagggtgaggtgagcacagctccacaaggagttcagagcctccacttctcaatctctcactatcccttctccatggccatcaaaaaaatgaagagtgagctgagttaaaatccagttcacccgaaatgccaacttccagattagcaaataacccctcatggccccaaaagagagaaatccggagctttatgaaggctacactgacattctcaaggaacctcagcattttgaagcaacagggcctccttcttgtctctagtatctacagaaaagcctttgtctccatagctactcattctccattttaattagaggctttattttgttttgtttgttttgttttgaagttttattataagttcaggggtacatgtgcaggtttgttttataggtaaacttgcatcatgggggtttgttgtacagattatttcattaccgagatattaagcctagtactcattagttatttttccttatcctcttcctcctcccaccctccatcctcaggtaggcctcagtgtgtgtcgtttccctctatatg

SEQ ID NO: 33990 - DNA, 1212 bp, Homo sapiens
gggcccataaggattgaggagctcttccatggttgtgattacaggagtcttcggtaggaatgtggactgctggggatctctagttacttttgccccacactggggagcctttccaagcttcctgccaatccttgtatagcaaactgcctcactttcctcttcttccttgccttaggtgttttctgtcacttctctgttgaattccagtgttctctcttagatgatctattcaaagtgtgattatctactcactgttttggttttttgtggaagagggaggtgccagatgcctctattcagccctcttgagcccctcactctaacacattatttcaaatgatgaaagtatttagctttttaaaaatatacataaaagttctattttcttcccacaccccaatggattgccttgcatccacagttttgagacctttggactggccaagtgctgttcaaagtatggttcacaaaccagcagcatcagcatcatgtgggatcttgttagaggtacaagttcatggcgctgccccagatataatgaatcacaatttctggggtttgggcaatgagtggtttaataagctcttcacataattctatggacaatgaactttgagaaccactgatggctaaatccacaggtggggcaaggtgaccttggctctaagacaaggactgatgtaataaaagcacaatcacaagataaagctgagccaagggtgactctgagatactggaattccccactgaaattaactgcttttaataaacaaaattgggccaacaatgatcacattattattcagaatagtgttaacctaatgtcattatgatgctgttttgttgacatgacatcatcaaggaaaattattgatttctacgagattcaagaaatttacctgactaggtgaaacaatggtctagttttcccctagttgagggtaaccccaggacacaggactttcagtactaacccaggaaagtctaggaaaatcagaatagctggtaatcttacctacattccattatgaaaatgtttgatgtctttaagaaatcaacttcttttctttgttcctgtcaactaataacctctacataaggtgggcatggataggacaaaagaaccctagacttgcagatctggttctggctgtcatttaacagcagtgtgatatgtagcaagtcaattaatctctgtgaacctctgattat

SEQ ID NO: 33991 - DNA, 622 bp, Homo sapiens
ctaacgtttctaaagctcttattgttttccaggtatgtcctaggtgttttatatgtattgtttatcgcattgtgtcttcaaacactataggtacaattattaccctccgtgaagaggtgaagaaactgtggcatagagaggttaaatgaccaacccactcacagttacataataagtggcagatccaggatgcaaacccaggcattatttcggtattcagttcacgcttttaacctacagagcagtagagccaattcactgtgtacattctgggtcaagcactgtgcttagggcgagaagtgcaaaggtaaataggtcactaaccctggatcatggagttcacaaatcagcagaggaaaaacatggtcaatataaagtttgcctgtggagggtgttgcaatgcaggaataccaatgatagatgttttccctgggaaactagaagacatcacaggaaaggtgaacttcaggatagatcttgaagcacaagcagaaatttgctagagcataagagggaagagcagtggaggcatgacctattgtaaaccaatcccgtaagatacaaatatgttttgacaatatcagttaatgactttacatattttcctccaataatgtcatct

SEQ ID NO: 33992 - DNA, 863 bp, Homo sapiens
ctggcgaatggaattacaaaacagggcatggtcggtttcactgtatgatctgcagaaagagttctcttttccccttcctggaccaatggtggtatcattttggcaagttttaggaattcggaggactgagagactgttaaaagtgagctaccgcaggattctatccggctgcttcttgggatgcagtatgtccatcctaaggactgttgagttaaagtggttgtgggtatgtgtgtacatgtgtgttttaacttgtaatttcttaactagacattagaaactttaccagtaatttcaggacaatgttgcatgcagcttttggctaattagactaacagtagactatccactttgaccctgaacttttgttcagggcacttattttcccattagagttcttgccagcaagaacaaggtttacttgtgtatgctatgatgttacctattgcttcactttatacagcttgttaaacattagaaatgaatatactgattggtttagcaatgattttctaagttgtaagctttttttgaaaaaactgcacgctgatgtcatattctgggtgaaacattttacttccttgtatttcaacagctcatagattttatagactgttactttttatggcaaattgtgtcatctctctcttttttttttcttgcaaagatcaccaaatgcttctctttttttaacttggaaaactgtaatttcttttttgtaaagtttacttggaagttgcttttcatttaaaattattttacagatgttttaccgccgggaatataacatataaaagtggtggaaacatttagcaatgcagttgcctaaaaataaacaatgttgaaagctcacatgctgctgt

SEQ ID NO: 33993 - DNA, 1296 bp, Homo sapiens
aatgaggggaagttgccgtgcaccgtacattagtggcaggtgcacactatcaagcttcattttcatcgaagaccttcatttttccattttaaagtattctgcacaagtgctggaaaattaattagtcgttctcaattgaacaacgcctgcagacgtgttctttagcagttaggcgggggcacggcttcaggtaggggccactcctcctcctcacccggacggctgcaaggaaccctcattctgtgcaaagccagggcgcaatcctgtgcagtaaacctcccctcgcgaagagggaagcggggttcgctgttgcaccccaggccgagcgccctaggggagagggcgccgcagcgagtcccgagatccgagcccggcctcgacgccggagcgctcccggagctggtccttgcccgaagcgcattaaaacggcgccctctggtgtcagctcgcggcggccgggtaaaagcagtggcgctgggggtagagttctactcgccaccctgttcgcaaactgaaagatccccgagtttagaaagtgtcttgccgctctgcggacgctgtgtccgcggccccgctgtcgcgcagagctgggctgcgatcagaaagtccggctcccctggccccagacagtggctcccgggggaaccagcgtggagggtgaggagggacctggccttcgaaggcaggaaggacagaacccccaagccacgacggcagcggggcgcggggacggccgggctccagccacagaggcccgaactcggcccgcactgcccggcggcaggccgcgaaggagccccgggtagtgggggcggcaggaaggagaggcgcgcagggccttcggggcctccccaagccccgggctcccgtctgggctttgtgggttggcggtgtctgaatcgccgacgggccgagccgtgccgggaaggcgcgcggccccgcgcgggcacctggccgaggccgccccgcgctgccattgaaatgtgacactgatgaacgagctaggcccgcggctttctttgggagagttggaagtcgccagccgcgagatctggggctctcaggttccctgggaaacgttctccccgcaccccactgcctccaccttcggcactattgctatcctctcccatttccccccaacacacacacacacacacacacacacacacacacacacacacccctcacgcgttttcgagtgccagaccaagagtcttaagttcagctccaggaagacagggtagtggcgggaaagaacattctgacgacggggaagtttgagttggttggggc

SEQ ID NO: 33994 - DNA, 1982 bp, Homo sapiens
attctcaaggaaacgtagtgcatcccatgaaaatagcctggagtcgagatactggagtcaaagtgcagccaaaattgtcagggtgcaacctgcctgtccaatcagagctgctacttctttgatactggaatcccccaattcctgaaattaacacccagttctccactccccaaaagcacacgctgagtgccctcagggctcttgctgttgccaacggacctataactcggtacaggctcaggcagctgagaggaggctgtggacacaacaggccttgctaggcttgctgggacggggccacattactttgcaggcgcgtctttctcctgcctgctatctagagctcgcctgtaggtggcgccctgcttcgctcaggggaatttggagggcgaggacacgggtcaccagctgcctcccctgaaggccaatttaagttgtcccctggcttgaactgagcgcaggaacctcggtgatggggacatgcccccctccccgcgcgctcttcctctcccagcccccctgccctcccctctccaggggctggcgggcccgcgcttcctccgaggtcgggctacgcggcgcgatctccaagcgctggggccgagcttggcgctccggggcggcgcttcggtccccgaccctcgggccggcccgctggcccccactccgcttcctcccggcacccgcttcgccggcagctgtagcggaggtggagggatgggggactgtgacccccgtgagtgccggcggggcggggcagctttaaaaacttctgaaaggcctggttcaaagcctcaaaggatagaacttgggccggaaggcggtttccacggaggggcctaaaagggggctgggggtgcacctgcagggccaggagctgcggcttgggaaggggggcccggtcaccgcgagcgccgcagtccccgccccgcactcgccgccccttggagccgccgcggccccgcccgggccctgcgctttcatcctccccacgggacagcggccgcgcggggcgggggcggctctggccggcgcgctcccggcggggtcttccttccctccggcccctccctgggaacccgagatttcgccgcagagctgaactcccagattttaaccccaacccccccgggcgggaggccgcggagaaccgggagtcgcgaccgaggaagcgtccccagtcacctcctagccccccacacagagccccggggagggtgaggaggaggaagagcgggaggaagacccgcgccggtgggtgggggcagggagggggcgtccggggtcgcagggcggcgctccggagagtggccccggcggcgtccggagtcgctgcggccgccgtgccacctcgggcaggtgggggggggaatgcgcggccgccgccaaccagggtcgctccgccgtagacgccgagcagacgcggtccggcgctcggccggagagccggctaaggggcttttcattagcaccgcattaggaggacactcatcctccagagtccttcccgtggaagctcttgagtgaattaggtaaatgatttgctccatttgtagtttctgaagatattttctcagatcttcaatcgagcgctttagccggggagcatatctgtgggggcctccttcccactacctagggtctcactcggtgacaattgctgagtcagtgaggacgtgtggggaaaggtaaaagtggaattgagcaaagctgagtaatttagctaaggaagagaaatcgctactgaaaatagaatagtttaaaaataaactacataaagtttattcttttgcttggagtcctgctccttgatccgagaaggtaaaatccatcagagttgggagttccctcccccccattagcatttattacactttttcaaagttactgaaagacttcttttagtgaattttaagaagcaatcgtggttgacattacaggcatcaaaggtttggggaacagatgggtaaacttccgaagag

SEQ ID NO: 33995 - DNA, 970 bp, Homo sapiens
taatcctccctccaggaggaaaaaaaaaaaaaacaagaaaacattgaacttgctaccttcattataagccaccctagaagaagctgagaggacaggctgctgaactggtggaccacgaattaatgtggagaacgaggccgtccgggctaggttcccggggctcaaagacgcaaagggaaggcgacaaaggtttctcacaggtcgccgttagggagagggggcagcgcaggaaacccgtttatttaaagttcagttgtgttgggcatctgatccaggacaactcgcccaggagcccggcgggtttcagctgccaccacgaaagtaaggatcggttctgccgcgtcgccccctccttccccttgggatgtgccaggcgggcgacagataagggggcgcggcgcggggtcagccaccgagccagagggcggcgcccggttgcagcgctccacagccgcctcctgcagcctcgcggtcgtgaccttgccgagcagctcctgcgcctcaggctcggtccctgcacccgccctcactccagtccctctcagggcctgcagtggaagatccccgtggtccgggtgggtggcgatggagagcagaattgaatttatttgctctcaaattcccctaaaagctctgaaactgggaaagtccgcgggctgccagggacagtaatcactgtgtccccacccggacgcaggaggtctcgggaggagctccgaggccaagcgcccgcgacttctgggtgccaggttgctgcagacgagaaatgaagcccgccagatttgggctcccgaaattttttgaagtatgagtaccttagatttcccttctgatacagcgcctctttcgaaggggtgtgtgcgagtgtgatagtgaagatggggtggggagttcttgcctgctaaaaagtctcaccctggccccacaagcgagcaagggggagacaggcaggtggaggagaaggtagcac

SEQ ID NO: 33996 - DNA, 1463 bp, Homo sapiens
ttttaaaaaagggaattttagtttgcttgcaaatgatccgagtctgtagagtctttacagactctgcgttaacctcagtcaattccactctaggacgtgctagtctcacagtctagttttgttcagactttattttgcgccaagctgcattacagaccacttgtccaggctgcaaaaggttggggtagggggttggggtgacgggcgcttcccccccgcttcatatacgtgaagcaatctggaatcattccacttggctctgacgcgcgcgcgcgcacacacacacgcgcgcgcacacacacactctcacacacacgtgtaccgtgcatgtgtgggcgcctatggatctgtgtatgcgcgcgtttgtgatttaaagtgacaggaccaagaactggctgaagcagagaattgttttgcgtgataaatcaacttgattgtctccacactgtacttccattattcacccgagtgctcggtggttacggcggacgtgcactgcggcaaaaatgtcctcggagccgctaattttgtggccactgcggcggctgcggcggctgcggcagcggaggcgcgggggcgcgagcacgggttgatttttcaagatctatctcctttagtgcaactcgccaaatggaatcgagttgacagcagaagcctcacaggatgcgtgtggattgggttttgtgcctgtgattttttaaaaaaatatattttttatttgtggagaggagccgagctgttggcgcaagaagggaaatataccttttctgttttatttcccctttattcccttaaaaaaaaaatgaaaatggccaccaccgtttcctgagctttcaggaggccagacctttgcagatggggaggtgacacttttttttttttttttttagacggagtttcgctcttgtcgcccaggctggactgcaatggcgcgatctcggctcactgcaacctcgcctcccgggtacaagcgattctcctgcctcagcctcccgagtagctgagatcacaggcgccggccaccacgtctggctaactttagtagagacggggtttcaccatgtgggtcaggctggtcgcgaactcctgacctcaggtgatccactcgcctcggcctcccaaagtgttgggattacaggcgtgagccacagcgcctggccggaagtgacacttttaatctgtttcttacctctgtccctccctccctcacccacctccacctcgtcagctctgcaacagtccagggagagaaattgtcataggcacttgtgccggtcatttgttttcactcgcttttttcttctgacagtagttaccaatttttttcttttaaaactgatactttttgtctagttatcaaatttttaataaatatatgtccagaatatgtttgatttgtcttcttaaacaccaacccatgcagtggctgaacagcagcaggaggcaatctctttaccagatct

SEQ ID NO: 33997 - DNA, 412 bp, Homo sapiens
acccaactttgtttgcaggacaaaacctgaatgttttttgagggggtgggaaaacttttccattcataaagatggcattgacatatttatcctaggtttttacctctcttgaagctgactacagagccatagtggtatttgtcaaattgggaagataattgcagtgtgaatgtgtgagtaatgacacagtattgcataataataacttaagcagcatatctttgtttacagtgatgtaactttcccaaagtttatatgtagccttaaagggtttagtgcagagcggattgcaaatgagtaactgccaagaagaaagaaagagggtgatccatccctcccagttagttctgcagtcctcattgttatatgaaatcccaacctgcagataccaggggcaagaggaccccatttt

SEQ ID NO: 33998 - DNA, 1957 bp, Homo sapiens
acccaggttttgtaaggatattgacaaattagatgcttggcaattaaattagaatttcaccgtatctcctgccttaaaagaacagctttattcttgagggagcccacctaacaattttatgttcagtcatctgcagagaatagagccactgtctttttctttcctaacctagggtagacgctttatttcactgcaagttccctgtgacattttgcactctcttgatttaatgcaccaaagaggatctttaactcttggtctacactagtgcaaataaaggttaaatctctcactaaccatcatgaactagcctaataactcacgagaggccctggaaaaagaaaccgagagagcaggtgtgcagacttgattaaaaggtgcaaaacccgcacaaccgcaggcaaaggtactttatcctcacgttgcccagtaccggctgcgaggtgcgcaagcaggggaacttgtactgcgccaacagaacgattccgagagccgggcctagtaacacaggggcttttcttcagaacggtgtccagaccggagcttgcgccgaatgtaggggctcctattggccacgcgccgtaggggaggagacgactggcggggagacagactggaggaggggagaagggggcaaggccttttccctgccccctccctgccccctccgccgcaggctgccgccggtacctcgtgcgtggttactatgcaaattgcagcgattgcggaaataaacaagggagttgggagaggagagagggactgccgaatcgattgcaacttctgcaaagtctcgtacaatccaaagcacgcaaggcaaaaccagagcgaatctgagaaccagccagcccgggttggatcgctttcaaaagagagagtgagagcgagcgagcgagcgagcgagagcgagacagtgagagagggagagagcgcgccttgcaattgcaaaagccttctgatttggagttaaaaaaaaaattctccaagaagcctgcaattggccaacagctttttaaaaaatctcttccgggttttcaacggttccaagtttatttagatattttttaaatgcaaaaaaaaggggacaacaaatgaagcaattcgtctgagcattttaaagtttctcacgtactctttttacattgcaatggtacgtggtacatcttaaactttctattttgcatttatatgatatgcgttttataaacaatggtagaatgattttgtttaatggctaagactaaaatttctctagctcgcatatgcacttaagtgattgctgggtaaatgtctattgtgatggttttgttttaaagatgtagctttgttgatggtgtttttgctatgtgcatcagagaccgggttttctttttcttttttttttttttcgggatttgaaaaaattgctgagcttgacagatttttttttcctcctagcgcttgctcggttccagaaaggggtggggggaaatcctgtacgtgctctgttctgtaaaagacgtctggcctcagcagtcaacctaacccgaaaagaaatgtctggacccggagaataattgacgatttgatcctctaatcaatgggacaacttgggagattgacaaaagctttatccaatcataaggaagcttgggtgtacaatagttctcaatagccagagggggcggggcagaggagatctgaagttctctgcagctctgaaggggatggtgtggttcaagctgtcaaagctacaagcgcttccggatttagcaagcacaataggaaagaattttcgcgtttaagaaaaaaaaaaaagctgatcgggggagttttgcatgaatcgtgtgccttcttccttgtcttttggaaaaagaaacattctgctagagaaataactttgtattgttattaactttgcattagctattatttttatgctcagggaagctggtaacttgtggaatgtgaagttcaa

SEQ ID NO: 33999 - DNA, 733 bp, Homo sapiens
cacttggaaaataaatgattggagaggttatttccaataaggggtttatccttcctaacaatgggtcatttatatgattgcagtgaactagtttccatacttcacctgcgtttcctccactgctctctctactatcctttctttcttccctcctcctccatccctgctctctctcaagtgccttagtatctttgtgaactctggacaaggatttacttttgcaacttgggaagaggggagagggttggaaatgttttttacccccagtctgccctttgaggaacatctgtttctttgtgcgtgtgtttaaatttatgcctgttggagagaaagttaccagaagcctttctgtaactgtaactcttctactgtatttttctcagtcttgtttccaaaggctgtagttggaactgtgctttgtagtgttcccccgcctccccccctccctccgcgggggagggagcgggagctggcggagataggagagaaagcaggagcggatgtgaagggctttggtgctgaacttggatccagcccttgcctagagggcgcaaacaatcgtcccatatccaaaagtcttacgaagggcgccaaaagttacttaagataatattgctaaccgcagaaagctggaaatcgcggggcacatccactgctgcaacaaaagaagtttttaaagtagaaatatcagcattaaattacttcccccattaaaaaaaaaaaacagggcgac

SEQ ID NO: 34000 - DNA, 3677 bp, Homo sapiens
ataattgcaggaagctcttttccattttaagaactattacctgggggagggaaaaaagggattcttaaaaggcacccttccagaggtgtcccagaaactgggacggtaatgatagcctatgtccagttctgggcacgcgtttgtggatcagaatatctcccttccctaaggggacatccctttcacatatttttttcctcctaaaaagtaaaagatgtcacagctaaaccactgttgtttctgaacgtgatagaactttttctatggcgtctgtgttcaaacccactagtttcacagtcctgggagggataacgctcattaatctccgccttcttttctccagacccccgccccccaaatccggtgaatcttctgtgggcactgattcctcaccacccccgcttctgaatgccacaggaccgaagctgcacaaagtttgcaggattgtgtgcataattacctctgccgacgaatctattcccacagaaagcttcgctggagagattacaatgctttgagccttaccgcatttcagtgggggaaaaaaagttacctaggaggtctgatttttcaaagaaatttgcatacatgcaaatgtgccgcccggcctcctcctcggttctctacgtgcccacgcggtggcccggggggtgcggggcaacctggcaaagttgcccaagtcctccaccgaggtccgcggaggtctgcagcgggggtggggggatggggacgaggaaaagtagttttgtttgcttaagcacatcctgtggcagcctatagctgcccgggagtacagactgtaactgctcctcactgcgttacccagtaatgcgctgatcgggggagggggcgggggggccggggagcgagcgggagagcgagcaagcgagcgagcaaggagcgagccacggagagagccggggagcgagcgagccagcctgcgagcgcgagcggccgcggaggctcgggacccggctggccgcgcggcgccgcagccgccccctcccccacaccccctcccccccgcggcggcggcgcgagcgggcggcggctgtgcggtgcggtgcagagcggaggcggaggcgggcgcgcgggcagctcgcgggcacccggccgggccggcgcgggagcgggaaagggtgcgctatgcctttaacacccgcgtacagtaggcatgtatagtggagtgtagggaaactctaggcggggttaaagttcagctcatggagcggcaatagcgctggctggctggctgcagttgagccgacttggaaatgtgaacgcaagaagcaggcttgatttttttttctccccccttctctctctctctctctctctctcttcctctctccctctttctcctctctcacccacactcacgcacacctccaaaccgcacacccagacgcacacgcataccccagcgcccggcagttatgtattctccgctctgtctcacccaggtaagccgcggcgtggatgcggagggcttgggggccggggcgccgggggcagggctggggctgggtggggggcaccggggccgtcgctccggccgggcccagggcgtgcgtctcggtgtgtgtctgtgtctgcgcgtgtttctgtgtgtgtgcgcgcgtgtgcccgcgggtggggggggggatcccgcttaaagaaagtaactttgtttccatgcgggtgcattcctcttgcacggccatttgtgtgggcacatggctaatggcgccctcttattaatgcgttaattaatatcggggcgacggactgcggaacagcagtgttttcggacaccccgcacgtgtttcggcggggttgcagtccatgacacgcagaaatctggctcagcgtttctgctgccgggagcagggattccgtagtgccgcagcgcccggggagggggccgccgacggagcccaccgctcaccccgcacgctcgggccggctgcagtcctcgggtgcggggagacctcgggtgcctgcgcccaacggcccgctccccgcagcctgcgctgccgcagccccccgccgtcttcccgaactcttacttttgtttattgtttgtcagccttcggggtccggccgcggaaaggacgcgggctcccgtcccggccccggcccggacagcgcccctcggacgcgggcaggctgcggctagccctcggctgagcggggctacgtggacgcgcgttcccccgcgccggccgggtggagcctgcgtcctcgccgcgcgccggtggcccgttggctctcccggagtgaaagtttcggggccgagacgagcccacgttgtgcagggcgccgaacgccggaggccgcgggccgcgggccgggtagcgccgggcagagttgggctcctagccgggagccggagcggcggcccgggccggacacggctccccccgccgccgccgccgccaccaccaccaccgccaccgcgcgactccggccgctccgcgcgcaggacgggggcaacttttcccctccgactcaactcagagcatggggctcttgcgccccaccgcctctcctttccgtgcccccctgtccattcctcccttgtctacccacccccaggcaaaatattgctacttcgagacttcaaatccggtcccctttgaatatgttatttgttttccttgactaaaaggcttgaagtcaaagtggttttgcgctattttttttttaagcgtgagatttcatactgctttggtacattaggatctgaccattaatcacctacatgaagttatatgcttcacataaaatgtttattcacctctcccttaaaaaacctaccacttcttgccttcatttagtaggagataacggtttaaccggaatagtttctggaaggctaaaaagtatcagtagttttcgctctcctctctagattctggatttatttcccacatgacatcccttcttattgcaatatctaacagtaataataccgggtatttgatctcagaagactcttaaacgcatcttttatgttgaaatggtctgtttgggatttaggcctagcattaataatggatagcagttacttttagttactgtaaaagttttttttttttttcctaacaaacttccaaagttcctattttagtaacttgtggaagtatggaatgaaacttttccaaccacttctggcaaggttcacaattgcatatggataagatgcaaagtgtaagataatttgaatgaattacggactatagtgaaaatgctgagattcgaaggctgaagttctagctggcagaagtttgcaacacacagaacttgtagataatatcagcgagctgcaataaagggaaaggaccctaacagatacattagtgtcttctcaattgagctctgaaaagataaatttatatttgggaatggtgcatatatgagggcacctgtatatccatgcaggcctagggcacagtcaggtatttaacaaagttggcctctgttggttcatgaggtattatgacattaagagagtttttttttttctttttttttcggcttacatattcagcagcgttgattgatgcattcactaggccttcttctggaaacaccactaagagaaatgcttatttagtgtaacagtttgtaaagaaaatgtacaataaatagtgaatgagggctcatattttatgggttctgcttttaaaaattta

SEQ ID NO: 34001 - DNA, 583 bp, Homo sapiens
ctcaggagactgaggtgggaggatcacttgagcagggagattgaggcttcagtgagcctcagttgtaccactgcactccagcctgggcaacagagcaagatcctttctcaaaacataaagcaaaaaacattatttcctttctcctttcagaggaaaattatttccagattattttttcttatatttttttaaaagttggctttaagggagcacgtttctctttgagggtggcctgtttcattgtcaatatttgctcttcattggaagctgaggtcatgtcagagttactcaggagaaagacctggacttttcttcttatcttttaatggtttatcattgataagtttggacatggtatgcatggtgacttttttcactcttgtcacttttctatatttaccttgttcatagtatgtaatctgagtgccttcaagacactagaaaagatttgatctcaaacaccacattttgggtattttaatataatcaggagaaaagtggatataatattcagacaggaagctggaatacactggcataggtagaagtattcatttcaacattaagtgaatatatatatatt

SEQ ID NO: 34002 - DNA, 1342 bp, Homo sapiens
agtatgtgggtacataaacaaaataatttctaatgtgatagatctctaaaggaaacaggcaaggtgatagagaataactaagaggacctgctttagatgggaatgtgaaggatgaggccgcattcatactaagcatccaagtaaggagaagaccaagtgcaaaaagtttggtcgggatgagtgtgtgtgtgtgtgtgtgtgtgtgtgtgtgtgtgtgtgtgtgtgtgtgtaccagagactgaaggccattatggctggacagttaagggagagtgacctaaataaagttcatattggcgggagagcagcttgccacagggttacacagaataggcagtggtggtaaaggcagcatttgaatccaggtccatttggctttggaatgtgctgttatagcagcagagggcaagtgtgaaacataattcaaggaaataattgctgtagccatccagaccagaggaggatcgctttgatctaggaaaacatctcagtagtctttgaaaaaatgtacagaatatgaaagatattataggtcttttcctcctataatacaaccaggaaattattcaggctaattttttcagaaaaattattacaataaattatgatctccctttgaaaggtataatgtattcaaacctttttaattagctaatcttttcctgtgaaatcttaaatatttgcacgtataattggtaattttagcttttatgtaggtatgtttccccctggtgttacttacaaaacctggcttactcaaggcccaaagtccaccccactagtaaactctctcgtctctgttcctgtgccaagtgctcttcctttgttaccaggtccacataattaatagctttatcatatgaggtaattcagttactcagcaaaacaaatgatatacacttttagaaatagctctagaaagtaaacttgaacgtaaaattgtttagtaagaggaaatttctgtttgtctttaattaagagaaactgtatggaaatgtaagctaaggatgcattaatcagagaagttggcattgcactgttcttcatttttatttggcatagattgcatgggtgctcattaaataatttgtatgactgaaataacttgtgatagttcttgctaaagttttgcatggactcagactaaagaaactttaaaatttgaattaaaaaacattcaattcttaggtttgaaggtttgagttacttattataactgaaaatctttattatcaaaatgtgtgttcattatagtgtttgcttgccttcttgggtgaagaaatacttattatgagagtatgtagattttccgtgaagaattagtaatcatgcatcaggttga

SEQ ID NO: 34003 - DNA, 2105 bp, Homo sapiens
ggtaacatatttggataatcaaggccaaggtaaagggattcattcccccttcttgaattttatggtttctgtatgtcaaaccagatttcattggtttaaatcttgtggtgtacacttggccattgatttggtttgagctctgtaatatttgtaattatgtgagatgacaagattgaattaacttaattgtagagttttacatagtgtctgtatcaacatcctaataaaataatatgaaattcaataagtaatgccaagtgggacagtgagccactcacataagcttactaaacttgatatattcttatggcactcctccagaatgtagaagaaacacatttatctaggtgattagtattctttctgtctgccagatttaaggattgtttggaaatattgttagaatcaaaatcaacgtttgttactacacagggttgagcattccaggcacactctggtcgttttgttattctaatgtccacttatttcatgtctgccgtgaccgtgacagttttcagtcacacagagctgccatcaaaagagtgataagcttgtaagtgaagcctttggggaagcaataaagtcatttttctggtcccatctcaaaagacattattggaaatttatttaaaagtgatcaaggtagcacatacgaggccttctacagtttgcattttggaagttattaacaatctgcagttaagtccatttaaaactgaaagtggctcttccacaaactactttttaaatagcttgctggttctaaatttaaggagaatggaaatattggaaattaaaagtcaaaagaaatttctggggcataagatcctttcaagtttacaatttctcactttagatttaaaacttgaacacggccatactttgcattttatgatatctaattagtgccttgtaatatattttgtgaacagtatctgttagccataatatcagggacagtttaaaaaatcttcagtacatttatgataaaagtattagcattgtaaggtcttaaattgacatctaggacattaggaaatcaaatttaaagcattgcattgtctgttactcaatggagtggactgaggacagcgtgtgacttgtgtactgcaaatgatgcaatagctaaatatcctagtgtgagttaaggttgattaagtgatcatctttaactctgcttttcccagggctctttgaactcttgttttattaggtaatatgctatgctgttattttattgctgtttaaaaaaccttctcttttgggaaagaaaacatgtgaattctttggtttctagatagaaattagcaatcttttgctcggaatgtaaaagtatgctgtattatcacaaactgaccctcctcctccccaagaattctagggagtaaaatgcgtgcacaggaaatcagaaatggatcaacagagttataggttttaaaaaaactgccttgcatttttgccctggaattaattttcagtgaaaattaaaatattttttctgttcatctggaatcagtttttacttcattagcaggaaatggtaaatatacattcagcacaaatagagttttctttatgggacacaggatttgtactccataggtagatgtgtaacataaaagaatctttctgctctccttgtaattttctccctcttaccctcaataagttaaaagaaaggaaaattttttaacctaacctgttaggaaccattttagtgtagcctctagtattttgataaaacaaaatgttcactagctggaccctggtggtgatagcatgaaggactggggtagaactctctttttcattttcttttaatcctgaagttacatcactgtgcagtcagctcaacttgtgtcattgcagtaggaagatatgtaggtggaaagctattccagaaggaggctggagctaccttccctgacaagaaaaaaaatccaagcaaatacatacataaaaagacactcaaagcatcataggatgttatagttataagggaccataggtttcatttaacgcacattttagcatccaggtcctacataaaatgtatattttgtgattgtgaatgggagttttccatatttaaaagttaagtttat

SEQ ID NO: 34004 - DNA, 810 bp, Homo sapiens
aatgggaacatactgtatcatagtttctttttatttgtctggatgcttgtgtatgccttttagtctactaatatgctcacatgtgcaaactaacaagagaagatggcaatccggtattataaactggtaaagagttatagtgcagtaagactggattaactgtgctttcagcagtcaagttgctgtaagagttatattgtaaagttttagactaacttgcatgtatcccagagtttgcacggtgttgctgagtgtctcgttagacatacaccctacctactattctctcctgacataaaaaaaggtggtaattgagctggcatctagaaagtggtggtagcactacagattgtatcactaatcccaaacaaaggagttgcaaaacacctttctttaaatattttctcttcatggtgcaactggggagggccaaattccagccttaataaagttttaacctgaccagttggtagaaatggcagagtaatagaatgtttggtccagaaaccaatgtgtggactgtgtctaggattagactctgcatttctgtctgttccagatgagctgctcatttcttttctttttttaatttaaatttttaagttctggagtacgtgtgaaggatgtgcaggtttgtttcataggtaaatgtgtgccatggtggtttgctgcacctgtcagccatcttctaggttttaagcccagcatgcatttgctatttttcctaatgctctcccccacccagcccaagctcttcatttctactcagtacgtatgtccatgtatccaggagaaatggagagttctact

SEQ ID NO: 34005 - DNA, 573 bp, Homo sapiens
acaaaagaacaaaactctctgggcttgatttcttaatctgtaaaacagaaataattcttaacacatttggttactctgaggataaaagtggaggaaaaaacatgcagaggatagtccggaactccccatgtagatcccattattaggtaactgaggtacaagtatcttaggctactggtccgggcaggctttgctgaggggctccgtgcagcttgctggtgcagccgagcaaatgggcctgtagccgactcttaatccaggttggtgctattcaaagagatcatctttcacccgagggatttctgggcatctattttgcggatcagaaagtagagaaagaaggtaactttgccgaaagctagtctggggagttagtagctgatacagatcagcatttcctaactatgagatttcataatattctctcttgtctcgattctgagtcactggtgcctgctgtggtggcattgttcatgaacatgtacagttattgggaagtgatcttgtctttcctcctgccttcaggcactgctacctaaattacaccccgacagatgtattcccattcttctt

SEQ ID NO: 34006 - DNA, 3150 bp, Homo sapiens
agtatacagtgtcccaatttacattataaaatgcaaattttgtactccagaataagaaacaacttagagtagacctgtattgttccaaaactaatgagaaattatcatgttttctatgtgtagaaaagttttctcttcgcaatggctttacatattttctgtagggaaaaattctatttataaaatagcctgggatatggagaactcagtgataaaaggggcaagaacattttcagattgttttaccctgctggaatgtagcatgggaaagctccttccaaaaggctattacctctgggcattctggcacagttggggagtgaattggtaagataaaaatgggacgaaaatccctattttctgttaaatacaaacaggctcagaatggggcatcctgcatttaggattagaaacttcattatacaaaagcagggtggagaaaccctaatttgacagctaacccaagagtgtatggtgaccacaagattaacaggggccagcagtgtgacattgccattcaaaaagctggtgctgtagttgggctgtggtctaaccacagctgggtttttttttttttttttttttttgcccagttttgggcacagaatgctaagaggaacgccaacagaatggagactcgatgccaatgaattgggaaatcatattatgtgacgggcagttgaagaaggcatgtctgtaaaattgaagaagagatttcttagaatgacctcagtaacaagcttaaatatttaagtgtctggtgaaagtaggggtgggatagtctctgatgtgctacaagatcgaagaaggagttaagtccttctctagagcctcaaacccctgctcagcatgaaaaaaacaacagaaacccaagttaacatctccttgcaatatctgatctgtttttccaatacatctgctcatcttgtttcaaaacaagtagctgtcaccattcttaaccctgtcgtccaaaccagaaaccgggcatcatctttgactggtcccctttactcagggggaaaaaaaaccatgtcttttaaagtcagcgcctataatactggtctttggtttatctccaataactcgattgttaacagcccttgaaggggaggcaatactgttaaacttgataatttctaaagagttttgagctatttagcacgaagtgatgccaagaaaaaggaatactaacattactcacagcagagggaaaaattttatatcctttctgaaggccaaggttaagttctgtgtgactcagcacattgactttctatatgaccctaaatcccttctatttcctgatctacttgtcttgacctgtttcatttccacaccaaaatagtttcattaacacagcgatcatgctcaggagatagtggctaactgatgtaattaactgacatgtcaaaggctattggtttattgcatatgcaactgtctttcctggtgggaagatacagtttctgctgacataataggtatgcaaacatgccaaattgcccaataatctgcccccgtgatggtgaggtgtttgcggccattctacttacaggaacagaatggcggatctgttactatgttctcctaaaatgcagctggccaaaggtgctaattggtaaacagttaaaatagaaagaagagaaggcaattcagttttgggccttagtgagttttttttccttttctttccttaaaaaaaaaaaattgtgcttttggcatgctaatgcatgcatttagtctctgcaagaaatttccatttaagaaagaatttaaaaacatgaagtgctcaatccatatctcctaaacaactaaaaagactgcaatttcaaatgagaaattatgttgcaaagaagaaaaaagttgtttattatggctcaaaattttaatcacccaagggctgtaaagttaaaaatagacaattctgccttctgtttatggtaaacttggctgagtcccggcaaatttcaaagctgaacatactgtatgttatttttgcttaattttagattccacattttaaaattatttcttacaagaagcatatttcaggatataaacttagcctgaagaacagtattcttgatttttgcccatattgaaactcctttgaaaatagtaaactatggttttgggattttcctattcccaagagtccaaatgggtacctttctaagtcttttacattatgaatgaacacaggattatgaaattgtaaaggttactttctgctctctaattcctttactcgtaattttagttttcttaacggtataacttgatgcaaatatatacacagtagatactaactttcactgaagtgttttcgggagggaggggcactttacaagatgtgttgcctttagtttttccggtaaggagacaggaagacacagacacaggctcttagggcacatggaaagcgcctgcccctgtgccaagaacttaagagagagccggggatggaccctccttgctgtggctcctgaacagtgcagcctctcttctgatgcactcaccctggcgaggagaaccgcttgtgtggcgactgcttggcccaagagcgagtaggattgttgactcaactctcttcgtgtctcctcagagaggaggaacacctggcttcacctgtttacataactcttgttgattcttgtccctaagctcttccagaatgctcttttgggcttttcctcaaaaggtttttagaagaacaagctttttggggtggcaagaaatttaggatggagatttttgtttttaacctattagtcagcgtggcatcagagaaccacatgtgccccacagtcagtggcatgctcagtaaatatttgttgaatattatttaagtgaatgactgtttgctgaagaacaagatttctctgatgaccttgacaaacgtatgtttgtgattaagttaatcatagctaccacttagaacttcttactcactagacatgtagctgaacacttcatatgtcattctgctttttgtttttttaaagacagggtccctcccactctgtcacccaggctggagtatagtggtgcagtctcagctcattgcaacctctgacccccaggttcaagcagtcctcccacctcagcctcccaggtaactggggctacaggtgtctgccaccacacctg

SEQ ID NO: 34007 - DNA, 1516 bp, Homo sapiens
gcttatagaggaattatttcaacaatgagacttttccattattctttctgcaatcaccctctatactcagaatgtggaaaccttggcatctctcacttaagaacactgaattcatggtgttgctcagagagtcctgtcctggttccataacactgtgataataactgaagatctttaaaaatgtatgtatcttccatttttattccatatggccccttaggtaacatgacccaatggggccattaaatgaccctgcctacacttggattactcagtacaaagcaaatttatggttgtttattctctcctcctatcagctattagtgcctaatcatatggtctatcgatcatgagattaatcgcctgcccaaagaggcagcaggtcttgtggaatgctgcactgcgccagactgaacttcaaccttttatacaaactggaggagtcaaaatcatcattcactgcctgaaatccttgcaccctgggcctcctgcaccccaggaggtaaatccctgctttttcaaacagtgtactttgcacttcctttccttgtgtaaaactttacctcattgattcaggcaggcacttgtaaataaaatcctttccaaggcatcctataaataatgatctaagctgaaaatatgtgggctttattatacaaagccccatagtgctgccataattaaaggtctgtcagtatttctattataaattctcattttagaagatttatcactgggctattaaagttttctctaagactttccaagagtatcatgatctaaggccttttttttctttctgtggaatgtgttgctttgaagatataaaaaataaagtccagaaacattatcacataggagtacacacatgcagagattggacactttaaaatttgagctctgcctccactaaagtggcttctgtttgcctcttgtgttctcattgcatttatgagaacagagaatcattgtagggctaatactgtattgtaatatttgtttcctggtctgtgtcttttactctgaggagagagagggcagggagttaaatcatttgtctttctggccctggttccaccagagggccttggcaatataagcactgggtttgttcagtaaatgagccccagggtgagagtcaggaaattttcttcctagtcttcatctagtcattaaaggtgaggagtgaattcaggcagtgaatttaggcaagtccctttactttcctgaaaacaagttttctgatcaatgaaacgagtgtgttgagttcagggctagtaaatctgtttttggtgggttgaatactgccggcacagtgttttcaaacacttgaattggaatgtctttagatggaatctgtgccttctagtttgccataatccccactgttccctattatattatgttgtatcagcagcctgcttctatcatttgcctgcagagtctataagcatttatgattccttgtaattattgatcatgtggtcttttgttgctatactaagggtctaaatct

SEQ ID NO: 34008 - DNA, 2085 bp, Homo sapiens
ccatgcagaaaggtcacaggtcttatctaggtagtttcaaggagcaaatgcttgttttgcagtagtggtggcagggtggtttggctcattcaagccccttgctctggaggaacaccgataaaccatcaggatgtcttttcgtcttgcgttaactgtggcaaggctgtgcattaaagaacataaccatcactaaaagggtgggaacaccccagcgaccagtggccagtggccaggtgctttatggtaacaccacagacatgcctggccaatcagatgtgatcttttgctggcacttgctcctttggcccccactgcagtaaacactttcccttggatgttggttttctgttgtgtctggcagccacacagggctgcttgaactttagccagaggcaaatatttatacatcagagtgtgcagtgttcaactggtcaggcctgagagggagagggagagacctccgtgccttttagccaaagaggatatgtcctttttttccccttccctttccaccgtgacatggtaaagtgggaccatactggatgtcatttgagcttgctgcatgtgcttctctccaaaacgtacacgtgcgcaaacttgggatgtgctttcaaaagagaggacgtcctgacatttctgcctgctcctttaattcctcttggaaagtttacggttaatattttccctggaacattgtcaagcttttgacagtgcctgagtgtatgccgaactgtgaaattgagccggagaagcaagttgtgagaaatctgtttctactcagatccgtaaggtttatgggggggggaaaaaaaaccaaaaaaaaaaaaaaaaacccaaaaaaacaaaacaaaacaaaaaacaaaaaacttcagaggggaaactgagaatgggactcggcttgcttctcctggtgtgggttcaggccgccattttaaggagccagtgaagggcgacgttccgctccttacatggcggctgtatttactcggccgcagccaatcagccggcagtgccaagccacgtgacatgccacgagggcacgcacagccatttccttgtttctaaaaaacttgctacctccacagagtactttaccttgttttgcatgccaaatgttcttgctgaatgtgtctagcagactggcatttgtccataaagttattttagtaggtaaaaagtctctgagcacttgagctttgtgcattctttatgtaaaatggatttcccttcttggccagaggccaagggtacagcacactcgctgggtgagaagagagcttctctgctgagaaactggtggaccgacacactctaattttttggcttctgaccaaacaagctagaaggatgccaaaattcaacaaaataacacattattgtgtgataggagccgtgctccaagagagcaggaactcagaggaacttcatactggccccttttaaaaaagcattgtcactttggggagctttcttagagaaacgagaggaaaatggtaaaatgcaacctggagagtaaggtataatttgcacatgaacacgaaggaaggaactgaaagaaaacagaggagtttaaagttacttctatgaacttttcccagacataacacacagttctctgacttgacttacattcttttaaccctgaaagttccatctctgtgtctgagcagaatgctggactgcttaacgttaatatgagaactaatgtgagatttaaacacttttaaaaggttttaatgtctaaggatagctgcaaattccaaatatgaaaatttggcaggcttttggggggtaacagaaaactttttaaacttacatgctttatctttgcaccctgacatgtgttaagtgagtcaaatcttcctgttaattactcttgtgacattagcaagttatgtaagcccactatacctgtttccacatatgtataatgaagacgttaaagaagataggtagtagtcttctgagccctaaagaaattgaatttgaataaacaactggaataagtataaaatgcatttctagtttttatgtggaaatttgtcaatcaaaaggaaaaaaaggggaatatctccagttgaagcc

SEQ ID NO: 34009 - DNA, 1282 bp, Homo sapiens
aatacataaagaacatgttttttgttttattttccacccttatgttttatttataaaacaaaaatttatatttgcacaggaggagaattagcaggatgtaaaataaaaatgaaagaccccaatggggagaatattttaaatgtcttgcagggagtggaagaaagctttgcttaaaaatgtcaccatatgctaactatatacagcacttcaagtttatttattgttaaagcctcatgtaaatcacgtcattctgaaaatcatggaaactgcacatttgtgcattaaactatgtaaacaacaaaaactggtcatccgtccaattgttgcttcacttattttgaattatagtgcaattttgtggagggtgaaatggggattacacaatatagcgatttcctgttaacacctacatttttgctgatcaagcaaggtctgttggtgcgagagcttaacctttattttatttccaaatgtgttttttattccgagtcccgttggtgtctatggtttcacttttctccatgagccacatgttaaagcctgccctgactaaatgaaggagtgtaagcagtgggatagacattgcaggcaggcgaaactgggataagccccagaatcttttgaacctatcagtaatattactaacagggagaaagtataaaagtgagcgcttcaagtgctctagtgtacatgtcaaaattaaagcacgagttccacgggatggctcaccaccctcccttatttataaaacagaagtatcttttgagcccgctgtgccctcctcccccttttctatgcctgtttttctgcctgggttgcctggtttttgctctgcttgttgaaaccctgctcatccttcaggctgcctcaaaacttttgtggaagaaggtagggaacacatatctcttcttttgtccagccttccttgattagccttcttcctctcccttctacccattgtacatggtttctgttgccatgtagtggttaaatctggtttacgttgtagttgtttgtgtgtaaggaggtctcctacaccgggccatgttttcttaaacactgggatggtgttttcttagtgcttgtgatgttctttgtaacagtgggtgccctataacttttgtttggactgaattaaagaaaaaaaagaaatcgactttagtaggagccggcctttgagtgataaagatacattgagggaactctgtacatccccaagatcgtggccagttgccaggctccatttggattatgggagagcttaaccccatatttcagggca

SEQ ID NO: 34010 - DNA, 4358 bp, Homo sapiens
aacatcgtttttactaacaatttcattttatacattgcagttgtccttattgataaaagagaactttgtggtttgatgcataaaagaaaatttactattcagtatagttgggactgtatcttcaggcacagacactgcattcagacctgcagacccccaccctgctcagtgtctgggttgcagcccagactgaggttgagccagaggaagaaggaggccgtgtggttaaaccacttgtggataatcgaaagtagaccatacttattttcaatttggcagctgcattagttttttactaaagtgtgcagctttgcctggttctgctaatgttgccttcacactgtggcctggtcaccattagtggtctggcagagatatctgaggaggctcaccattgctcctcttgactgttccactgcccatcccagtattttccctgacttttcctatgttctgtggtatcaggcagttggatcaattgcagtgactgcatcgaaagaaaaagacaaaaatcgggaaagtataaccccgagggcaacaataatgaaattttaaatttaaagtgacccaagtttgatgtacaggatatgaaaatgctgtggttcctccagtggtttcatatactttgattcagacccttagaagttcctggtgggcagttgacaattgagtatcagtcttgatgctccagatttgaataccatttcagttggaggcatggtgcgcctgatatagatgacgtgtgaatgtttcaatgtcaacaggagatgcgggttgtgaagatatgtgttcacatgaaacagactgcaagtctaagtctccaaggatgagctgatatatgtaaccctgttcatgatgggcctgtgtttttttcattttctgttttcctctctggcagatgatagatcatttaaatctgtactggcacatggacgtggtttcccaccccaactgaacttgagttagaagaacctcagctctgtagtgatcttattttactgttttcccaggataaaatgcccttggtaccacatactgtatgcagagtatttatgattgcttgagtacagttccttggaaaggacacaaggggtttcataaagcggtactaaaaatctgcttttctccctagcatttaccaacaaccttgcgatccgatggcttgaaataatggtcagagtgcatgttacccaacttctcctggctgctcctactctgtcacactgcacacagatcatgcccgccaccaccctacactccccgacctcacccaccagtcagacagtttaagtcctgctgacgcaccaggcgtgtgttggctcgtggttgtacttttcatgagtagcagggaagatacactccaggaaggtgggatacaaattattgaactgtgtgacttaaaagctccagtgagtttcgtcggaagtataggagtttgaaagtgctccccagtcaaacccagaactacatagggtcagccgtggttgagctaatttctgcttacacatgtgtggagggtgtcattttctgactacgcctaggcctgagtggacagccgattaaaagatgtaaattcgtggattgtatcaaggagagcgggttccatctttgtggtcaggagggggcccactcttttgttccgcaaagggtttatctggatgttccttgctggaagttgcttttccagtttggatcaaaccacttaagtggagctccagcctcagtccttgcaataaaaaaaaaaaagtcctggaaagccagaattttgctaatatcttacatagaatctcaatgatgggaattgggagtagaaggcagagagtggtgcttggctgatggaagttaaaagttgggttaataataaactacatttatatatcagttaacagcttgctaagtgcccacatattatttgagcttcatacttgcttgctgagaaagaatggctattattatcattatcatcattaccactttccattttatagataacaaaactgaggctctgagaatttaaagagattttccccaaatcattaaacggtgacttctgaatctggatatatgacaagacctctgtccccagtccccttgctttcacctctataatatatagtagctaagctcagctttctgagaacttccctgtcttatgtcatatttgacattataggagaattgaagatgttttgtaagtacatactttgtttactacctcagtagccagtataacaaatggcactgaagttttatgctttgcttgctaaaaccagcaccatttgtgaaacaggtcttggctccgagttacccttaaatgtaactcctttattataaaatcatttgcaaagagctgcagagatcaaggaatacactcttcccacttccctaatgccaggtagtactatgacaggacttcatagtaccacttcttcaacaaaataagtgtctgcagtgaaatatttgttaaaatgcacatttctcagtgaatatatttcttttaaaactgaaaaaaatagtacctaacggaaattttatcattgctttaaaatgtattttaatgaagatattaaaaaatacctttgatggattcttcaatattgtcgaactgctcaaaatgattatactgttatatgaagtctaaaatctttcatgcaacttacaagaatatttttgttgtatgcaacacagttggaaaattctagtgggaccatgtccatgcaattactgattatgtaatgctgtaaatttttgataagcatgttccaagttttcctgttctaaaaacaaaaacattaaaatcacccactgttgaagacaaaagatcattactttattaggagatattattagatatgtttagaactagttaaaaaaaaaaagtaaaagactggttaaaaaattaaattaactccaccaataaaaattcagttccttctgtagctgattaatgtaaggttctttccactgatgaccactgaatagaaaaaactaaagtaaatttcatcatcattgtagaagtgtaacttattcaagtaaatgagataagccaattttatatctatcaagctataattaaataaggatgatactatttgacttataaatgacctctgttttatatttcctgtggaaatcagctaactacaaaggaattgtttattaacttacttcactaacatgatgaacagaagtatttcaggactcatttgccccttttttatgtgactcagcgtcagattctgccctttgctcttctgaggtcagtctgacccagtcaggtaaaatgaacagcacatgaaagtttagcgcatgcggtcagcattcacgtaccttgctttggttaaataaattcttgaaatgcttgatggcttatttgccatgaacttgataattccccaaattgctgatgttaccaggtgcaaggacaaatattgatggctatgaaccttgcatggtgctgatgcactgtgatagtcatatcttgttgtaaaccatgttgtagtgacatagttccagttcatttacccattccctgtatcagagagtttgggccattgttgaacatcgctgagttcagttcatggtgctgggtagttcacatttctggaagggctgtaaggtttgcataatcgtccagtgctatcatcatatcatctttgcctggaagatgcatctgcatagcttcagtagtttttaatgtcttgggatgcccaacccagtactgtgggtttcaatttttatctgtcatcgccacaaacccctaaattaaaaaaaaaacatgaagaatattcaggtgactataaacatttcaaagaaggcctctacttcttgctctgggtaaaaggtagatgcagtctcatggtggaacatgagagttatctcagttggctcttgaaatgagaatgtttcactgtttcagctgaactgaatagtcactttagtttttaaaaacctgctcaattcaacaaaacatgattgattgctcaggtaaattaattgcctctgagacacatgtttgaaatagatatctatactctctctgatactagtgtgtagcaataacttttactgtcctattttgtttaactgtctgtgtatgtatgctctaaaaaggggattgaggctggaagcagtggcttacgcctgtaatcccagcactttgggaggccgaggcaggcagatcacttaaagtcaggagttcgagaccagtctgaccaaaatggtggaaccccgtctatactaaaactacaaaaattggctgggcgtggtggtgggtgcctgtaatcccagctacccgggaggctgaggcaggagaatcgcttgaacctgggaggcaaaggttacagtgaaccaagatc

SEQ ID NO: 34011 - DNA, 1144 bp, Homo sapiens
tttaaggtgcatatgtctcattaatgagtatcttcttcatccattttttcaaattaaccaatcaacaactggccctaacagtactggataaggtaacttctattctattttgtattcctactctttacagagttttagagatgttttgtttcctacctaccaagggaaaaaaagggaattggcagatagagtttatatcttgggatgagatgtgtaaagggccaggacctgaaattacgtgaaggttgatattctgggattggtagttttgaagttccataaagaagttcagtccagccatgttccaaatgctctgagtataggcactggctggtaagcttagtggagtgttatacaacatggaagtctaactggcagttcaatgtcccaaaagttggacagaaccaagaaatagagaacataagcagatgacagtaatccaggcagaaggttagtgtcagagaagtctgtcagtgggtcatagggctccacgtgctagcctgggtttccgtgccagaattttgttcttgggaggcaggtagggaaaagcaagtcaacatctccagttccagatgagctagggcacttgaccaaatacaggtacagaagttagtccttgaggtagagcttacctgttggagaacatggcagaaatcattgtaccaaaattggagcacaggtcagaggctaaagcatggcttactgctgtggctcatggtgaacttgagcttctcatggcccctcctatctcctgaggatggctgagctcacagatggggactgttatgtaatcagaggtcaagtggtttagctggggtggcagagagccaggtgaagactgaaagtgttcaaataaggaagagaacagaattgctttatgtctgccttcatgaagacaaaccctaatagccaaaggactgaaagtttgcccaaagagacctcaatttttgaaaggaaaatgcatcttctccttatgttagaatgaccacgtctaaataaaataaactcttttgccttttgttgttacttgtcttggtatctaccattgtttgacactaaaaaaaaataaagcagtgactaattattggctaatttaatctgtcatgatggcatttgtaattcaggtacatccttcattaaagca

SEQ ID NO: 34012 - DNA, 1926 bp, Homo sapiens
tttataaagattggtggcttataagaatacatacagtaagatagaaaatataaacaagtaaaaaatgagaattaggaaatacataaattaaagtagaaaggtaaaaatcagagaaaaagaattgaacaaaggttctaccatatggttctacatagttaataacattgagatataagtttgattctgagtttcctggcagccaaaggaaaaagagaaacgtatgattaatcatgtggttctcattacccatgagaaaatacataccagttcctcaagggaaggaagctttccctggcacttaattgtgatgtaaatttctcacgtagaacttcagcaggaggacaccgggtgatatgctaacagtcagtgctattcaagtagatagactaaaggatttggtaagatagcttcttttagggcccactaactagaaactgagaacctaatacaaaagtgtaactcaataaaagtgattctgagtgatccatgaaagtaacttgctgccaatccatcaggacttttataagagctggagaaattcacatcatgaaatttataaatcctgagaagcaggtaggtctcatagtccttggatgattttaaatatttctcacagccaaacttttgattaaagctgagccacagacagttcccattggtgttttttaagaactgatattttcttaaggactcgactttacagagtaaacaaacaggattggccttacaaggtaaaaactgaagctcctgaatataggaaaagcaagcatttacccttgtggttattttttaaagtgctttttaaaaattcctctcattatcttcccttgatagatttcctgaagatttatttaacagtataatgtctattgttatttaaagagaaatgaggtttagaatgcagagccttttttaagagagtatgaacatgctgatttagttcacctccaaacagaaatgattgacatcagattcttcctgaaagcagtttctcctgtggaaagaactttgggttcttcaaggggagtgaaatggtaggttctgtctgagccaggtcacctacaaaagcaaacaacaatgctgtttcctaaggtggttgttggcagcacttagccgctgctgacctggtaacctttcctttgagtctcatccatagctctcctctgagagagaactttcccatttacaatattacttggacacactactgttgcttaggaccaaaagggttatttacacaggggagatagtggtaggtgtgaaggtatgtgttgtgacaactgccatttacccatgcagtgggcagagtttctcttttgaccttgttcattcatagcagtgaagtgtgggctaggacctgtaacatctcctagttttaaatgctccggatgggtactctacaaaagtcttggtcatatagaacctatatggaatgcagtcatgttaagaaattgttaagctgttgatcatgatattatactgttaaacataacagtacaaaaagagggttttgttctccaaatagctaattcatagctacagttatttttttagtgtacaacctcagatttatttcatcagagagcaactgggaggtcccaggacagtgactaagtgggaatatgcagcaatgacgagtaaaagcttagtttctaagaatctcagtttttgtggaaatcccctttagactaatgatacaagagaaaacatgtggtgtgtgttgggtagatcattccccaacaggatgttttattttttgtgtttagtcttcgtccatagtaacaattataatgaatgcatcaaaaataaagcctgcagaccttgtgacctatcttgtaatcagcacaaattagttttagggcaggaaaatccagctgcatattagttttattagatgttcccaaacattttattgcaatattttgg

SEQ ID NO: 34013 - DNA, 2288 bp, Homo sapiens
aagctgctggcttagcctcacaaattcagaggtgagggatgaggcaacaaggatgcttgccattgaattatactgatcagatacatgaacctgttggaatcagggactcctgctggccaactgaagctgcaatcttccgtgaactcccctttcctccttgcctcctgcctaccaccttttaattttttttttcattatcatctaaagtccacgaaaggcaagaatggaaagttctgcttccatggcaaagaaaatactgtagcataaaaatctatatttgttctcttgctagtttttcccccatgtggtaggaccatctgaaagtagctcaattatttattgccttgttccaggggaggaggaaaatacagaccactagatgctgtgccagagagagagagagaagtattctctgctttggggaagggggttttacaagtgttaacaatgtggttcagaatcactaaagttgttttagcataatactatgaggaaagagacaagaaccatctgttgaaatggctcttacatgatgctgcattttcaaacaaagccttctcaaggcatttttagattggtctctttcccttgaagttgctacaaagagagcccactctactagctgctaagtgatgctgcttagatagctctctctgtcagcacccactcttttgtttattttgcgctagtgttttcctcaaagtatgagtgctaaggctgtcaaatatcactcctggtaggaacccagaaagttctcctgaaaaatccactacttctgcccatttccttccaaattgctgactctattttacttgaagttggtggagtgacttcgaaaccctaactacttcactgggaaagaggaaaaccgcaaatacacacaggccattgtgactctggcctggtgggctctaattttctagcggcggtttgtacacccaagccggctgcaagggttaagtaaacttcgtggctaaggatgacttcatggccctggaattttgaaaagccaggattctcagtacactgtggccagccttagagtctttgggtgtgaaaaccactctcagttacccggactgatttttggttcctgttgcagtgctgcagaatctattaaaatccggcagctgaattgtcctggctctgccacaaagctcagctgccgggtccactacaggattcctgagttgtttgtcaatggagagtgggagtgaatggaaccaggcatatgcctcagcctggcatgaggtggcaccctagtggctgttttctgccttagaaatgtgcgctctttctatattttcacacaggaattgtcattaacatccaaattgcagttcatttctaaagttctttttgaagtctctgggtccttgttacgttttcaagtacccatattcagatgcttagattttcaggctagtaatttagtaagaactattggcaatattctaacctgacatggtggaacttctaagacagaatgaactcggctacaaggcacaacaagaaaacgaaactcttgggtaggaacaagcccaaacttgaaaatacaaaatgttcttgcacagaaggactaatgaggaaatgggtgtaggataagaaattccagacatccagtcatttggggtgccatttaaacattcgcagtactttagatcttaattaaagtgggatagatttaaaactttctttctaaactagtggcctgttggttttcctgtgttaagtaacacgatagctgtgatcattgcatggaaattaatttttaaaatagcttatattcttaagcaagatcttctttcaaaagaaaccatttgggctcgagcattaaaggaagaaacaaaaagaatataataaaaaatagattgcagccctagcatgaacagttgccgtgaccttgccttttgtttgccattacacaattcaatggcagtctactcaaactatgtgctcgatcaatatcctattaaagcagcacaaaaagtctccataaacttagtggttagctatgtttataaatggaactcggcataattggatggtcaatagcaggctctactagtaattttaaaatgaacgtcacacattttatatctgtagaagtcaatggcacctcttctagagtgaaggtagagtgtggagcagacaaaagagtgggtggccctttaaaaaaatcataatgtctatttccaaatgtagtttttaaagaaaatctaagttatggaagagaaaattctgattggcccctatatatttttattttgcctatctgaaccaccttc

SEQ ID NO: 34014 - DNA, 1280 bp, Homo sapiens
tctgttgacatgttgctggtcagagcacaatagccttctgtgtctgcaaatcattgctaaaatcatctcaaggaaaaaaaagtttgaaagctttaacgttagacaaaagcccaagagttgcagcgtgcagcccaaaaacctggagtcagcaacttctattgattaaaaactaacctttaaagtaactctgagagtgtgtggttagcatttaaatttaaacatgtcatgagttgatttgtgttactgaataccaactcagaaggagtaacattcacatcgcattttttttttctaattcccttaagcagctaaagtatttcatgaaatgtcaatagggcaaaaagaaaaagaggtggggggctgatgctgggccttgtagttttctttcccatgcaaatatccaccccccaaaagaaaagtgtgcagagtgaaacacaataattagtcctttgtctaactttcccaagtgccagagaaagacagattaattaaatatacaacaatgttggtttttggagtgggggtcttgcttgctgtgtaggtcataaattaggcagaataaatacttcaatgtgtttgcagtgggcctgctacgtcagaaccactggaaggttggtgggaggagagcagagggtttcttgctaatgatagtcacgtctgggtctgtctggttgctcttagcaaccagacatgatgtaacaccaggatgaacttgaacttgggggacttgaaaagagaacaatagaccagagcaatcaataaagcctatttcagtgaaggattacagagctgctctggggtaaccttgtcggcaaggcacatactgaatagtaagatgtgtgaagaaacttttttttttttttttttttttttgctttgctttttaagagaagtgcagaggcactgcagatttttgtagtgccctgaggtctcgtccagaaactgtggtgtggagaactgctccccctgctgactcactgggtgccaggcctttgcttcaagaactaccttagtgtcagattgaagaagtctggaatttcacaaccgacttagaaagtgtgaaaacagaaatagtaagcattattccccgcacccaaagtttgaacctgttttgtagaagggaggaagcggctctaacgtggatgagagtcagctgttaggtagaggcctactagaaacacagtttggggtttgctttctctctcctttctctccccctcttctttcttttgtccagctagatttaggccatgtgtatttgccaggctgatttcctttca

SEQ ID NO: 34015 - DNA, 1976 bp, Homo sapiens
ctgaggcaggagaattgactgaacccgggaggcggaggctgcagtgagctgagatcgtgccactgtactccagccagggcgacagagtaagaccctgtctcaaaaaaagaaaacagaaagaaatttgtctggcagtctaccatctcatgaagtttgaagatgacatgaggtaatatgcataatatacataaagttaatgataaatgggcaacacattggctagatcgttattacttgtcttccccctaggaagagttggcaaacatttccagggtaagagactatccatctttgtattactagtgtctagaacggggcctggcatacttcaggatctacatgttttactgaacaagtaagcacactgataaaaaagaaaaaaaaagtggatcagaagaggaagcgccaatgactagtaaaatcataaggaaatcacaaagggtggcctctggccctcccatctccacaactctgttcaccttcagggatccttcagtcattagaagccacagatcagattatcgttttcactcagtacagccctagccagtcctgacggcagcgacccacctgcgaccccaactctacctcgcctccatgggggggtgttctccacagaggatattgtcccactttgaggtcctcgcacttaagcgactcctcgcccccggcggaggtggcaacagccccccagggtcctgtagtgactgagacgaaccacaggacaccaacgagtctggccgtcacggcctccggagcagacggaccagacggccaggcggccgccatcttggagaccgacactttctcgccacttccgcttccgcctccgcccaggagcgggagggagaagggcaacagggcgaggttcttaaagggacctcgcataggatagaggccagttccgtctcttcgcgtgttcttctgcccgtgagcccgtggaatcacattgggagacccttttaaaatatgcatgtacccagtccctcgaggcgaattttcccccacgaacccttggaaggagctaaggttaatctttgagtgctggaggaaggaaacgagtggtttaggcaatcaggtgcttcacccgcttctcattcccgcgcccttagctgaggcttctcggtcctctgaaagtgccagcggcgtcagaggttggaatcaatgctttcctgacatcatcgcagttagccctgataggttttgggtttacagataaggaacaaggctcaaagacgctgaaacacactgaccttaatcactaagtgactcagtcggaatgaaattgatgtttgccagatttcagatctatgctcttactaattgacataatgtcctcctgtaactttagagaaggattttggaaggctgccacgaacagaacttaaaaactgtgagagacattacgccttttaaaaaaaaaaagtgacaatttaggtgggggataatttggggggtggaaactgtaacaagaggaaaccaaatagtttatgattaagtgaaaagttgaagattttttttcctccatctgttgtttttaaatttctatatgttctaaaagttctgtggtggggaactttaacagtgaggaaaaaatgttttcgtaaagttaagtttaatcttttttttgtctaacaatataaaaatttgaacttgagtggtgcttcttcatccatactttagcactaactttggtggttctcaaactttgaatagcatctgaatcacctgtagtagttattaaaacagaatgatagaaccggcactcagagtttctgatacaaaagatgtagggagggactggataatttccatttctaggagatcccaagggatgtgggtgttgctagtccagggacccccactttgagaacactggtataatgttttacgagaagtaaatttttttttttaagatggaatctctctctgccacccaggctggagtacagtggcagaatctcagctcactgcaa

SEQ ID NO: 34016 - DNA, 2058 bp, Homo sapiens
aagattgattctctttatcgttaatgtgtggactgtatcaggcaaagtaaaacccctatcatcaaaagcctaaagttattaaagggagtggaagaaggctatcgggacatatttttctcgaaggtgtgacatcacaaataaaagaaaattaacgtatagtgaaatcatcactgtagttagagtcaaaatgccttgcctgtgttccaaactttgggccagtcaacctacagggtgcacggtttcctcattagtttcttcagagagtaaatgagacattgcataagctagcacctagcatacagcaggcaaatactgctggatttctttcttccactaaatgagaagaaaataatgactcccacatttacacgttttagaatattttattttgcgtcagcgaatagagaaaacaaaggagggatgagagaacaggaaaggaaaggggcaaaaagacaaagtgttaagcggattgacccaacgctttcatcgatatcctcctcaatttccttgatcttgggtctcgctctacacgcaggcctccaaccacaccggtctgtccggatctccctccccgtcagtggcggctgtccccaccacgcgcggtctgatccgccaccccgcccccacagcccacttttcccaggcccttggccatcccgcgcccggtaggaattcacctgcacgtaaacagccagggcaaccgtcctccctccttggagcccgcctcccgcggccccgggctccctcccccgccccctgcgccaccccggtgccccgccccgggcggggagagtcggggcgaggggagggcctgccaggtgaggcgcggtcaccctgggcctctcacttccgcccaggtgaggcagggccgacaccgagcccgcccgacccgggctcccacctgctcctccagcgcaccaggtaaagcgtgaggtcccggctgtgcagtgcgcgctcgcccctgggtgtccccgcgcctggaggccggccgggggcagctccctcggggcttcccgggcctgcctgccctgcccccgcgctctccccgcccgcccgcctggagtgggtgggagccggaggtggagggcgccgccgggcgctcagaggggccgcggcgaggatggggcgcccgcggcgtgcgtccgcgctgacccgggaggcggggcgggggcgccgtcctcctgcgtcgggcccgggtgaccccacggtggtccccgccccgccgcgcagggctcgccgaggccgcgggcagggaggggcgccgccccgcctccccaggcctttcgggcctcgaatctcggcccactggtattcgggggtggcacggatcctattttgcgcccagatcggtgcccctgtttcgctcccagagctgggcggagtctttccctccatcggtggccgtggaaggagggaacggggtgaggggacaaagaggagggggtgctcagagccgggctgagggggcgacttgggcccggccgcgtcgcggcgcctggtcatcccgtagcggaggttcccaagccagcggtcaggccctgggctctgccagccttgctgcgtagatggggaggttctgtcggaaagtgcttccagccttaggggaaattcctggactcctgcttttaaatcaagctcaggaaagcattttcagatcactcccactctccaaagcgccccagccgtcccgcacgcaggccgaattaagtgaacaccccttcacttggcactttgtcatatttccaagtggctcttgtcactttgaattccagttggttgtttactggcttgcctctgccatttagagggtgcccctttcagggccttatttttcgactgcatttagggtctggctattggtaggtgcgcgacaagtgtttcttaaaggaaggcagaagcctttggaaacccagaaggacaatgtcggttccactgaggatgatactaccacattctgggctaaattcctattggctgcaaattaatttgcacacatctatttgaaaggagtggaggcaggggcagcggttaaaaacttaaatctgtttgcagcattag

SEQ ID NO: 34017 - DNA, 4414 bp, Homo sapiens
tggaatatctcatttcagtttaaccacttttctcatgaacagccttttctctagaacaagaactttttgaagagcctaacaaaattacattaatctatttcattggtgtttatgtacctccaaatttataaaatggagatagtaatgtctagcacaaaggattgtgtggtttaaatgaattagtgtgtaaggaaataggaaatgttatgttattatggaaatatattaacaattattcagtttagaaaataaacacaaaagtttttgatactgtcctcaaagatggcaccacactataatgtttgtactctatcaattctttaactctctagttagattacaaaaattaataagtagatgcctttgtttagtgaagtctaaatttaatcttaaaattgtattctaaaatgcagccaattcttgatgagccatatgtgaattacccaattgtggattattggccagaagtttgcgttttatataaattgaactgaactttaggaaaagagaccaggcgcagtggctcacacctgtaatcccagcactttgggaagccaaagtgggcagattgcttgaggccagaagtttgagaccagcctggccaacatggtgacaccctgtctgtactaaaaaatacaaaaattagccaggcgtggtggtgcatgcctgtaatcctagctactcaggaggctgaggcagtagaatcctttgagcctgggaggcggaggttacggtgagctgagattgcgccactgcactccagcctgggagacagagtgagactctgtcttaaaaaaaaaaaaaaaaaagggaaagatgagtgagcagataaaggagcttgaattagtctatagaacaatagggtagctctctggaccggtcagtgactcagaatattgatgaaagttgtgtaactgagcagagaaaagaggtatgcctttatacgtgaaatgatcagctgagtctgatacacagttctacaactgagtcatatggccaaagtacaaagtgtgaaaattcatttcattaaagacattttaaattagattgggtcaaagacaaaagagaaagcaacagggaagacaataaatgtgattaggttataagtttctttattagctcttagggtacagtggtagtagctttgttggctattatttgaacagaggtagaatatttgttagtctcaaatacgcctagccacttcatgtagtggctagttaaaatcccactctgtatgtgtgccgtattaggagattcactgatctccattgtcatgccttataggattgtgtcatggcaaacaatgcgtgtaatttgtcaagagcatgaatatgatggcttgactgagtactctgtttcttttttttttttgagatggagtcttgctcagtcgcccaggctggagtgcagtggcgcgatctcagctcactgcaagctccacctcccgggttcacgccattctcctgcctcagcctcctgagtagctgggactacaggcacctgctaccacgcctggctaattttttttttttttttttttttgtatttttagtagagacggggtttcaccgtgttagccaggatggtctcgatctcctgacctcgtgatccacctgccttggcctcccaaagtgctgggattacaggcgtgagccactgcgcccggccgactgagtactctgtttctaagcaacaaaactcttcagaaacttggttataagtttttatactgtaatttcttgccagtttgtaggtgaggtttttatattataccttagttatctctgtcttctttccctagtatttatgtgtaatgtctttattccttagactatggtctccgtggaagattactgatactcccactagtattaataacaatgttaggtaacatttactgaatgtttactgagtgccaggtaatgttctaattgctttacatgtattaggctatgtattcctcacatgaaccatatgaaagagatactcttattgttgtcattttagaagtgaagaaactgaggcacagaaaacttaagtaattagtccaattcatacaggtagtatatggtagaactgaagcagttgggccccaggtctttttttttctttctttttcttctgccgccgactcctccaccaggtctatgcctttaaccatcatactatactgctctttcctttgtgagtgctatttccatgtgcattttattatagggcatccatacagtaaacttattacagaagacctttctgttttttcagcttgtgaaaaatttcatatcttaaaaactaagctactagatagtattctcatttttcatgcttatatgaaagtttagcaggtattaaaaattaatatagtgtgctcatatgcattgtgtaagagctagttttattgcttcagaagaccatcattgcaaatttaagaatcctaaactagtgcaagtaatttgttgtgggttaatgttcaataatgaaacaatgattaggtagtccaagagtctgtaatttttaatttctaccaaaaagcttgaaaaaaaattagaactgtatggattttaccttcagttgaccttataaattaaacatggcaagtagatattttctggtgttttgatttatgttgaactttgaataacccctcatgattataattcactggaaatgtttgacattagctaatttttgaacattagccatgatattgccatccttggtactttttgaatttcagtgatttagaagataaaatttattaaccaataattctcctccctcctacatcctattcctcattcctctcccctcttgagtgactcaatttttgccaaagctgatatttttgaaacactatttttatctctctcaaagtctgagagagataaaaatagaaatcataataacatagccattgggaggtgattcatatgtaaatactgttagtaatgctttaaaaatttgctcgaaaccaaagtcaaatggcgactcattaaaaagaatagtggaaatatttctccctataaaaattgacagttattaatttttcttaaaagaggaaatgggttataaaaccaaaatataaaatattgcagtgttactgagtcttgaatatagtatgccttagtatttgtgcaaaaaatctagtgtgtagttttgactgcctattaactctgttagaattctctttttaaaagatttataaaagttgtaggacgggattgtatacatttcatgtatgtctttaagttgtctttttccttaccctatgcacaacagaatgactttctgagcacattgaaaatgttttaaaaataggtaatacatacatatggcagaaaaattcaaaggtgtataaagatatcctgtgacaagtaaatctacctctgaccataatcccttacttcttccaggtaaaaaaccttggtttttcttgtccatccttccagaaacattttatatatacatggttatataagtaatagtacttatttaattttaaaaaaactttgacatataaatggattatatcatacacactttaaaggctctgtattttttttcttaaaattatatgctctttcattttggtacttatagagctacctctttttaatgactacatagtatttttattgttgatgtacaataatttatttcatcagcctcctgtacccagttggtgggcattttaagtaaggctttagtggatatttttgtgatactcttttgttaaaaggtgggaataaatcttgtaataggtaggtgataaattcctagaagtggaattactcatcagaagagcatactgtatcttttaaattttggtacatatttaccaaatagcttgcatttaagtttgtgagactcaaatatatttagaccacttaaaatggatcctttcttatgtagagttatttctttattccgataattctcatggaagatagtgtaagcaggtgtgtaattcatgaatttgctaatggttttctatgatgtggacagattaagtgatagcaatatataactatcaattttgtttcaactttatatatggcggtaattaatttattggcctttgtagctaagtgggcataaagtgtttatattcagactatgatattagtgccccaaactctatttctatttcttccacttaattttatttatttatttcttcttccacaaattttaatcttgttttacttttgtttattagagaatttagcttaaagtggtggggttggggggagggcattaggactttaatttttaccaagagatttgagaatttgagtaaatgctaatatcagtatatagttttcaatagcctgtgcaagcctactgtcttcatgttcatcttagctaatcagtttacagaatgtaggatttagcatttgataggtattga

SEQ ID NO: 34018 - DNA, 2022 bp, Homo sapiens
tattaattagaaatttttattaataaatagcctgtttcttgaccaattcagataatgacaaatttgcaagcttgtgtttctgtaatttattgacatattatgctgtacccactctgggccagaaactctgcctacacgagacagaattagtttcttctctcattgagctgacaagagagtggggctgcgagcaataaatgactaaagatgacacaacaaaataccgtccaatctcagctggaattctgcttcttccctgaagcttgttctgatggttattggaaataatacgtatgtacagggctctgggcacacagcctgatggtttcctaagcaggtatgcagagagaagttccacgctatcagtcactaaaggaaccaggtcagtttggcaaataacatgttttaaccctttttctgcattctactacagtttcctttaattactgaaaactaccattatttttccttctaggaaatataattaaatattaatgttgtcagtgccactgctgatgaccacgatctgatgtggtgcggagctcttgttgagcattattgcatgactgtgaggtgaccaggaagcaaacttagcccaaccccagcacatttctactgcactgtaaccatagtgagcttgcaactcaccactttcatagtgattaaaggactatgtcctcctgataattaaaatatacaacaaatgattgtagagagtgttcctaaaattacatttggcttttcgcaatgctgttttcaaaattaaagcatgtttactgttttaagactgagttaaaaatctgaggtaataatcagatcgttttttatgaatctcatattcaggcatttctaaggactataaaggcattttgagctgggatagggacttatcttagtgttcttagtgtgcataagaatttcataaagatctttttttttttcttttttaaatggtgactccttggccccatccccagagatttcgactttgtagatatgacatggatcccagacaccagcacttcatacaggactacttctggtgatcctgggaccacagtgggacatgctggtttaggcatagtggtacacttctgtagaaaggcttcaaaggacatgtcgagcaaaactgatactgtgagcctgatagtttgagcatgggcgcctatgtgaccaccaattaggatggataaacttccttgtactaaactaatttcattttatgttttaagcctaaaggtggtcattgaacttgaactttgtcattgtaaattgatcatttgtcaactaggtcttctccattagataattgcctcagagatacccccatctctctctctctctctctttttttttttttttttttttttttgagatagagtttcgctcttgttgccaaggctagagtgcaatggcgcaatcttggctcactgcaacctccacctcccaggttcaagcgattctcctgactcagcatccgctaacagtgagctgagatcatgccactgtactccatccagggtgacagaatgagactctgtctcaaaaaacaaacaaacgggctttctgctccaaaagcaaagtggtactctcaaggcaggaagcctgtacttctttccctaagctagctttgaaacaaaaagtcactttctttatactaaaaaataataatttaaaaataactcattctctatctcctagaaaaatgagggtactcagttacaaaactggcttaattcatgaggagttttggatgatattgttttgccattcacttgtgattaagctctgtgacctgtagtgtccttgattgtgaaggttctggactagtttccttccatctccaaactaagtgtgatttcactgttggttgtttttttgttttgttttgttttgttttgtttttgacagagtttcattctgttgcccaggctggagtgcagtggcataatcttggctttctgtgaccttgacctcttgggttcaggcaatcctcccacttcagcctcctgagtagctggg

SEQ ID NO: 34019 - DNA, 690 bp, Homo sapiens
tgtcatttctctccaagtttcaaatccacatttttttcaatcacctgatttaataccaatttaattcattcttattaaacagaagttctatagggcagctacgttagcaagaaatatcatggtagacatactctcccatttgggtactatgtggcaaaattcatctatctagaaattgaaataaagaatacctgttctttagctataaccatatgttgttctgaagtgacctcacttaacccctcatcatgttgcattctggtactgcttttgataatttaaacgtaggactacagcagtttaaaccactggatattttttaaataagcagaatagaaagctattttatatttgattaagtgttttattttgttattccccctgacgtgaactttgtacggtctatttcatgaggagtgtggtttgctttggcatgtgatccaccaaagccaagctccttttattgttattgcttaagtcatatatttttatacaaaacatcttattaccttagttttattttaaaatcaaagcagagtttgcaaaaagtctatgaatcacagtgaaagaatgttaatgaatagtacctttgaattccagatttggacatttctggtcttaaagaatatgaatataagcaaaaatattatgtaagctaagtcaaatttaataaataataaccaaatggaa

SEQ ID NO: 34020 - DNA, 736 bp, Homo sapiens
agagaagtccataatccccccagcaaattcagaaaaacacacacaccgaccccccgccgccgccccaccccgccgataagaacaggctgccagtgttgaaaaggtaatacaccacaaaggaaatgcaagcagataaacatatgaaaagatggcagtcacaagccaaggcaatgcaaatcaacaagcttttttccatccctaaaattaaaggaagtttatccgccctcccaacccccagtcccttgagggaagtgctaaacatttcttgccctttccaaccggtgctctcctgtattgtatacttttaaagtaacctccttaaaatacaaagcagaacttgggagtacactggtgaaaatctccggtctccctaatcacttttttttttttggcagggtcttgctctgtcacccaggctggaatgcagtgatgcaatcatagcttagagtaaccttgaactcctgggctcaaataatctgaccgcctcagcctcccaagtagctgggactgcaggcagaagccaggacgtctggtccctgagcccttttgatggctaccatccaaccctgagacaaaatttgctaaacttgtaccagcctctgctttcttcttgatcagggattttgaacccagagtgcctgggtagtgtctggctagaattcagagtatctgatatcttggatgtgaaaaaggtcacatatatttattgtcattaaacgctaatcataatttagca

SEQ ID NO: 34021 - DNA, 640 bp, Homo sapiens
atacaaactctttccccgaaaagccctcatgactccctggacttttcttttaccactcgttctatgctcgtatttgtgaggttatttgataaatttcagtctccacgaggtcaagaacttgatctggcctgttcactgctgcatgttggcacctggcccagggcctggcatttggtcggccctcaacaaacattgttgaaagagagaatgctgcacaagaacctaacggtattcattcaagctgatggaatctaaatcctagtgaatgggttcttacattggaaagtactggaacaaaacaaagattttaagcagggagtcctgtaaaagcctcctaaaggaggagcctgggtttatgtaggcccgaattcctgctcctgaacttcatctgctgtgccttgtcaatcctaagcctctatgtaaacacagagtatgtactgacagtgtttacggagaagagccacagggccagtcccaggggaggtgcaccttttaacagggtccatctggaggacagcctgcagctgtggactcctcgactgcagacatggagagcagaggaccccattcagctcaggaggtgtggccagagagaccacttggcgagggttagtgttcctcagatgcctctgccagaact

SEQ ID NO: 34022 - DNA, 1529 bp, Homo sapiens
atcgtgtttaactcaagatgctttctccccatgcctcagccgggtcactggctgcatctgatcctcctctggccctatttggtagataggactttgcccaggcctcagggggtcctcctccctctcctggaaaatactccctctttgccctaaaggcttgcactccagggcgcttaggaactaagacttgagtttggcagccccgaaggatgcccagggcaagagttaggttcagacccagcgtagcggccatgggctcgactttccaactcccatttctggccagtctgcggggtcaaagtacccagtcacagatttgaccttaccggagaggcagaagggaaaggagcccacaggaggcatgcgggctgggcaaagcgccctcggcggcgtctagagcactcggagctgccccattgcctccgcccaaggtcgcggcccaaagggagccctggaaagttcagccaggggccgaggagtgccagggttggcactacggggagacttttgcgacaggagagagactaagagctcgattccaggtagcagtgggagcccgcggcaaagaacgcccagtcccgcaggctgcatcccagaccgcagcgcctagctcggaaaagctgggcgggggctgcaccacctgagtcgcaaggacagcacggcctccccctcctcaccagtgttctccacccccagaattggggcgcggagagccaatctgggctggaaagggagcggcgcccacctttgggcagcccgagcagccccgctccttttctgtcgcagaccccaggctgggaggcgggggcgccaggtcggcccaagctgccgcagccactgctttaaagggagccggggacgcggcgctggggactgggcgaggcgggtggcagaggcaagaggagagtggtcgagcgccggggccaacactcgggtcgcgcagggcgggtgttgaacaccccagcagacgcactgcgggggactggggtcgcagagtcccttaccttggcgagctgcggaagtcctgcgcgaggcggcccgcggtgcacggggccggggcagctaggcgcacaccccggcttcggagcgcacgcaacctccgggtgcactgtccgcgtcccaggcgcgcaccccggggctggcgcaccctggtcgtccgcggcgcgcacaccctccaggcgccctctggccgacggtctcggccctggccccggcgcacccctgcgggcacacccaccgcggcggatgcgggactggccaggcgccgccagccgcggcttcgccccgcgtcgccagctgccaacagcgcccgagtccccgccttcgctaggggagaaaaaaaagactcctgacgcggcgcggactttggtgtgtaggaaggggcagaattgcgaaaccgaggggagggtcttagcctcgataaactcaaaagcccttgataaacatgagcttagaagaaaaactttttgaaaagagaccaaaaactcctaacctgttcatagcgcttttcagattcccaaagtgctttc

SEQ ID NO: 34023 - DNA, 2793 bp, Homo sapiens
tcaggctggtctcgaattcccgacctcaagagatcagcccgccttggcctcccaacgtgctgggattacaagcgtgagccaccacgcccgaccctgcttgtactcttgaaggtcaacgtgtaatcccgccactccccagctcagaatcatctaacgactcccatctccttactcggcttacccagggtcctgcctttctcactcatctcatctcctcccatcttatttcccaaattgactgcgctctaagcgccctggcctccttgcttcttttcaaaacaccaaccacattaagcttcaggacgtttgtaacttgctgttctctctgcccgcaccattcttccctcagattcctccaagctttttcattcagctctgctcaaatgtcaactcaaagaggtctttccaggctatcgtatctatcacttatcttagcgtcacttgtatctccctctccagaatgtaatgctcctttatgacagggaatgcctttacatccctcgcgccttgaaaaatgcctggcacatagtaggcaccttaaaaatacttgattaaatggatttgggctgaacgtatcctgcttaactgcagcacttgagctgaggtcacctcaccaaagcaggcacacaaacacaaaaggaagcacacaaccagatgaggcctgcctgccgctcctgaaccctttgggagggctcgcgcgggaaccctgggaagctcccgcggccggagctgggcctgaaactgttctttcgtttcctcctgcggccgagaaagggaagaggtaaacaggcgaaaatgaggcgagcaggggctgaggaccgggcctcagctctacagcattcgcctgagcatgtattgttatccgtggcagcgccttgtctcattggatggccctaggcctagtgtggccgcgactccgaactgaaagcccaagcgcggcggcgtccagccgggcagccattttccgaagctgctctcttggtaaccccgcccgggcgcgtacgcacgaacggaggcggggcttaccgcgagggcctcgctccggaagccgcaccctccgcggcgtcccaccgtcgaggattaacaaaacgccaaacaagattttaacagtcggcagcgaaagcgcgcactcgagcgccaatgagagcggaaggaggggcaccgcgcctgaggaacactccgtatgtcgaacaatgattggctggagcccacctttcttcttttttgctattagatgggcttgctgctcccgcccatctaattggctttggtctaggtacttctgattggcttcccccgggcggtgggaggcgcggttttggggattgttcatcatggattggtgaatttgggctccttctcgaggtggtggcccatcccgtctgctctctgtcccgtctcccgacccgtacgcttttccctcaactcgcgcgcacgaatggttaaaaaaagggtgtgaggctcgagcccgccagccaggccgctagcacctcgcgcgcgccctcagcgaggacccgcacgagctgcccggctctgtgcctgcgttgtttgaaactgtggaacccgttaggcttttggggaactacagtcccagctggctccggagcccgtgcgtgccaggggcgagtggccgtcgcgagacggctcctgcctttcgtgtctctgcagcgtggagactggaaccggcaatttcaaaggacgccacgttcaatcgcagcgctggcgcgggcggaggctaaaacacgggggtcctgagactgaggaaaacgcgccaagttcccctcggtggcggagtgctaaagaccctagcggttcaggcgttcggcgagcggggccgctgcttgttgcgctcctggctctcccggggcgggcgcagatgggcgccgctcccgggatgtagttggtgttggtgcaagacgggagcgagcggcggtcggggttcccgctcttgggagcggatggtcactcccccgcggggagggcgagccgaccagattttcctggggccggggacccggcgggctcggggcagggactcacctgtcgcacccacactcattcgggttggacttgccggcgtcaccgccgcggacttcgctttgggccatgaccaggtaaggagggcctgggaggaggggccggctcccgggcgcgggggcaagttcggccggcgcgggagaggagctgccggggagaccccgggaccgtgttggcctcgcaccctggtcgacctgccagggggagccgtgtgtgcctcgggcgtggcgcctgtcttgccgccgccgggacgcgagaaggcaggtgcgggctgggcgtaaataggccaactccgcggcgagggcgcccggcgcgggggtgtgggccgaggacgccgccgccagcctcccccgaccgggcagcctggtcgctgctcgtccttccagctttctttccgttcccgagagcggtgaaggatggggagaaagaaacgtttccacgcaggttgccctgtgtcggtaattgcgaaattttaccgcgcattttctttcacttacactttttcaagaagtgtttagaacgccgcgtgtcttaaaccttggcgaagatgtccttgtagatttttgttgaaaaatcggaatcgagtcgtgtcatcttataaagaatttaaaactattgggactgagtgttcacgctgtcaacagataatggtcgattcgtcgtgctttctgcgaaagttgatttagttacaggagaaatattttggatgtaacagccccccagttacaaggaaagccaggagcaagaaatagcaag

SEQ ID NO: 34024 - DNA, 450 bp, Homo sapiens
catatgttactgacttcagctgagccaaaaattcactctcatgaaacttgcatttattagtgtcccacaaatcctgaatgacaatttggacagtcaagaatctctagtctggtctcaatctactatttctgatttttcttccagtgctctggttccctggcaactcaccactgtcattactgttcacaggcattccccaacttgaaatgctttcctttccctgctctccaaacacactgctattaacattttaatgacctttggtttcagcacaaaagtaccttttccatgagatgcctgttacctcagtaaggcattatctcccacctctgaatacctacctattcctttgaatccctataccaatcttctaataattagcacatagcttgattctcaacattgtctgcaaaatgtaatccctggtgagacttaaaaatactgaaacct

SEQ ID NO: 34025 - DNA, 730 bp, Homo sapiens
gtctaatgagacaattgagcacttgataggtgagtggttctaactgagatatgttctcagtataaaacatacaataggatcttcctatacaacattaattaaaaaacaaactattgtagttaaaaaggaaaaaattagagatactatgtaaaaaagagccaaaataccttgtattttatttgaaagacatatctccataagattacacaacctcgtgtaggataaaggactttgctttgcttggaatttaaacaatttaggctcttaaatgtcctaaaattctctgtagctaagaaatttttatattggttcctaggaactaggaatccttaaattaggccctacatttgcttacaagtttattttccttggcataaaattttttagtttttacattactggttatatttgatcagggttctatttaaataggcacaagttcaagcaaagatcagattctgcttttagcagtgtgtactcagacaggaagtattaaaaggcaggcagaaaatcctttataaaattactactttcaatgcattttcccacgttgaaatgcttctgcagtttataattaggcaaattactttaattataatcaataatgctgttcaaattactataagaattatacagatatttataccaagagacaatatactagaaaccaagactacgtgaccattacctctactctgtcagtgttatttgtgagaaattgcacaaattt

SEQ ID NO: 34026 - DNA, 3540 bp, Homo sapiens
taattggctgggctcacgcttgtaatcggctgggctcatgcctgtaaattttgggaggccaaggtaaaagaattgcttgagcccagtatttccagaccagcatgggcaatacattaagacatcatctttaaaaaaaaaatgttattaatctcctctttttgttaaatgtatattatcaaaattgttactaagctaacaaacttcagaaaaacttatgatgggcaagctgcttgtgacattgaaggtatttaagattcaattctagtttggtcctagatgaccacatatccattgttccttcaacgagcacatggtaaagagcctagaacacagagacacagaacacagtggagaaaagggagtgaaatgtctttaatgacacttactatatatgggattttgtgacaatatacaaggatggttaagacatataaggtgatgcaaaaaaacatattaacaattatagtgacaaaaaatgaggagcatataattatacattgatttatacagagtaccagaggaacacagcattgagagccgtaacaccacctgagggagtggagaaaggcttcagagagaaagtgttttttggaatggatcactgtttccaaaagaactaaagtacagtttgagaaatgcatacttaattcattacttttttcccctcaactttaataataaatttacccaacaaaaaagtttatttttgacttgtaaatctcttaaaatcataaaaaagtaaaattagcttttaaaaacaggtagtcaccatagcattgaatgtgtagtttataatacagcaaagttaaatacaatttcaaattacctattaagttagttgctcatttctttgatttcatttagcattgatctaactcaatgtggaagaaggttacattcgtgcaagttaacacggcttaatgattaactatgttcacctaccaaccttaccttttctgggcaaatattggtatatatagagttaagaagtctaggtctgcttccagaagaaaacagttccacgttgcttgaaattgaaaatcaagataaaaatgttcacaattaagctccttctttttattgttcctctagttatttcctccagaattgatcaagacaattcatcatttgattctctatctccagagccaaaatcaagatttgctatgttagacgatgtaaaaattttagccaatggcctccttcagttgggacatggtcttaaagactttgtccataagacgaagggccaaattaatgacatatttcaaaaactcaacatatttgatcagtctttttatgatctatcgctgcaaaccagtgaaatcaaagaagaagaaaaggaactgagaagaactacatataaactacaagtcaaaaatgaagaggtaaagaatatgtcacttgaactcaactcaaaacttgaaagcctcctagaagaaaaaattctacttcaacaaaaagtgaaatatttagaagagcaactaactaacttaattcaaaatcaacctgaaactccagaacacccagaagtaacttcacttaaagtaagtagaaaataaagagggttcatgtttatgttttcaatgtggatcttttaaaaaaaatatttctaaggcatgccatttgaaatactttgttgcattgttgaaatacttttttttccaagaaaaataatctccagaaaataaaatttcctattataatttcaagttagttttttgtttccctaatgttatatatgaaaacactgaaaatttgcattttatatgaaaattacaaatcggttaaattatacaatctagaacactatgtcattacactattgtaaattactgaaggtaagtaaaaagttaaaaaaaatttaaaactattctccagtgtttaaaacagattaaataatacagtaaatggaaaagatttattcatatgaaaatatgctgggctttttcttttaattgaagttcagaaaatcaaattttagagatagtacaatttaaataaaatgttaaggacaaaaatatgtgctatttgaaagaagcatacaaggggaaggaattgccaatattcatttttcaaatccattattagtttaaaaatttagattatgatagtgttacaggaaattaatagaaaagaaagaggaaagcaacttataaccaacctactctctatatccagacttttgtagaaaaacaagataatagcatcaaagaccttctccagaccgtggaagaccaatataaacaattaaaccaacagcatagtcaaataaaagaaatagaaaatcaggtaagtcagtattttaatggtatgtcccatctttcacacaggtctgtaaaaacactgaatcctaaaattatttacaagctttaactggatcatgagtaaaattatcacatcagcataactgttaaaattgcaggctctgaagctaataaactacctgcatttaaaccatggctctaaaactttgtgtgaccttgaataaattacttcacccctttatctctcagtttcctcacatatactacaaagataataacagaacttataggattattgtaagaaaaaaaattaattcatagcagccaatgtcatcttactaaaattcaaattagatcatgtttctctttgctcaaaaccacacaatagctttccatttcactcatattggctctttagaccaagattacccaacccttcgtcatctcactgacttcacctcctctactctagttattctgaccgctttaccagtattcaaacacatcaaacatactgccacctcaaagcctttgcccttgttgtttcctctaactggaacgctcttctgccctggtatctacgtggcccactctctgatttcccttagggtcgttatcaaacaaaaaattcccaatgaagacttacaaggtcacttaaccaaaaatcacaaccgcctggtcccatccctgaaaacttctacttccttagctacttttctcctgcacactcacctttatttaacataacataaattttagttatttatctcttctattcctgcactaaaatgtaagctctgtgaatacagggattttttccattatcttcatattttccattatttgtatatactccagaatatagaatactgtatggcacacagtaggcatttctgttgaattaataaatgtaatgtcatattcacacagaagcgtgtgctatgattattattacttggattactagaaatagtgtgcctcataattaaaggtcaacattcaacaatgtaattaatctacaatgtaaacatctggtgaagtgacagagggaagcacttgtttagaaaaaagctatgtcagaatccatgtattctaatatgcagtacaatagtttaaaaatattaataatactctcaaacagctattcaagaggattcaaaaaacataatataaactcagagaaactggtaaacaaaatcattttcaagagatataaaacaaatattattaccaatttccactaaacaaacataatgttagtagtgctgctaaa

SEQ ID NO: 34027 - DNA, 834 bp, Homo sapiens
actaattattgtaaatgttctatcagttgttgaaaaagtatattcttttcttgtgcatacagaaataatataaattttttgagaccaagttgccaacacatgaaattaatttttaaatggtccttattcataatatattcagattatttctagtcttcattatttctatttcacccattaaattatattttctctttcggtacttattggtctccattctttactccctgtttccatgcctttttggtgagtgaagcacaattccctccctaggcctggccacatgccttgctttgccaataagcaaacatgatgcaaacagaggcttgaaaaacatttgcacaatttagtttgctctctctcttgaacttttgtcagagctatgagcacatgaccaagctagcctgctagaagatgacagtagaatttgagagacatgtcacagagctgagtcatttctgtcttcccagtagaagtcagcctatattagctgatctcagccaacctccaaacttgtgaatgagcctagttcactggagtagtctagctgataccctttcctctacattggttgtttactgtcctgtaccactgaaaaaaatagataacatatatctgtcaacaaatagaacaaatgtcttcaaaactattgtgtgggtttgattttttttttaaatatctatgtatttctaataattttgacttcacacattttatttatttatttattttgagacaaggcctcactttgtcacccaggctggaatacagtggcattataattgctcactgcagcctcaacctcctgggctcaagcaattctcccgtctcagc

SEQ ID NO: 34028 - DNA, 1953 bp, Homo sapiens
ccacaagtaggtgaaaggctttgaaacctccacctcaatcacttgctttacttcaagactgcaatcacttgctttacttcaagactgctaacatataaaaggatgtcagtgtataaagaacactgcctatcatccatcttctcgggtgctctgagaaacacaggcgcacagttaaattcacaggcgaactcagaacaagcttcagcctgcaatccgtcagggattcggcagctgcacaccgaaggtgcagcccgcagctctcaacttttcattctgtccacacgttttcaatcctggacgcacaagtccactttgaacctggcccgagggtgcaaagagggttcctgtcagatttctcaggaagagagagacgcgtgaaggaggggcggcctcccacccgccccgagccgccgcgcgtttctccttttgttggggtggaggagggcggaccccgcaccctctaggggccaagaggggtgggcggagagacgggagggggcgaaacgccgcggcggcccccgacgagcccgggggtgggaacacaaagaatttgggaagcggccgaccgcccttccataaacctccgcagaagtccaggcccgggccgccgaggagcaggaggaggcgggcgcgctggagtccgcggccctctccgctccctgccgaggctcagcggcgggcgcgggctgaaggccggggttcgagggcggcgcgaggcctccgctaccccctcagccaccccgaaccccttccgccccgccgcgagccaggccgcgggatcccggtgccggccccgccacacccacccgcctcctaggccaggcctgggaggactccgcggctctttctcgggcggcggcggcggcgcgccccacgccggatatttacctgctgatcttctgggcgaaggcgcggcgctcggccatggctgctgcggcgacggcgacggcggcggcggctgcggcgggccgggtgcggaccggcgggcgcgtgcctcctcgctcgtgctccctccctcgcggcctccgccagtccgggctccggacctgggaggctggggctggcggccggagccaggaacgagccctgccgtaatgttccttagaggcgcgcaacgagaaaccgctcctcccccagcgcgtcaatcccggcgggaaccccggctgcggaaggcggctgcggccggcgggagccgaggggaagaatggagcgctgaggaagcgaggcgccagccccagccgcttcgctgccgcggagcctgcacgaccgagaggtcgcggagagaagccagagacaggccagcgacctggcgaggcaagaaaataagataaccgaacgcgtagggggagcttggctttcccgaaatggaagggaaggaaatgaaaggtgggctttgccgagggggctgtgctttaaccaaagccctggatgactgggttcatgtttctgcagcaccggtctccgagctttttaaagcacttgggtttctgcttcggcctcatgaatgcagcctaactggagaaacagtggtttttcttatagagaaagagccagaaaataccttgctcctgcagcgataacaatagtaatagttgacttctggtgcttagccagccactggattaaagtttttcaagcacgagcgctttgaagtagatcgttactatcactattttagagggaaggaaattggcttggaaaagctaagtgactggccccaggtcgcacagatggtaaactcttccactgagactcaaacccagagccggttcttttctttgaggacagttgtttccgtattattaaccccttttggatctctctctgtctctcatacatacatatatatatatatatatatatatatatatatatatatatatatatatataaaatccaggtgagctctaacgttcacccccattttgatgttctgttaaataagctctgtgt

SEQ ID NO: 34029 - DNA, 2294 bp, Homo sapiens
cccataatgtctagaatatttggctcctaatgcatatctgttgatactgaaattatggtgacactaagaaaaatatcttggtttcttgtagtacctttcctcttaagtattgcaagaacttaaaatgtgtatttatttattgttattattatattctcagtatgtcctggtggaatatgttggatacctgttttcctctcttttaccattggaaaatctgtagcttggagccattaggtcacttgccagagtcacacactgagtcagaggtgaaagcctcaattagtcagatccataacttcctgtctagtgctgtaacttctgtggaagactgtgtatttatataacaatgctcattgcagtaacacactgcttttatttattgatttatttattttagacagaatccccctgtgttgctcaagcatggaatgcatagggcactgcagcctaaaactcctaggctcaagcaatcctcttgcctcagcctctggaggagtagctagtaccacaggctcttgccaaggcgccctccagtaacacactgttttcagatgcttgtttactaaaggaaaagatagtctattcaaagaggacagatatttggcttctacctaagtatagagcccacctaggtgttctaaaaaacacgaaggtgaactagacacagacctgctctcagaatgtttgagtccattgggaaagatgaaccaggtactcacagactgtaagtcaaggctatcactgtacctggcttttaagaccctctgtgataggaacccagacttattttgccactttcttactctgtaaccttaggcaagctacttaacttcatctctaaaaggaggaaaataattatatctacttgaaagggtgttgtgaagatttattgaattgattaatataaagttcttagaacagggcctggttcatggtaagtacgatgtgtgtcagctgttgttattattatcactgttactgtcattattcatcctatacttaagcttgtcctgggtgtttgatagtccctgaattggttgtctgctctcatactcccagccagatgttgcatgcctttatctctgttctccaaacatcttttcactactctcttagagaactggccacattttgctttgaatagttctttgtatacatgactcactagttgccaaagtgtctgaaaggactttgcatgtactctgcagcttactggaaacatttagagcaggaagaggacaagcaggatcacgctgtaagcagggtaattcagagtctggggaacactctaagcaggaagggtgaccccctacctctggggaagagctggcagtcacagaccaagtcatgttggctggtatccctgccccacagggtttcaatgtcaggaaaagatatggaacgcagcaatgggagtgacagtggaattgcttcagctgactagcatccatgctccctataccaccccctacacacacacacacacacacacacacacacacacacacacaggtgtcaatccactatacttctggggagctcactccaccaccctcagtttcaagggtcttttgacctgggcctcaccaagcaaagcagcacactcctctggcttctgtaactgatttagggataggctcatgaatcaaaccaagacaatcgggcccaaccagaattagaaattgcatttggtataccagggcactccatctaaagaaggcctacctgagaatgaagccaagcacagcagagaggagagcaaaaatattgaaaaagacaagttccttagaatatagcatgacttgagccttggactttgcagttacatgagctaaaaatgtgctggaatttttttgggggtgtggctggtttttcattaggtttgctttcattagcagttcaaagtcttacctgatacaggacttcattcagttaactaacattcattaagtactatactagaccctggaaatatagtggtaaatagcgcagtatttctgtcctcaaagagtttagggtctggtagaagagaaaagtaagtaaatagtaagttacatgctgagacaggaaaaattaaggaagctattggagtgcatataaattcttgatagcaccagttctcaaatatgaggtgttaaaaactggatggaatttaaccctgtccttagccctgttatataacctaggagaaaggctggctgcaactccgggagcatgagtagcccaattcagaattcagggcccaagctccccactgatggaaagatacaaagaaactacttgccagaagc

SEQ ID NO: 34030 - DNA, 2833 bp, Homo sapiens
tgttatttacttattttctttccaacttttagtgtgggcccaagcgggtacctgtgcaggtttgtttcacgagtaaattgtgtgtcatgggggtttgttttacagatgattttgttactgagataatcagcataatatgtgatatgtagttttttaatccttaccctcctcttatctccaccctcaggtaggccccagtgtctgttgttcccttctttgtgtccatgtgtactcaatgtttagctcccacttataagtgagaatatgcagtatttggttttctgttcctgcattaatttatttagagatcttttatttaaatacatgaattcattttcaggaaaagccttccagagatataaaagtcaaaatccaataaaagaatgacctttgttatggaaaaacaaagaaagaaagaaatcaggtcttttttggaaaatctgggacattgaattgttacacgtaacatgtgtccccctagggacataggtcactttcagtatttgccaaagcattaggtcagccagacatgtgaaacatctcggagcttaataactgagctgcttcaatgtgttttgataaaagtttaaattctctggccccaatttattgaacacatgcctttgacaatacagcatttctttcttaggctattagtgaaagattaaccatctactcagtgattgttattgtgcctgtatgtgtgcagtatgaacagttatgtaacaaaactgcaaagattagagacctttaaaaggatctggggaaataggaagagtctataatcttataggaaaggaatgaattatgcaagcaactaaaagtgtgtcaatattctctgcttcacaaacaaattggaaaccagtggtaaactttagatcagaaacagaaactcaaaaaatgaaagaactggccatgagcagtggctcaggcctgtaatcccagcactttgggaggtcgaggcaggcggatcacctgaggtcgggagtttgagaccagcctgaccaacatggagaaaccctatctttactaaaaatacaaaaaattagacaggcatgatggcagatgcctgtaatcccagctacttgggaggctgaggcaggagaatcacatgaacccaggaggtggaggttgtggtgagcctatattgcgccattgcacttcagcctgggcaacaagagcaaaactctgtctcaaaaaaagaaaaaagaaaaagaaaagaagaaaaagaaagaacctagaaacttagaggccaactaaggagacaggcatttttataaaaagagttgaaagaaatttgtggtagaataacagaaaatacagacaagttaaaagaaaaaagaataaaagccactaaaatgtcatgttaagtattttagtagacaaatttatcataatttgcacaaaaattttctggtttgtttctgattttttagttttataattaaaatacttataattaaaatgataaatattcttataactaaagtctctggaatccttcattagcccctgaagataaactctgagaagtggaattgtagggtatattgattaagattctttggttgcaaatgacagaaacccaactggaactggcttaaggaaaaaagacttgattgactcgcatttattcaatgatttttttttttaactattagagtttttattcatttgaaactatggatacatttacttcccaaatcagagcacaggtctggccaaaataaactattatgaatgttgaaggcttttttagagctttcacctcagatcattcctcatacacacacactgatcgatacttagctaaacaaggaagggagaccctctacagatctctggagctctcctatgcagcagtcttctcccaggtccatttcctcaactcacagactgtgaggctccacttggactcctcctctttgcaatataatatggaatctctctaggcaggaaagtggggtgatcactcgctctctctctagggatcattgtcctccacctcctgatagccaatgtctgaaaaccattgtgtcatgtatttggtctatttttaaaaattgtttcagatgggagagtaaatctggcccttgtcactccatcatggcccaaagtgaagtctctatctcaacaattatttctggatggcctcttatgtgctaggcccttggcatccctgcttttgtggagcatgtgatcaaactgcagaaatatcagaagtagagctggctccagggacatctggatccaggaatataaatgctaccagatttcatggtttctgtctctctctctctctctctctctctctctcttactttctttctctctctctcaccctctctccccctttacatatctgtgtctctgcatctttctgcacgctgatgttaatcaaaacgtctaagatgagctgaattagtgaagagtacacagccaaagcaacttggaattgaattctttcaagcttagtcattttcaagcttagtcattttaggagagagggaatttcttttcctcagcttcagtttaaaaactttctagaaaggaaacataagcccaccccttggacatatcattgcacctagggaagtgagtaacttaaagtgacccaggctggatcctgcctatttttgtggccagggatctggaatctcttagcagaaaaagccacaggggaatcatcagctgagcagccattcccgtttgtgtcttcaattctgggtatactaatttgtgacacttaaaaaaaaactactttgaagtaatttctaacttcaacacattgaccaatagtttgtattaagggtcagatgtttgcctagcgtag

SEQ ID NO: 34031 - DNA, 888 bp, Homo sapiens
tccacccgcctcggcctcccaaagtgctgggattacagacgcgaaccaccgcgcccgactgtcctgtgttttaatgcttgaaaataatctgaatatggaaaatgagtgcacatatcccttgatgttttataaataacctacagtcctaataatggcttggcttagagttccttcacaacaggaaaagaaggcatcctggctttttttttttttttttttttaaatcaaagtgaggcttgggttggctctatcttggtcctgagtgcgaggaaggagggccgcaatgcatgctggatcttgcagttcctacgccagaggcaagggcgtgatgctgcatggcctgctggtagttgaagtccaagtgctcgagaggaatttatggcagccgtaatgtggtttgtctatcagagagacaatgctcacagacggatactttctcttggttctgcgcttgctgcattggtggattagcggcttggggtggcgaacaggtgggaaaaagggatggataaagtaagcatagcagaggcctttacgccgctgctatcgctactgccaatcgcaaggctttcgtatcccggaagtggctgatctgttggatttgacgcggaggcggttcctcttactacggtggccggggtgctcaaagtacctgtagctgcggcgctgaggtcggaacgtctgcgtgtgtgcgggctggttttgtggcggctgctgctagagctggagcatttgccgggttggtggctcctgcacatttttacagttctccagtccttctctttcggtgagggatcggcttgaggctaaaggagtcaagaagtttgggacttagcgtctctggtccccgaatgactgggtttcttgcgggggtccgccttcagtgaa

SEQ ID NO: 34032 - DNA, 764 bp, Homo sapiens
gccctgtcccgggaggggcgggggccccagtggtcttgggcaggaaggccgcgtccggcccaggggcgagaaggctgcggcgtccgcagccagggctggaaggcctgggaggccgcgctctgtgggccccggggcctccattcgggctgggtcgcgggcctggacggggactgtccagaggcatccgaaagccaggccaacttgcctggacgtaacaagacggaagggctgggcgctgaggtcctgccagcccggccgccagagggagctgagcgccagaggaggacaagccgaacccttcaggaggccgggcgtctccggagaccgaagcgccggaggacccgaggaggtctgccccgcgcgctgctctggagactcccggggcgggtggcgctcggcctttccgctcccttccttcccacaagtcccttcccgcgcgcgccccacggccctgcccgccctcccgcgtcagcgccccaaccgtcaagccagcaattgaaacgtttccaaaacggtctatttatttgctcccaataaatcgatcggcggtgattaaagaatcgatgtggcctgggtgggcgagtcgcttgaggggagggattgggggctttcgcccggcgcctgcagggaggccgagggcgggcgcgggcctgagggaggcgtgtcccgcccgggccacacccgaggacccgacacctgggctggcaggccccggcaggcagcgttccctccggcggagaggggcgcgcgcccgccgcctgctt

SEQ ID NO: 34033 - DNA, 1306 bp, Homo sapiens
gcaggtcttactaacttactagataggtatttttggcaagtttgggaccaggtgattcaagctgcccgctggggcacgtgtagtggctactcgagggcagggctgtccttttgcacaacgcacaggctctcgcaaatggttggatgttcaatgtttcttactttagggggctgcccagtcttcttcttcgcaggcatgtggctagaagaaagtgaagcaggttggctttctggctcctcgagggcacaggcccagaggtggtgaggaccggccaaggctctctgctcagtgcagcaagccagggcccgcccctgacaggaatccgttggctaagcagccgctccggccttggccacgatcccaggaaagaagagcaaggggctttccacctgcccctagcctaacccggggctggggacctctcgggttccatcggctcttgccccgcctcctaagccggccgcctcctgtccaggccaggttgcccgcccctcccctcacgctcgacgggctcgctcccgcaccgggcgcgcgggtggtgcgcgggcacacggaggcggaaggccggaggggcagtccgccgcgggggcgagcgcgcatgcgccttcctgggacccacggcaggcgcgaatcccagcggccggcgggcggcggggtaagagcatgggatcccggaggttccggaccccaggccagtgtggggaggtgccgggggctcggacgcgccacgagccggcgcagagctggcgacccgtctcccagctccgctccactcccagggacgcgacgcgaggcctccccagcccttcctgcagggtcgcttgtgggtcgggtgaggggacgcggtgatagtggtggcacttgcaggctggggcggtcctggcacccttgtccttgcggttctgagggcctggccctcaagaggaggggcggagaaacgcgagaagggatccctttcgccccatatacacgcccgggatagctgcactccccggtgttgtgtccactgcggtggaaggacctttcagactaaaaggagcaaagtcggttctgggatggggacggcgggcttggcatttgtcgagatgcaccgtcagggcaaaggaggacgaaaagcgcatctactgcctgcctagcaacttcgtggccagtggatgggttagaaaattactgttttctgatttacaggtggaaaaagtcgcaaataaccctttttctggtttaagcagaagagagtcgttaaaagcctcgcataatatctttaaccacacagggctcagtaaaattagggtacctccccgcttcg

SEQ ID NO: 34034 - DNA, 926 bp, Homo sapiens
atgttatttcaagttagacatcacctaaatacagcccacagtttacgaaatctgtcaaaagcatcgtagaaacagaaagcgaaggaggactatcgtatgagtaccgctggaggagacgtagagttgagggtaccaagcgaagggaattgcctgtggacagaggagacaagttcatactccgaaaaaataggaaaacgagaaaggctactgggccacataatatcttctcttcttgcagagggcccccaaaacagcaatacctggggaggagatacctacggcattctgagattcgggaaagcaccactgccgctgaataaaacgaacccagcaacttccgaaaacagaaaatccgccaaaggaaacgccaaggcatgaaaagcgcgcgctggacgttgcgtcaagcccaccgcggccgggcggaaacatcctccccgcgacgaaggatccgggtgtgcgcgagcaaaggagcgagcggggagttctaggcccaggacagcacctatttcctgctggtgtaacagagcaccttctctcactactctggccataccacccccgcgatagaggagcaacacagctgtctctgtgcgctccggatcagcgcttcctagatttctagccggatcgtttggagaagggctctgcatcttatttccggtggcggtgaggtgcagttgccatggtgattagagaaaggccgagatctgtccagctgcggtgagaggaacgctgaatcgccgaagagaattggctgcgcttccttgtttgtgagctagaattaggtagcaaacagctcgctgtctctgtctcttcgctccctctgtccctctctgtgcagctgcttctccttcctctgctttgtctacttctctgtcataaacatttggtccatgtatgtacctaaaatgtacatgtaaatgcgg

SEQ ID NO: 34035 - DNA, 2559 bp, Homo sapiens
tgcccacggacattaactaactttcccaagagcacacaccttgtaaagccaagttttttgccactttaccaaaatgacaggtttcttgaacagaggagacaatcactctcatcaaattaagggagatactaaaccgaaaagcaagaaagactgaagattcctacttaataatcaaatccccttggttgaccttgctatcccccgtgaaacttttccagccatgtcagtccttgtttgttgatctcctcactttatttctattacatgagtaactggctaattttgatggtgttcatacttatccttaccatatatttgctcctacatttgtcaagtcctgcttgtacatttcctagttgccaacctggtgtcacagcgggcaaatcatgggaagagccctggttttggagccagaccacctgaattggcctcccgcatggacttagctgtgtggcaatgagacaaggcattttattctttgaatttcagttttgtaagcataaaaaggggaaaaataaaacccagagtttagtaaggtttagaaacgctacactcagcaagtcatagctaagtcaccgtcaccaatggtagtcaagtgtgtggtgcagcaggaaacatttggagtcgactcctttacggaactcaaatgccctcacatttagggagaaatagaaagaattacgactcatgaaatcgagctggggctggcacttctgaccctcccaacaggtttccagaaagctatttacacacgatgcattcgccaaaccactggaaatcattctaccctgtacttttttccaccctgcctcacgtccttgccctatgaccgggttcctaccccaacctctgccccaacacttagaggaggagttgcgggcctctttttacagtggataggattccgaaggggagagtaaatcagtaaggctccacccatttcacaggaggcctagagaccggcgctcccctttcccctcccgccggacctgccaggaggtgggctggcgcggagggagggccctgtcccctgtccctttaaggaggagggccaaacgccggcctagagtgcggcgtagcccccacccgccgtgccctcaccccagagcagctgcagcctcagccggccgcccctccgccagccaagtccgccgctctgacccccggcagcaagtcgccaccatggtgaagatcgtgacagttaagacccaggcgtaccaggaccagaagccgggcacgagcgggctgcggaagcgggtgaaggtgttccagagcagcgccaactacgcggagaacttcatccagagtatcatctccaccgtggagccggcgcagcggcaggaggccacgctggtggtgggcggggacggccggttctacatgaaggaggccatccagctcatcgctcgcatcgctgccgccaacggggtaagggatgcgcggccccgcgccgctgtgcaccctggcgcgtgtgcgacgtgcggcccgcggcgccctccctcgctcggggccggccgcttccgcgcgctgccgcctcggtttccacctcccgctcctccctctccttcgcgctcgctcttctggcctggaggcccgacggaggtcgccgggctggggaaagtggccacgggacccggcagacctgctcgcctgactcccggggcgccgggaggtgcgggcgcggagcctcccaaggtcacgcccgactctccgtctctagccgctgccttccctctccccgtcccccgcccctcccgaggcgtctgacatttgccctaaccttgcagccttggaagatacgattacggcgcagagtgctgtcgccttaagcaggaaaggttagactgccgccgcctcgcccagagccccctcgcatcccgcccgctcctctgctattctcggctaggactggcgcttcccgctggctcggagcccgacactgtggggcaagggtggcgagagcacccatccccctggggcgtcaggttggcagatctcagcaggcgggtgccaatcttttctccccgccccctagtttgccttggttccgaactcctgccctttgcgcggcctgcttgctggggggcaggcgtttgaaacatctagtctctgcccagtggtgcccgggatctgttccaccgacggggctggagctgaattttcattagaatggcaacatacccaaagacgcccttacgcaagcaagcagtcgtggcaggccaggaaattaccgcaacaccttggttccgcccccggccaaggaaagttaactgacttgattgggcgggtccactcggataggggaaattaaaaaaaaaaagtttttcagtaaatctgatatatggaaatgtggggccgggcatggtggctcacgcctgtaatcccagcactttgggaggctgagggtggtggatcacctgaggtcaggagatcgagaccattctggctaacacggtgaaaccacgtctctactaaaaaatacaaaaaaaaaaaaaaaaaaaaaaattagccaggcgtggtggcgggcgcctgtagtctcagctactcgggaggctgagg

SEQ ID NO: 34036 - DNA, 678 bp, Homo sapiens
tagaaaacatgctgagctcagcgagagagagaacattttggattgggaaagaagaggtgcctgcacctaaaaccaattatgtcttgaagagcggatagtgtgcgatagaagatggggctacccttcaggaaggggacctgccgagagaagtgagaaagagagaataggcaggactcttttttagagccggacacttagtcactaaacaatctttgttacataaaatacttaaatcagcttgcttgggactttttctttcttggcttcactaatgctcttggtgaaacatctttttcctttttcttttttaatcaaatctaatgctcatgaaattttgtagaagaaaaagaaaaacgttctccctttctgagatagagggtttgttttgtttttgtaaacaagataacagggaagagtgctctactgttttggaaagagtgactcattcaataaatatttattgagcacctattaggttctcggtactacggatacaacagtgaattgaacaaagtttctgctctacagagctgtggggttctcgttgagcctgacagatgataaacgtgtcaaatgaagataagttctctgaagaaaaataaaacccagtaaaggggacagcattagaggatgggctgctctttttagtgcagcaattgggatgtctgataaacctca

SEQ ID NO: 34037 - DNA, 938 bp, Homo sapiens
aaatatctttcttacagagagtgtttcatgcacagagcctggggggagggagaactgttctgtataactttaggttttcagtaatatgtcgtcagcctgatacttaagttttctcaaaagaacacagcagccagccccaaagtaagcaaaattgatcctgagtagcttaagtactggttacggtgtttggtgtttgtatgccaggtctaccccttatggttttaggatagtggttctggtgaatagttgattaggtccacttgctccagaaatctccgtgaataagatttgatggggtgctttccatccctgaaacatttactgaatgttttcttattgcttaatacagtgctgtgtatttggggcatgcagtagtgcataaaacggtctccgcaagtgggcattgcaatatagtgtgagaagtgcctcgttagggtgtattgggggccctagggaggggaacacgcaggggtggtcagaggaagcttcccaggggagatgtgtttaagccaagtcctgaaggatgataaagaggaagccaggaaaaagtgtagacatgggggtatgaagaagacattctgtgtagtgggagcagcccttgcaaaacaaggagatccttgtagaaagtaaaagcacagccttagactgtaaagtaggactcatcctaactccagcattgcaggaagggaagagggaggccgccggtgactcagctgccttaacccctgaggtcacacaggtccttaacccctgaggctttcttttatacacaggccaacataagacccagtctgggaattatcctaaggcccagcctgggaattctcttatggccctgagggaagggaggattttggagacaggatcaaaaacctaaaaagctatctgtaggccgggcgcagtggctctcacctgtaatcccagcactttgggaggcc

SEQ ID NO: 34038 - DNA, 495 bp, Homo sapiens
catgttgagtagcgccatgaagacccctccttcatcactctgcctgcagttatcctgggaagcaattataagctttcagcctcaaccatgcagactaactggctctacttccttcactattgcagtttctagttctgttcgtaattgttgcacaagactttgtgctattgcaactacttggaatgccagttccaggcagagtgccctctgttgtagacaccttgtgctttgggaagttgtctgtgattaggggagtaattttctatttgaggttggtctcaggaagggaaaccactcctgactcctgcctgaaaactcgcctccttgctcagaaacactaattacaggggtcgtttgatgctctcacttaaatattttagtcactcacacatttattgactatctgtatgtgcccaaccccattccaggtactgaggttaaaaatgagtgagatgcagtctctccataccacagagcaaaggaggaagcttgttt

SEQ ID NO: 34039 - DNA, 1006 bp, Homo sapiens
ccttcaaatacaagaagcagctctcaggtccttccttcttcaggccgtccatctttgtttcctccagtcattcctcatttcacattgtttatagactcagtgccagactctaggtgcttctgagtttgccagtgccactcttagaaggtgatgcccagaactgagcccaaatcttccagggttggcctggcaagtgaagagtggggtgggatgattatttctagtgattaggacactgtatttttcttgacataactttcctttatgttagtttttaggaagttgcataatactgtttagcccacataaggttgtgggtaattaaacccttaaagtttttacctagaactatttgccaagggaagtctctcatgttatgtttgtggaattgatttctttgaaccaaagtattagactttagactattgttaaagtttgttctcatttattaacacattcaacaaatacctagtaccaatcatggttttagcttctccttggtatatttcatgtccaaagagagaatgctcttcattatcatgaggataatcacaagctctttctctctctctctcttcaaaaaaagaaaatttttgtgtaatatttctgagataaacatttaaacagccaggctgcatagccatagatcgctgttgtgaacgagtgcagctgggcttatttaactgaactcctgatcttcttatttatagaggagttaatttttagcaaccacgccccttgctagtgaatgtttccaacagttctttcatagagtttctcagggtagacattagtgactctatgaactttgaaacatttgaattctatagcttaattgagcacagagtgctttatttctgtatttttccaggcgataggagagacaatttctcaaaaacgtttccttgacctttcagagtgggccaaatcccctgattattggctcttgtggcaccatgtacctcttctttgttgtacttgttgcagctgtgattttacaattact

SEQ ID NO: 34040 - DNA, 1979 bp, Homo sapiens
tatttcaactgcttttcctgcctccacttggcaacagcttggaagttaaaagctcaggggaggaagaaggaggtggctggagccatggggcagtggaggtgggtgtgggtagtaaggatcactgtgtctctccagggcttccaaagagatgccgcagtgtgtgtgccccagggagtgcgggagaggagtcctgagaggcgggcagcagcacccagccaggcttccccgccttccagcgttgatgtggtctgtgagtcaggcttgttttctttggggtgtggtgagaattacagtgagaaaattgggttggaactgtttggggcccaattctgaaatttcactttttctctccctcttgacattcagctattctctcagagaagcagtttcctgttcagcgatgtgccccaggcctacacagtggccaggcttccagtggctgggctctgcctcatagggagtgaaagcagaggccaagctcactgtggttctggggagtgtcatctccttggcccttcaaggccaggcttgaggacagggtccctctgcctcctctgccatgctgctttcttcaacgtttcttgttgactcattagaagctggccttgcttataagaattctccagaaaacatattaccatgagtaagaggtgccccccttgtgtttctgcgttctgaacccccccagcagagggggttggatatgagtataacagccttcatgcaggactcactgcatggcctgtgggctttggcgggggcaccccatggccttctggccttcccacttgccccttctgatccattctccacaccaccagctaagtactctttcaaatgttgaagtgcagaggcctttgtgtagcctccaggtccgtgtgactcacctgcctgtcacttcccgctcctctccccctactcacagccttacattccaagcttcagtcttggggaaccatggcacctccctcctgcccccaggccttggaagctgctcttctttccacctgaatcacctttaccctccatcccaccctccactacattctccacctttcccctccattccaccatccgccatattctcccaactcctacttgttcctcaggtctcaatttaaacatcgtttcctccaagaagtgctttctgagcctccagtgtctggtttgggagctttttctggtgttcctatcacctctatttcccccttcgaggcgcttatcccattctatgttcataacctgtttactttccatttcttctactgccctgggaactcctacatggcagagactgcctttttcaccagtgtttacccaggatctaggcctgtgtctggcacatagcaaaagccccattaaatattttcagaatgagtgaatgaaatctactagttgcacggcagaatgtttcattatgctggaatctccctgacctataaggcaggattgtctcaattttacaggtgacaagtgatttgagcaacttccatgctagtcactggttaaccaagaactctttcaaaaagtgttagaggctgcaagtgagaaagcacccaggagaggcgggcaggagggtactggcaatagatgggagttatgtgtcatggtcactttgaagaaaatgtttaatttaaatgataaaacacattttatctcccactgctacaaaattaattgggaggtatagttggggaagagttctactgaatacagaaatgagtgctttaaggaacagaatcaataaaaccagcctcaatccccaaagcccccctctgagcagattcacggaaaggaacccatgatgggtaaagtgggtaccctggcactgggcgtcatgctggcatggggatcctcctctgagcatctatttctggaagtctgagaggctcttctcagttcccattatcagaacaagaagcattcccacaagtgtgtcattatccaaaacaagtgaggtcactggcgggagcatgtct

SEQ ID NO: 34041 - DNA, 1272 bp, Homo sapiens
ctgcaggtgtgcactaccacatctggctagttttattttttgtagagatagggtctcactatgtttctcaggctggtcttgaactcctgggctcaagtgatcctcctgcctcagtctcccaaagtgctgggattagcagcatgagagaccacgcctggccacgaccatttatgttgatcatccttatgtactcagtgcctagcacagtgcttggcacaaaataggtgctcagtaaacatttgtcaaatgaaaaaaaaatgaacgattgaatgtttgacttggaaacccatgccttcgatctccacaggctttgtaatctaatacacaaacacaggcaatcctgattcataacgtgaccacagaaggttccctggggtggtagagagcctcatgcatgatttagtcaggtattttgagctgggattctgtctgaccaggccagagtggaccttgctcccaggagatggcagtgttgtgcagtctctgactcatcaaggctcccacactgacttccctgagaccctggaagctatcgagctggaccttgacctctcaagccgtggacgccaagtcccagggccaggtttttaaaggagctgtgtgttcaaagcagctgagaagcagagcctttgttccagagactggcagtcccccaatccaagataaacaaccctcctccccaactcgaatgatggatctggtttggtgttctgttcaagaactctctttccaagagtggctcaaaggctcctttgcagcttttaaattttacaatctcttaggagagaagacccaggccacagagttgctacctcctggtgctttggaagattctccctattcatactttctctcaaatcccacagctgctacttgctgtgagtgcagactagcacaaccaccaacacggacccacaggtagaccatcctgttcagatcctggctctgtcacttaccgtgtgacttaggacaaagcccttaccttttctcaataaaaagaatagtaatacctatttctcaggcttgtgctgaatgattaatcaaacagtgcctggcactgtgcacctggcactgtgcctggagcatagtgggtgcttagtaaacatcggttcccttccctctccccctcccacactgcgctgctgaaggagctgggggagggaatgtgagaaagcctccgcagcaggatttcactagcaaatgtctaaaaacaacaaccttcttctcttccctggagcaccttcctatccccagtgtgactgtaaagccaga

SEQ ID NO: 34042 - DNA, 1044 bp, Homo sapiens
cagtgacacagctgaggctgctagaacctgggtctactgtcgtccagccacgaactggcttgagatcccggataagtctctctgagcctcggtttccccttctgtcaagtagcctcgaaggtccccggcgctcggttcggtggcgagtttgaggagtgtgggggaggggaggggagggagcgtgcccgagacgcgggagccgcgaccgctttctgcgaagtcggggagggtgcgggcgttgagaggctgcagcagagggcgctgggtcgccagcctgggccgcgtctcccattggtcggggctggggcgctgggctggagagttggtggaaagtgacaagttgagcgagagagggagcgtggagagctggagcagccgccaccgccgccgccgagggagccccgggacggcagcccctgggcgcagggtgcgctgttctcggagtccgacccagggcgactcacgcccactggtgcgacccggacagcctgggactgacccgccggcccaggcgaggctgcagccagagggctgggaagggatcgcgctcgcggcatccagaggcggccaggcggaggcgagggagcaggttagagggacaaagagctttgcagacgtccccggcgtcctgcgagcgccagcggccgggacgaggcggccgggagcccgggaagagcccgtggatgttctgcgcgcggcctgggagccgccgccgccgccgcctcagcgagaggaggaatgcaccggccgcgccgccgcgggacgcgcccgccgctcctggcgctgctggccgcgctgctgctggccgcacgcggggctgctgcccaaggtaagaggcgcccgccggcccccgcccgcccagaccccctgacccgtggccacccttccgccgtccagccgggcgcgggacacgcaggaagcgccgcgctggctccggggcgcgtccggccacccgccacggggctcgccggcgccgccaggccagggtttgccccggagccccgccaggccagggtttgccccggagccccgcggcgggccggg

SEQ ID NO: 34043 - DNA, 1918 bp, Homo sapiens
gaaggcaaggaggagcaagtcacatcttacgtggatggcagcaggcacagagagagcttatgcagggaaactcccccttatagaaccatcagatctcatgagacttagtcactatcacaagaacagcatgggaaagatctgccccctgactcaattacctcccaccaggtccctcccacaacatgtgggaattcaagatgagatgtgagtggggacacagccaaaccatatcatgaggcaagcacaaatgccatgtgaaacctgctattcttctgtagacacttgtgtccagccagaatcagcttcaaaagaatagcatagatttgaaaaagggcagcagtcagtcttgggacattagaacatggggaattaactggccttgagtgaaagggaccacagggggaggtttggagctgacttatgaatatggatcctgtttcagcacctactgttgttaaagccccgtttctgtcccagagaaccaccctgggctcgattccctgcaccctaatgtagctctgtttttcatctgtgtgtctacttcaagttagactcaaaagtagagcaattatatgacattatgttcaaggcaaaaagtgacagagcaggcttcatgttgcatacaaatgttggcagctattgcaaaatcctcaccgcatatcctatggtaatcacttccttaaagtaagcaggaaataggttagtagtaggctgcttcaccaggagtcatttcaaatgtattgtcacctaaggtataacttcccaaagatggaaagagataaagccactgagtctgccctctttatccatctacagccaccaaggtaattacagtttttaaaaacgctactcatagttcattgctttcatatctaaagttaagagatctaaaagttcccccacatccccacttagcagtcatgactaaggtgaaaaaagccaccagtatcagcctggtctctcttatcagcagtttagaaagtactacaattttcccatctgactcacatctaaatgactcgcatctaaaatgtttttccttaattttccttccgtaaagagttcatttaaactctaatactgttgcttttcaaaaatttctaaagaaagaagcatcttggaacaatgtattaacttctgcatcaacttttatttcatataataattttatataattttttaaaggcagatgtgtgtttactttgagaagtaaaaatgttaacattgaaactgaaagcctgtttcagttttaaggtacttaattgccttacagcatataataaaccgaggccatcttgtccttcaactaatggagggagtgataaagagataggagcccgggaccctattcattccagttttcctttgtacttggtttactttggcaccatgcctcatgtgtattttacacttctttacattttgtacatccctgtatgacaaatacttgtcaaacaaaaactaaacagatttataaccccttaacttgaaatgagccaaaattgaactgccaaaactttatgacttcattttctttcatagttttccaccacattggttcaaacagacaaactccacttgaggtcaagcagaggtcatttcactttcattactaaaatataatttacaatatgccagacctaaacaagtttagcctaaagggtttgtataatgtaaaccatctgttcctcaacaatacagctaatttcctgccatcaccgtacagtctactgactgcttctttaagggtttttatgattttttaactagttcaggatttatgtaaaatttgaaaatgagtctatagttaggattcatttgtaccaagtaacttgagcaccttaaaaatgcaaatcactgtggaaattgttcccctgaaaccaagctaggagcattttttttctgggcacttctttgc

SEQ ID NO: 34044 - DNA, 1236 bp, Homo sapiens
tattatctttaatttactgatgaaacttagaatttcaaagacattaagaaacttctcccaggccacaagttagtaagagtataaaagaagttccaaccttaggactgattggcccagggatcatctttttccattaagttgcaagttgacatttataatggtccttaaatgatagccagcatctcccaaagtatttattgataaaattttattgtgctgtatttacaagagaagggcatttcaagctgaaaaatatggcctaaaattataaaaggaaagccatagtttttatcaattataataataatgacttttgttggatgttaaccaatgccagacaacatggaaaaatatgatggcatggttgagtctccctgttgtcaaaattcatacagaatataatcagagaacaaaataatagtcaaaaaataaatgtcagacaccttagtccatagcattttgccgttcgtcccccaaaattcatgtccttcttgcatccaaaatacatctgtttcattcaaaaagtcccaaaagtctgaactcattccagtagcaactctaaagtttaaagtccaaagtctcatctaactatcatctgatttagacatgggttagactcaacatatgactcattctgagggaaattttcccatgagctgtgaccccgtgaaaccagaaaagttacgtacttccaaattgcaatggtagaacaggcagaggatagacattcccattccaaaagggagagatgtgagaggtcctaagcaaatttaaaaccttgtaatatggatttcatcagatcttaaggcttgagaataacgctctttggttaagtgctctgccttctgaacccattggggtgacagcatcatacccatatagctctagtgggggttccaccctcacagctctgccacatggtgctcctgctcccaagattctggatggccactgcctggcctgttgaaatggaggtgatgccccccacctttgaaaccaaggaggcagccctgattatctctggatcaccttcaaaattattcttcccttgtcttgacaaacagctcatgtttgcagcaaaatagctctatgtcctggtcctgtaggatctaagaatactcacgatcttactccattttgtgtcatctctttaccctttagttcaaactagcagtgtttttgctgaggtaactgactgggtctggggttcatacccacacttatctccgtatcaaa

SEQ ID NO: 34045 - DNA, 1325 bp, Homo sapiens
acgtacctcctatggcatgtcgcggagattaaaggataatgtgcacacccccgagcccagtgccgggcacacggtggctggttgcaacagaaatctgtgggtggaacgctagctagccattgtgatgaataacatcaaggagagggagtggacctacacatggcagtccccttcttccccaaccgctgccaggcagacagccagcgtcctagaacttaaaggacttttcgatggctggaacctgggccgggtgggctccctggcgcggacggaggcggggagcgctggcgggggtctccgtctccagccacgggaaggtccgtgggctcccctgcccgggctgggccggtccccgagcagagagagaggctggtcccccggcccccggcgtcccggggggcaggttctgaggcgggagccagggagagagaggaggggcaaccgggggaatttccccgcctctcttgctggttccataaatcaccgcagccgccgcggcggcccagccgggaagtgcacagagccggagcgcagcgtggtggcaccagacgcctccctttccccaccgcttgctttctttctttcagttgtgtgggtttgtgaagcctcccctttccctcctcgctcgggtggctgccccagtctcgcagcccggccgccgctcctcttccccgggggccgccgtcagtcctcgccgccgcctgctcgctgcgctgggactcgcaggaagcgagagccgcgcggctcggctcgggctccgactccgactccgattccgactgtcagccccggggcccgcgcaccccggcctgcgggcgcccctgctctcggagacgccctctgcgccgcggggcccgtgtgggcgccgggctccggggaccgctcgggcggccgcctcctacccccaccgccgcggagccccgcgatggtggccgcccgcgctcccgcgctgtagccgggcgccccctaagtttgggagccttcgccaccgcggcgcggagcagagcctgcaacagaggaagaaacttttgcggggtgcgccgcgcttttgcggggggcacctcccgcggcccgcttccccgcgcccggagcccgtcggcggggagtggggggaggcagcatggcccgccagccggaggaagaggagacggccgtggcccgggcgcggcggccgcccctctggctgctctgcctggtcgcgtgctggctcctgggcgccggggccgaagccgacttctccatcctggacgaggcgcaagtgctggcgagccagatgcggaggctggcggccgaggagctgggggtcgtcaccatgcaggtaagtg

SEQ ID NO: 34046 - DNA, 495 bp, Homo sapiens
aggacatgtgccaagggtgaaggggggcaggaccactcagttactctgttgcccagtagccatgtgggtccaatgttgtcacatgactttgttttttatgagaagctgggtgtctgttttttccataaaatatctttaaatttttggcaactaattcagtttaaaaaaaaaaaaaaagaaaaacacactatgtgggccaaaccaaacatgtctgcaggctggatagggccaaaggccaccaatttgcagtgtctgggttagaattattcagcgggttacaaaaagaaaatgcagtgcttgtgtgcaggttatggggaagccaatttctttgtgatacaaaggagaactttctgatagaagagttctagaatggattgctttgagatatgagcttgtcatcataatgacttcaacacagatgaatgtttacttggtgccaggcactatgttaggtttgagatacctacccatcagttaatttctgatgtaatgaat

SEQ ID NO: 34047 - DNA, 1400 bp, Homo sapiens
tgagatggtttacattccataaagtctcctatataaagtgtacaattcagtggtttttagtaagtttctagttatgcaatgatcacatgatctaattttagaacatttttcatcattccataaagaaatgttgtattcctcccttagtagtccctccccaaacatagatttattatacccatttttggagataggaaaatggagtctccaggcatttaaacaatatgccttcaactctagagtaaatgtggagccagcagccagagtccaacttccttgcttccagaacccatgctctttccactacacaatgcttcccatccaggaactcaagccaaattaaatatttacttggtggggagaataatttgatgttctggttttgtccttgttcagtagtttgggataataaattttccctttccgttccaactggcattgaggggtaaataaatatcgtttagtttctagttcggtgtgcagtacagccagattttgaaaattacatgacgaattagcatggtaaaaaatttaatagtgggaggctgagagttaggagaagtattcggtcctgcctctggttggtcacttatcacgtacctcctgcacgcttgatttcctcttctgtcaaatgagtagttgtaccaaatcttttatttagtcattaaacatttactgaacatgtatgggtgattaacactggatgttggatgttcggagaaaaccacaacagttttaataccagctacatttaattgggcaaaaacagtataccagatgctgtcttagctggtcatgccatttaatttgaagagcaaacctaataggtggctatgataaatctattctgtctctgtggggttggaggcatgttgctgaaattcccgtgaggaaacaggctcagacggtttggataatttgttctgggttacacacatctgacatacctgaagtctggaaaatccaaagcccagacctttgtccccacactagactgcctctctaggtgagcaggagtcctgttgccctctgtgagggtcaccgtatttgcagcatgatgtgaaagtaaatattcagtgacagcaccaaaagggctttaatcttttttgactctgcttgcttaggtctgggaaggtgtctcagaccagccctcctattctctttaaaggttagccgatgattgcgttttcccctcacccagtacttatgctgccctgcccagaaaaaaaaaaaattgtttgttgagcggtgctagattgggagggaccagcacctctgcaacatatttcttaacttcagtttactcctttggcctccttggcgtgtgcgtccaaaaccttgggctaaagtaaactggagatttggcttgttctcagacaggtgttcccatcaggtcttat

SEQ ID NO: 34048 - DNA, 3769 bp, Homo sapiens
ataatttgcaagactacttagcaattagtggaggcaaatattatggtaggatgtaaataactaattgggctaaatataactaggagaaataactcacttgttccaggacatcattaattaagtaaaatcaacaaaaacgcattgtgtaaagcctgcgatgcacagctcagtaagaagaaaagaaaacaacaaaagatatatcgccaaagaagaattagcaacccaagcacatagcaaggtaataatacatgactgattgccaaacacaggacacacccgaccaagcgaaaagagcacgtctggagaaggtctaagagtggggctggtgtagtgagtttgatcggatccagaggacggcagggaaaaccagcatggtggggttgaatgttcaggctcaggaaaacctcagccctgccacttagtagctggctttgaataatttttaactttctatgactgttttctcatttgcaaataaggataatcataattattttacaggcttattttaaactcttggaaaaatatatacataaacacagtaggaaaactggctcacagcaggcatgcaatactactactatcactacgaagaaggtgggatacaaacaggatgaaaacaggagctgagtgaggacaacattccaaataagggaaacatgaagaaatagcaaaagaaggaaagtggggttgggcacgatggctcacgcctgcaatctcagccctttggaaggccgaggcgggtggatcacttgaggtcaggactttgagaccagcctggccaacatggtgaaaccctgtccctactaaaaatacaaaaattagccaggtgtggtggtgagcacctgtagtcccagctacttgggaggctgaggcaggagaatcgcttaaaccagaaggtggaggttgcagtgagctgtgccactgcactccagcctgggcaacagagcaagactgcatcccaaaagaaaaagagaaaaaaaaagaagaggagcaggaggacgagggaggaggagggggggagggggagggggggaggaggaggggggagggggagggggagggggagggaggaggaggaggaggaggaggaggaggaggaggaggaggaggaggaggaggaggaggaggaaagccggagggtaaggcacttgactgaagactaaacaggtttgtgtagaaccaaaaaagatgaggtaaggaggaaaactgggcccaggctacaaatgccccctaaggagtctggattttcttctgaggggatactacccaaggagaatgcagatccccagattcatgtgaattcctcaagtggaaagtccccagtatgtgaaggtgtgctacgtggggtgggggttctcacacataggaaatgatgggaaaggcatgggcataggacacctgaaattcaactgtgtaaaaataatgtccttctttttaaagattcttaatgaatctgctactctttgatggatatataggcactgtacattgagaaaggacaataaaatttaactgagcaaacagttcaaatactgctatgggtaagagctaatttgaatattcatttgagggatccatacctttgccccacctcgctatacacacatacaaaaaggaaacttctttaaaaaataaaataaaatgagaagctagaggttttcttgtgtaaatcatgatgttaatgagtcagaaagaactttcccaaagcttgtcttcctggttgtcgcgtctggctgggacatccactaatagcactgggagagtcaacattctgctgctggtgactcatcctcctctgctagcacagtcggagggaccagcaagttcacggggctgcccttgggagtcactctgaattatttttgtaacatcttgtccttggataaaagggaatacagagtcagaaaccagaggccaggaggccatctattactcagcagagttgtttacacagccctgttcctctattatccagaattcagtgttctggataactgataaaattaaggcacctatgtttccagggagctgaatacagcaaatgcacaaaagtcatgttggatgaaattctaccttcccttgatgattcagaagaccatatcagaccttctcaggcatgactgcagatgacaaagagattattagaacctgattttgacccatttccatctcacaagcctgtgaaatgtggactcaagggtgtgggagaacttcagttagcaaaatttgcataaatagtttccttctactgtcatccagttaaacagtctccaggagcttgcatgaatgctttatcaggtcaccaagctctctgatgtatgtccagccaggtgctccctgaacatttctgggcctggccaaaactgtgcttgttcagtgcatttcagctgtatatatagctaataattagcagcagaaatgtggcacaaacccaaatctcatggatcccacattgcaccaaaataaatattaatgaaggcacctctgcctttttagtctttctccaaatgaatttttaaaaaagcaaagttggcttaactgctcatgaccattgactaatataaaaatcaataaaaaatcaataattatatactttttacaatttacaaagcactttcaatacttgatctcaatcctcacaataatttgaagtatcattcctcttattctactcataagcaaactaaagcttagaaacactaagtgacttgtgaaagatcacatgtatttattacctaggactcaaatctaagtcattagacagcaaaggaaatggaaacaactaatggaaaaaggacctataatcatggtgaaaaggtgaaatttcagtaaattaaaattgtttatctatctagtcagtaaagttggtgttatacttctttttaaatgtaaatataagcctggattaggtagaagtataaattactgtcacctataaactatgggtgacaactctaaaaatcatttagactcatcataaatgcacacattcaacattatagaaagatatcactgaaaagccaaagttcccctccctcctcccagagatagtcactattcagtttttggtaaggctgagcaacccaaatcaaaaaatctgaagtctgaaatgctccaaaatatgactttttgactaccacatttcttgaaggaaatgctcattggaggattttgaattttcagatttgggatgctcaatgggtaagcatagtgctaatattataaaatcccaaaaatctgaaatctgaaaattgtctggtctcaagcatttcagataggggatactcatctgtacaactctccctgagaacaatttagctccactttcaatttggacttgaagattctcctatgttttgacacaagaatcttacaatatggtaatgaaaaaatcaaattgaaaaacagcatgtataggatgatcctagctatgatgcatagacgcacacatgtaatcctaaagaaacggtgacaaaatggatggggaggacattacaagaataattacctgtgagtattccaaggtgtttgtgatagtagttacttcattttgcacacttttagagattttctaagtgttctgcatcaaatatgtgttactacactaatgaggggagaaaagtcattccccctgggttatacaggaaattagggctgggagtaggaattcaggagagccaattcacctctctacctgctgcaatggctcaagattgactagcaattcaaagcaattaagagatgtgacaaggcaaaacataattat

SEQ ID NO: 34049 - DNA, 3532 bp, Homo sapiens
cacatgcctgtagtcccagctacttgggaggctgaagtgggaggatcacctgagcctgggaggtcgaggctgcaatgagctgtgacagcacctctgcactccagcctggacaacagtgagaccatcacacaaaaaaataagacagggtctcaaaaaaataagacaggcgcttgctcttattcccacctgcatacactaagtgttaccaatcatttgtccaagaggttaataggcaacatatggaggtaatttgctctctttagccctgttctggtgggaggtgacctcctcagtgggatggtagaccagagtatattctttattgactctcaggcagtataggtctctgtaccacaaaagcttgtgccttctaaatttcaaacaatttcatgaaaataatgttgaaactatgataccatctttatattcgttatttatttaatctttaacttaacccacaagattccaaggcagtttataagaacacattgaataaaacagaaatacgtatttttaaaatccaggactaaggagattgtaatacgggacaaaaagtcaaggctagtggaaagttatttgtagtctactgctttccacatagacattaaggatgggctacgaatttggctttgagtttcctaggggtcaaaaaaaaagcaggggagaaacatgatcaaatgcattgctctcgttgtcaaaaaagggaaaagaaaatgttatttgaggaatgaaaagtttttctgatggtagttcttaaatttctccgggggaagagggagatttgaaatttcatctagagcttttgtggtcttcccaattactttgaagagttaacgctgtacttagaaatatcaacatatggccaggtgtggtggctcacgcctggaatcccagcactttgggaggctaaggcgggctgatcacttgaggtcaggagttcgtgaccagcctggccaacatggcgaaaccttgtctctactgaaaatacaaaaattagccaggcatggtggcgagcgcctgtagtcccagctactgagattacagtaggagactgacgcaggagaatagtttgaacctgggaggcagaggttgcactgagtcgagattgcgccactgcactccagcctggatgacaaagcaagactctgtctcaaaaaaaaaaaaaaaaaaaatcaacatagggcatttagattccaaaacaccaagtcagaacatcagcaaacaaactgtactcttcatttttagtgtacttccacaaagccatttcccgctggggttcctctgtcctctgcctgcacttcaaatttactttcttaagatgcaccaaccaaaatgggcaattagaatgtttaaaatgctaataccatgataaacaagaaaattattcaggagtgaaaaaaaaaaacaattattatctactgaccaatgtagttggagagatgaaattcacataaaattgaagaaaactaccagaaagcatctaagaaatacttatttggtgagggatttggggccacaggaatgaggccagaaaaccttcctacttcgaaagattaatagtaaacaatagatgggtgttatgaatacagggtgaccatataatttatcagccaaactgggatacctgagagttaaagagtgtgctatcaataattatacccaacaacaggtgtaaactggggctgccccaggcaaacagagacatatggtcactctctgtgttcatcacagctttacattcctatcacatacatgtcctcattacacccccaacaatatcatgccggatagaggccaataacattgtctccgttttacagatatgtaaatacatgccaaaaagatgactgaagtaactaactcaggttttgcaaagagaagtatctgagctgagactccacgcaggtctactgactcctaacccaatgcccttccattaaatcatctaagtaatgacctggacccagtcaagtatccatgatatgcacctagctaagttctttctcctttccagtaagagcaataaaagttgaaaacattttcaaatgtcaggagaaaatatctacctttcagttttaaatccaagcatagctaggttcatattttgattattttacatttctaacaggactttgttcctgatttcacaattttctgttatttcatttcaaatgatctaaatataggcaaggatcctagacaacaacaacacagattcatgacaggcttaaattcaaaactctcataaaatttaattccattaattcaggctctccaataatcttcctctgttttctgacccctatgtcatcatctgccttacattaaatagcaaatgatcaggaaatgctttacagaattattaggtaataaatggtcactccatcgagtaattctcaaacccagctgtgtatcagaattacctgggagctttttaaaaatatatgaattccaatccttaccctacatccatcagggtctccgaggctggaacccagagtagacaattttttgaactctccaggtgattctgaggcccatctgttctaatgtcaatccaaatctgacccacccaagatttccaaggtagacacagctagcccctgactcactagcaaccacagttatgtcattctactctctcctttgcaacccacacatgatttcttcttactgattttctttttccatcctctacagtgcagtagcatcctgcattgacaggcagttaagggcatacacattgcaatcagaaagctgtggggcagatcctagtcactcctttcaagaccataaccaacgtcttctaaactagtctatgtcaaaagatagtaatggtcacgatcataacaccaataataaaagctgatatttgctaagcacttactatgccactaacaatgctaatcactctacatgaatgatctcaattgccacattaaccctgtaaagcaggactactctcatccccattttacattccgggagaactttgccaaggtcatactgctgggaagcggcagaacaacaaaaaaaggtccatttctgaaaggtaaaccacttcttgtaaaagtacttctaaaaggaatcagcagtccttctggaacatgaaacatttaggctttgaagatgcatcaaaggtaattttttccagtgtgtgatttggggctttgctgattggctggctggaaagaaactggattcaatgtttcaaatgcaacctcataccccaaatatttattactctctagctgttccactggataaggtaaaatgagcttccacttagatctgtttaattggtagggtggccatatacatataaaaattatatataagtttttttgagacaggtctcactctgtcacccaagctggagtgcagtggcacaatcttggctcactgcaatcttggcctcccaggctcaatgctgaatcctcccacctcaacgtccagaatagccgagactacaggcgtgcacaccatcacgcctggctaatttttctatttttttgtagagacagggtctcgc

SEQ ID NO: 34050 - DNA, 4109 bp, Homo sapiens
gttggccaggctggtcttgaactcctgacctcaagtgatccacccatctctgcctcccaaagtgctaggattacaggcatgagccactgtgcccagccaaacacatggtatttaaaacacaactataactatagtattgcaacttggggaacgtgtgatgggtgggtctttcctcaatacaagataaggcacaacactatttaataaaaaaagctctctgattttttaagtctgatccaacttcaaatcccacttactagctatgtgaccttgagtcaattattttacctgcctctcttcactataaaatgagaataaccacatatataccttataggattgtgaaggtaaatgaggcaggattcccagctaaaatggcagattgaacagaaatacccaatttcactcccttctgaaactccactaaaatatagtacatatttttaaaatatataaagtagtataataaatacagcatggcttttctgtttaagaccaaattcacaaatatgtaaggggaaaagaagaggagaaaactacaactttggaaactggaaagtagttggatatgtaaaaaaaaaattgacttcgataatccacaaatactgaatcccaagctgacaatggcaaaagctgataaccaaattaacgtataccacagaagtctccaaagtcacaggaactggaaggaagcaccagtaactggggtgaagaaagagggccagagaaaggtgtttgagaaaaagaatcccgttggccactcctctgccccagcaaaagtctagaccagcactgtccagtaaaatggtccacaataatggaaacgttttgtatctgtgctgtgtccagtacggcagccagtcacatgtggctaccaggcatttaaaagatggctactgtaactgagaaaccgatttcttaattttattaaatgttaatttaaatttaagtggctaccatgtggctagtgactattttattataaggaaacacatatctagaggtttagtttctggaaaggataagacaaagggtcctgtaactagagatgtcaggtgaagcatgggaacctctgggcacgcagaaagacggcatctgcacacatgctgagtgctgggggccaggatgctacagccttcaccctcttccctgcagctccagaaatgctggcagccagtccctagccctccaggtgagagactggaatactgtcttctgaggaatgtgaccatctcaccaggactgacctaaagacacagaggctgggagttccccaatgaatggctcactcttagtgacgttcaaagttcacaagcccgaggcacatgctcagccttcctccaagtttaatcataaacaaacagccaaggtaaacatatgtctgaggaaagcctctaatgcagacatggagatagaaaaaagcaactcagagaaaacattacacagagagaaaactttaaaaattaatgtcttcagaaagataaaagaataccttttatttgtgaatcaagaataaaatgtttcttttttaaagtaacatttcagagaaaaaaggagctctcgaatattaaaaagataataacagaaatgaaaacacagctgggaaagggccctacggaacttctaggttgatagaaatgttctatattttgtttagggtggtaactgcacaagcctatatgattgtcaaaacagccaaaggaacacttagcattgataagctttgctgtaggtaaataatatcttaattttcaaaagctaaaaaggttggaagataatgtttaggaaaaggccaggcgcagtggctcatgactataatcccagcattttgggaggctgaggcagggggatctcttgaggtctggagttcaagatcaccctgaccaacatagtgaaaccctgtctctgctaaaaatacaaaaattagccaggtgtggtggcatgcatctgtagtcccagctactgaggaggctgaggtgggagaatcgcttgaaccgggaggcagaggttgcagtgagccgagattctgccgctgaactccatccagcctgggtgacagagtgagaccctttctcaaaaaaaaaaaaaaaagtttaggaaataggttagaaaagaacagtttgaaaataggagaaaagagataagaaaattaaagggggcaatccagacagtcacatgtctgaattcctaaagaaaagacaaagaaagtggaggggagaaaatcatcagcaaaaccatttgagaaagatttcccagaaccaaaggctaccagttgccaggttggaaaggcccatcaaaacaatggagaaaaagacctgtttggggcattcctgggaaatttcataacattggaaacaagggtctataaagcttccaaaagagaataaaacaggctacattcaaaagatcaaaaattgagaatattctcaggctttttaacagctgcaccaaggaaagagacaggcacccaatgcctgcaaaattctgaagggaaacaacttccaacccagaagtctataaccagccaaattatcaacgaagtatgaaggaagaatcaagatacagttagacatcaaagatctcaaaaaacaaactgctatgcatccttctgaaaataacaggagacaggctccaacacaggaaataaagattaaacaaagaggaagtgaagggaactcccaggagcacagaacagagcggtctcaacacaaaagctgtggccagcctcagaggatgaccaatccccatgtgagcagggcaacttgagggatacttatgttgagggcagtcactgccaagatccccgtagactgcattgagggtagaatgcctgggtgagcctggaccaaattcctaatggaatttggtttttcttaatcatgcactgatgaaattcctgttcccctgctgtgtcctgctgcctgaatcagcagaagactatttcaccccgcagaagtattccatttggcctattcctgagagctggacataagccagggtggagcagcacattcctcttgactccactcctcccaggctcccaacagctgggcccactgcagtcttctaggtacctccaactatgagaagccctgtttcccacaactcattcatgatcttttccactgactttcccaaaagggtccctgcaacctctcaactctggatccagacttgacccagagtttctgttcagacacaggggtaatgaattcaaccagagaccatgaagctcttctcctgggagccttcatctagagatggcatcactgccctttccttatacacctaggtttatgcttgctctggggacatatacactggtagaaagggcatgattaataccaaagtgggggtgactgttacctctgagggaagtgcagtggaggggactaccaggtgatttctaagataccagtaatgttctctttcttaacctgaatggtggatacataggtatttttctctaactatacacatactgtttacatagtcttctctatgttgatacatttttcaatttaaaaagttccctccatagaaaattaaatatatttagagaccctaagtagatactcattaattttcaattactttattctgagatactacttagtcaagggcctggcagctaagctagttctctccttttaaatcagatgcccttgctgaaaacatgctccaccaggtccttggtcaggccaaggaactgagtttgatccccctctttgtatttaatggagctagaggtaccagagcagcactgtatgtcttgcatctggcatttcaatccagatgttagttgggccagaaagaatgacccagggccctggaataaactgggttccaatgagcaatacaagttctactcagtgaatgtggattacagtaaactgaagaaagatggtccagatttctaaatgaaatgtttcactataaagctgcttagaatgaagatcttccagaagctagctgcactattttccacttaactaggaaatatttctcctttagatacatgaaatcatgttgatataatgtgttggagattacattaacaaataactgaaacttgaaaaaaaatcaattaccttatcctctccagtaat

SEQ ID NO: 34051 - DNA, 3016 bp, Homo sapiens
ctagctaataagtgtcgaggttgggttcaaacctaactcactcactcactcttgcatccaacaaacgtttattaagcatttactagtgtcagcatggtgctacatcctgctttgttgctggggctttaattttcattttgaaataattttagatttactcaagacctgcaaagatagtacacagaattcccatatactttcactcagctactcctaacactaacgctatggtttgtttttttttattgacaaactgcaataatcatccattccaccatcaaataattgagagggcactagacagtcccagctggcacctgcctctgcctgggactgcccacaatctctgttccccactgacatctgactctgcactgccctcccaactccaccatcccaaaggtaagacaagggaattaagaaaattaccacaaatcaaaggttttttctcccagttagaattaagccactgctaacgggaagtaaagccatggaaagaattatacttttaaaacaagtacagaacctccgagaaatctcaaatagaaaagaacagtaacaatgagaaaaaataataaatataattaaacactacaccagtggtagctatacgtgccaggcatcatgccaaatgttttatattcattgaatcctgaacatcccataaggtgggtaccactgttatccccatttacagatgagcaaaacaaggtacaaagaagttaggttttactcgaagttccacagctcaaaaacacttccctttccagggaagaaaaaagaacacaaggctcctacccccgttttgaacttctaagctatttttaacaacaatggccaccatccagacatcagatgtgaccaatctccagctcagcgaaactattcatgagtgtagcatttttcagcccttgagtagtctctgcctaagtgacgtatccctgttgtacatgtttccaagggaagtgacaaaatttctgagggacttgcacaacactgccaaaaagcaggattccaaaaggcctttcacgcatgttttcacaatgccccaatactacctgcctctcgtctgcaccatcccctcagcaatctctgccatgggctgacgcctgctcttcaacagaagttattcaaatgacacatcgtatgcccttctcatgctgtactacactgactgtctctacaaaattgtggtgccagaattcacttcaaaggatctgcatgtctctgactacatgacaaagatgtagcgtataaaaagggaactgtctatttctggcaccacaaaatgcaatctatttgcctcaccaagcacgccgctgctctaaagaaagtttttgctttcaaagaatcctgggtttgcctttaaattcacactgtttcatactgaagtgactaactttgaatcattcaaaatcgctgtggtccttagaattttcaggcactacggaatatactacataaatatgagcattctcaagcaatacacactaaaagacatacagccaatggcctaacccaggtccacctctggaatttgggagctgacagaaagtgacccagaaccactagaagcacaaagcagaaggaaagataagtgctgaccaaaatgcaggaggggacagggtatcttaggaagctggaaaacatggagagatgtaaaggaccaaaagcaactcctgttcctggtcaccaattgggatcagtggaaaagagtttcagtggaatcccaggagacatctctcaaatgacctccggctccagtcctgggaaacttgctcaacaaatgatgcaataaataacacaaaggcaaaacatatgaagctgctttttatttttaaggctgtaagaacctcttgtcacagctctgagaaggggagactgaaggctggaggcagccacaccaaggaaccaggcagtgaagagcagggtcgtttcctaactgggagacgtggcatcactgcaagcagaggttgtcgtgactcatcaggatgaatccacagagcagtaaagaaaaacaacagtgaaggaagagcttggcagccattacgaaatgagaggggcgagaagctcgggttgtggacccacaagagtgccccctcaaccttgactgttcccaaggctctgtctgcctgcattctttgaaaaccttccatctactggacctacagagttctggttcatcctctcaaagtccaggtcagatgcctcatctttccggtgaagtcctgtggactccaaacgtagtcactctcttctctgtgctgccacagtactttgttaaacacattaattacaaccttagcttacattgtattgtaaatgtcacccaccagactatcctgggggctatgattatattttactcatttgtatttctcacagtcagtgcctagaacatagtaagtgctcatcagatgaatgatgagggtccactagtaggaccctccagagttcctaaggccacagcagttttcaggaagattcataatcaacttatcaaaccaatttacttgaggaccaatctatttctggctgtggggatatgcaccactactctccctgctccctctgaaataggaatgaggaagcttctcccttgattccattctagccatgggaacaagaacgcagatgcatcagacatccttggggatgaccctgccaaacaaattatattccaatctcacatccaccagaccaaaacctaaactaggtcaaaatcattcattcatactgagagggtattaaaagaaatatttctgaccctttccctcctctacccatcagcagatgaaatgagaaagaccagtcataactcttttttttgtttgtttgagacagagtttcactcttgttgcccaggctagagtgcaatggcgtgatcagggctcactgcaacctccgcctcccgggttcaagcgattctcctgcctcagcctcctgagtagctgggattacaggcgtgtgccaccacgcccagctaatttttgtattttttagtagagatggggtt

SEQ ID NO: 34052 - DNA, 985 bp, Homo sapiens
gtgacagaatacttgatgtgctaccacagaactgcttgcaacgctgacgggtcatctctgatgctaagggagaagaaaagggaaagtccctggagagccaccatattgagtctttacaatttcatctagtggactgtggagccataaatggtgcacaataaatccaggaatgctggagggcgaactgacaggatccagtaggaacatcttagaacagaccggtgtgtgtctcaacacctaggacagctgccccacaaacagacggtccagggacacacccttgcccctccccatttcacaaagctcccatggggccttgtctcccagcctctagccttactccagtgtcaatatgggatccggcaggaagaggccaatgtgcaattactaaataaaactccttcattgactgagttgcctcctctccttccaggctcaagatcaaagattaagcaacagaggagaggtggaagtttatcagagaatcaggatttcaaggttggaatggactctacaaaacattcaccctcctcctccatggcaataactatccatactttcattattaggccaaataagcctctacatttaccctcaactccacaggcccatggatggactctaagagtatttggtatttaagataaaaatacaaatttgacacagtgcaccctccaatgcaaggtaggaattggtgggcaccttgaaagaagtatccttgttaaacctctaagactcttgtattgtggaagaattaattcattcttggggaaatccagttatttctcccatgaagacaaagagaggtaccttatgtcactcacccatcacctgtctagacacccaggactttcacaagtatgactggagaggtgaggccaaacacaagagctgagaaacagcacagccctgtgaccagtagccagggtgtaagcccagctccaccacttactagctctgtgatcctaaaaagcaggaaaacact

SEQ ID NO: 34053 - DNA, 571 bp, Homo sapiens
gaccatttttatgtacaaaaatggcaattttatattaataaatcaaatatatgtgaaaaagaatacaaagcagtgcatttacaatcatcctaaatgcctaaagcttaggccttttacagaaaatatttcaaatgactgtttaaaaaaaaaaaaaaaaggatcaactatttgtatggggctaatcctccccacccccagtttggtctacaggacctcatgtagattgagcaactttggctatttgggtagctgatccactgccaagctggctcccagctaccacctgttactttgacaactctagcttcagggctaccaggaccatttgcaaaacttacacccacagaaaactcaaagtctccagaggcataagctccaacccccagagagctccacagcattcttctccttctagtagtacttttggtttccaggaaaatcatctcatgctcgggccacagtcacagtcctgaccagcaccatagaaatttcagccattattctagttgtatggagtcattcaaaatactaattccgaaagaagtttcaaaggtccaacgccgagcatctt

SEQ ID NO: 34054 - DNA, 2433 bp, Homo sapiens
atattgtaccagaaatgtctggaaccctggtggtctccattaatcttcaccacaaagtacaaaagaacacattgatccttcaatgaaaataatcccctggtcttggaaaacatcagagtcaccaaaagcaaaatcaagaaacaacacataatggggttttggaaagggaagaacaaagattcaatcaatacgaattgctcatcttaaacaaaatctactgtgcctatacccatatttaactcaaatcttttcttcaaaaaataaaaaaatagccaaaaccaaacacgccctgatttacatctctctctgcattattctcatcacttaactacccatgttttactccctgaaagaagtaatgacaattttataccactgtaaattcctgccagtgagagaaaaaccctatgacttggggggaaaagtgtcaatgacatgtatagcgatgtactcaaccaggggcagaaggcagctcacagccacgtagtaagaagagtggcaggaaggacggggtccccttccccaggaacacacaggaaatcatggagtgcaaaccctccaaaaaacgtgtgcacaaacacctggcaaacatcgcatcttttatctagaagttccgtggtaaacacacatccaaggagcccacatcccagggaccctggggagtgactttggaggagtgtctattagtcctccgatgctcccggtcgccgacgatgcgcggatggagttggagtgagggagccagagaccagccccagtttcggttaatcagtccctttccagtgggattcgcaattccccgggtagttctctcccactgttccccttccctggtcctctcgcccagggtctcctttcccacttctcgctggctacctgaggcctggttcctaacagaacctaagaggggagggggcgtttcccgagttcgcggacgcccaacacccagctccaaatcccagaaactttccctcgctgagaccgcaaggaaggaaaaaagctaagaccctcagcctccttcctggggccgaagaagaaaacctttctgcgctgccaccccggccgggagctggcggtcaagttcgcggtacaaggagctagggacgtcagccctccagcccgcgcctgtatctcggggtggtataaacaggatgtcagacagcgcgctccgggcttgtttatgaaaacttgccgtgcgcgctgggggagggggcggcctggcttaaccgctcttctcccggccgggggcccccgcccggcgacctcctcgccgcccgccggctccgcggggctggaaatccccgccttccccgcccgagccgcggggtcctgagctgcgctcaggagcagcccgggccgcgcagcctaaggaccgaccaagagcggtggccgcgcctccggccagtccgggctgcgcgcccctcgcctgccgaccgcggccgccccggctcctccacctcccccggtgacactcaccacttccgtgtgcgcctgggccaggcagcgccccgtcgctgcgctggctggggtcgaccggcaggctcgctaggcggccagccccgcggggccccagcgtgcgcgcgcccagggctgaggaggggtcgcggcgaggacagccgggactgggcgcaggcccgcactgtctgcagctccaggatactccgcggccgccgcggcctgcgctcagcgacgcaccgcctcccgtcccgccccgccccgccccgcggccggccccacccccgtggccgccgggcccaccccctcgcgacgtcaccagcggcagccccggaaagcggggcggggtcgcggtcccggcggagactctgcgcctccggcctacccgccccgcccccatccggcttcgctcgcgaagctgcccccactcgtctctgttcaccgcgtcctctagattctagaatctagaaactcatctaggacgcgaggtcatctatcgcggggagtaaaattgccaggattcgcccgtagattgacccctcccagctctggagccccctccgccacacctttgtgcgctcgatgcagaaatgcatcccgcctcctccgtatacgctccgcttcttaccccagctcagtaggagaggagctagtggagcactagactaaaaagaatttaacaatacagcccccagcttggacaagctactgcagatccaacccattccgtattttaaaagctctttacgaaaaaaaaaaaagcatatgcataataggaattagaactacattcactgatacctaatgcatgtacagcgcttttcattttttactaataacctctcaaagtagtagcatcatcttatccatgaggaacaaattaagtctttagtgtcttaatcaaggtcacactgtagccaagattcatacttcgtaggcagtccacggacaaatcctaacaattttatttccttaggt

SEQ ID NO: 34055 - DNA, 1140 bp, Homo sapiens
ctccctgaaaacttccttagttcctcaaggtaggcagaattcctcctttagtttcccagagtactttgcatgtacttttctactttcccttatcacaatccattctattttgcttgcatatctattcactctaccctaccttatcccaggctgtgagtttatggacagcaggaaccaagcagtcatccttgtatttgcagccataggcattctgtaagtattggatgaggatggaaggatagatggatagacagacagataaggaacatgggataactagtgacttggtaaaggattaggcctgggtacccaggagaccaattaaaacagtcattgcttcacaagcttctctaaggctggatctgaacagaagtgcaaagggcatgacatttgaagaattgtttgcctggtgtggatggttaggcaatctacatgtgccttcaagggaaaagcatggctagttggtgactgctgacaaagttggtatcaggcagaacaccttggcaaccagaagccaaggcaggatgatgcctctaagtcttcctgcagcctgaaaagttaatagattagtcaattagaagcaagtcctttgaagtgtggtcagtttcaggcagacttgtggacaatgactattctctctgtgattgtgttcactgtaaacaatgatgcaagacctaaagatagaaaggggatgtgaaatgttgttctcacagaagatggactgtctggagataacatttccaagtacctagagtataaagtattttataacatagggcaatatagagggagatgctgtatcttgacttttcagaaaccattcttattttattcattttgttcaaagcaattgaagatgataatatttattgattgatcacttattgtgtacctcatactttttaagaaagtgatatgctagagttggccttccctggctcatgagagtcaattatgtgtgtgttttctcaagccgcattagaagattttacactggcatcttaaattcggccatatcaggaatatttacaccatggaaactggcaaacactaaaaatcagggttttcagtcccatcccttctgagagctgcttgtcaaatatttactgcacactactgattttacaataaatgatccta

SEQ ID NO: 34056 - DNA, 446 bp, Homo sapiens
gacagcagcccatactgtcggcatgggagtggggtccctggttctagagggagcaaagcagaccttatttgcaaattattgtgtagatcggttttaacctgtctgtacgtgaaggactggcacaaaatgctcacctctgtttgcctaactctgaactaacccagattggaaaagcagcaggcattgcttgaatcatcataaggtagaagaacaaggcctgaggcaaaaggtcacagttgagacatgcaataaaccacctaaggcttgggcaaaaaatttgagaacagagtttctttgggaagttaggacaatcagaagcacctgtgaatgcagggaatttagccagccatgcatgtgcccagggcaagatgcttgctcagaaaagacatgattaaaaacttcaggtttcatcacagctgattcctaagctcagtgaaagcctggct

SEQ ID NO: 34057 - DNA, 2292 bp, Homo sapiens
tttgaggggcagcaagtgtttgagtgtgagtgtgtggtatgtgtgtttgaggggtagcaggaaccctagcttggtgtctgtcagtaactagatggtgatgcaggtaagtgattttcccgttgagtggattaaattcctagtctgtcagagagggtgttgacctagaatgactgcgcaggtctcctgtccagtgttaaggagcgtgagtgccctgatgtccccaggagtgctgcaaaaagagcaaaatggcatatatcaggcgtccccgagatgctggcatctatgttaaaactatcttatttcatcttccaactactccttacaataggtgccctgatcccaatacaagattgaaaactgaggctcagagtctgcggtatgctgtccaatatgtatgtatacacaaacacacacacgtatatacgtatgtttgtgtgtatatacgtatgtgtatatatgcacatatatgggtgtgtatgtatatattttacagcccatttgggcaaatgagtgagccccagccagaagcaagcgcccccgctgcccctgggcagtgggctcggtaccgccacgcacccgtcctatgtgttacctggtcgctgctcactggagtgaaagccatttagtggctgatccaagggaagtatgagctagtggcatgtcgagacaaacctggatttgattcgcagctctgccttctgtttgactacaagcaagtaacaagcttttggagcctgtttcctcacttctaagtgacgctaattatagtatgtacatcacaaggatagtgacataagtgatgactgtgaccaaacttggatcaccaagcctgcacccagggagcgctcagtaacgcagcgctgaggagtaggccaccccggagggctccaggtttcagcgcaggcttccgcggagccagctggatgcgtcaccatccgaaagtgcgagcctggccggcggcggcggaggcgggggcaccgcgcagttggaagcccgggcgctcttaccgaaagcgcgagcccggacttccccgccacgatcgatgtggccagtctgcgcctgccgcagttcccgctcgcaccccggcccctcgcagagtcccaggaaagcgctgtggcgggcgggcagtctctgcccccgggaggggacgcacgcacgcgctgctccttccaggtcccggcggggaagcgatgctttcttggcccgggcttggggccagcgggaaccgggctgtccggccgcgccgtcgcgcctcgcacggcgtgagacaacctagctttttttttttttttttttttaagaaaagcattggcaccgcagcagcctcccccgcttcttccctactaggacgcccgcctgactcgccccattgcacaattcttaccgtggaacagccgcgtgactcggcgggagcccaaaagtttcccaggtttcctcagcctagaaaagcgtgggtgggtgtcccggcctggctccaggcgccctttaagttgtatttcttcgggtaactgggttgccctttaaaatgtggagattgtcctttagaaagaaagaaaatctcacgagctcgctggcccgccaggtctaggttggcgccgggtgactgcaatgaaacgcgtttcttttcccatgtacattttcagacggtaaaagtgtttcgatttgtttgggggagaagtcaggcgctggttttaaaggaggaaggggaatgatgcttaaaagcagagacacgatttggagctctccaagaatcatagtgtttattaacaatgattgtgcttagtagacactgagaaaatatcgaacgaatgagtatttggaggagggatttaaatgggtgtctataggccaacgctttcattctgctgatgagaaaacctagaggttaagtgatttgcccaaagtcacctagctaattaatgtggaaggcaggaatggaatctgtctcgttttgactccaaattcttgttatgagatgggtgcgttttcccctctttatgaaaaaaaaaaatgccttctgtagtaatctctgtaaagccttactccactccctctgtctacgcatctaaagcaaacatacaaaacaaaaaagaaaacagcaatccccaaatgcaatccatgcactcaaataggctaaatttggcaatgccaaaacaatatattaacaaggcattttagttcttattcctataaataacacttttttgttttgttttgttttttgagacgtattctcgctctgtcgcccaggctggagtgcagcggcgcgatctcagctcatggcaacctctg

SEQ ID NO: 34058 - DNA, 615 bp, Homo sapiens
ttatttagtcctcaccaccatctttctagttaagaaacagatttatcttcagtttacagataagtaaactgtggcttcgagaggttacatcatttgtaagctactacagtcaataggtggcagaaagaaactcaaacccaggtttgactgactcttttacactatattctactatggcttctctcaaattattagaggtattcacactatttggggacactaaaggcaacacacattgagctgcgtaccagtggtgatcttactgtcaatgacttttgatctagggtgattcagcaggaaaggtatttttggatgctgactgagcttctccgacacagccattgccttttccagggttatgtgttctatttggttccttcctgaggattccccccattcccctaggcttagcctctgtattagtttccaatagctgctgtaagaaactaccacaaacttagtgtcttaaaaacaacacaagttgtttttaaggtcaaaagtctgaaatgcgaagaggcacagtggcttacacctgtaatcccagcactttgggaggctgcagcgggtggatcacctgaggtcaggagttcaagaccagcctggccaacatggcaa

SEQ ID NO: 34059 - DNA, 3339 bp, Homo sapiens
ggctggggacagacatgccaaattaaatcagcaggtgaaagcagcaatttttggccaatgctgggattgcggagaggactaactaagaaccctggagagcaggggattccctggtttctcagctcacctctccttcaaagcagggataagcacaggtgtggtctttctccaggaaggtggcagctggcgtgcgggtagcagagtgagggaaagaattcctcgcacaggaaggcagggagaagccctggggtcagctgcggccaggagccggcgtctccgccaagtcccctcccccttcctgaaaaccgacctggaccagcacaaattacagcaaagcacccctctccccaataatgtttctaataaaagaaacagactctcatgcctatattaaaaaaccacgagctctagctgatggaaataaacaggtgagcccggggagaagcgggaaaacactgggaatgggagaatgaagggggagaaggcgttcccgaacgtgcagagaaaccgaggcttccccgccctccctccaccctcctcccctccggccggggagaatctgcgtggcagggtgcaagctaaaaatgccactgacggacccctcttcccgccccgtgcccgttctccctcctaccccagactccagcgtcccggcctcgtggtagcgcccggtccccggcgccgcgcggggctcgccctctctccggaccgccgccgccgcggggactccggtcttcctctcttctccctccctcctcctcctcctccggcaccgccgcctcctcctcttagactcctcccgccggatccttcatgtaaacaacatccaggctctatttacagtcgccgccggacggcaagggacccacgccagcaccctggacgcgggcgggggcgggggaaaagcgagtgcgcaacatttacacacacaccccgcccctccgcgccgctcccctccgggggccgagccaggcgcccggggctccccgcgttgccactgacaccccagcgagggccgcgcaaaaccgcggaaatgcccatgggcgaggtcgccccgctacccctcgggaaaaacacacgcacgcgctaacaacaacaaacccagtccggcaacaccctcgcagtcggtcccggagtgcggaggcccggcccggcccgccccgcgccgccgcccccgcgctccgccgcctaccccgaggtggcgaactgcgtgcggtccccggaggaggctgaaggcaggcgctaggcgctgggcagtggcgcgccctcggcccccggcgccgcctggcccgcccccagaccccagtgcggatgcctagcgggccgagccccacggctgcgtgtgcgtgtgcgccgcggccagcctcgccggagccgctctgtgcgccccacggcttcccgcgtccccaggccggctccgacgcgccgcgagacggggccgggagcgcagcagccagcgctccacggcggcgcacgggcgcgcactcggacgtccacactctgcgccccgagcctcgcgcggccgcacgccccacgcagcccgcctcccgcgggcgctcggccccgcgcgccccgccgcccccgcgcccggccgccgcccccacacccacctgcgcccccgggggtcccgggctccccttcctttgttcttcccgctatttgcatgaggattatctaatgacgcagcaaggctcgccacaacgtgaccgtcgccatttttctgtttttattctatctctgccatgtgatagatggcgggggggttggaaaagggagagagacgggattaaaaaaaaaaaaaaaaaaaacttccgggtctcatgaccgggaagggagaaaaacaaaagggagacgagacacaactctaagggaaggatgtgtgtgcgtgcgtgtgtgtatgagagtgtgtgtacgtgcgcgcgctctccctcctctgctgggagaaaggaggctccggcagcggacaggcagcagccatcctcccaccctggagaccagtggccccggtgggtccagctcgcaccctctgattgtggcggtcgcccgtcctggtcccccacgcgccgcggaagctgggggagctgtcagcctgctcccctcctctggctgccttcactcgcctgtccgccccagagctcgctttccctcccgggcggctgtaccgttgtgggctacgttcagagaagtcccactattgccatgagcagggacataatagagtttaaaggccgccgtattttctaagttttaaaacagtttgcttcgacgccgttgtttatgacaaccgcgtggcaacaccaggcacaatctaatgttggttccaatccttcccctctttctctacccccgctttcccccttttcccaaagtggggcacaacttggtgtggtcttcaatggggattggttttgtggggatggaccattcactacggattgattgatttaagaaccgcttatttaaataagtggtgttcagggtcagaggattgtttcagaagacagttgcatagagcaaggtggattcgtgttacactgatcttattcacattcaaagggagtgatagacatttcattctttccgaagttcacagttgctgaaaaaaaaatatttgggaactctgccactgttttccggtgagatatagaattttgtactcttgtttactactgggttcccttcaggcactttcacttttgtttttcgtgagtttcctttctggtttttttttttttcctctatttcttaattcagagcagaaatggacttcatagttgagcagggttcctggcttttacagggagagaaacggagactctgagtagtgctaggagttgctctagggcacacatttaattagagcccagcttggattgcgccctgctcacctgtcgtttctcttaggggttggctataagaggatggggtggggacgggactcacggaacatcgctatgtgcttattgtgaattatttttattagactcacagagttgaccactctcccctttgtgcatccactgtatggtttttacatttattttctggtgcctttcacagatcagcgtacggcacagttgctgtatctcccactagggtaagctttgaggccagggccatgccatactcattttatatctcccatatttagcaccatgactagcaatgaatgagcaaatgaaggcctgaagaggatcttttccataattccatcctaggaaattccttgcatgtttctggtgaaggtagaacactggagatgctttttgattcttacacctctgcagaccatttttggcagtcttctttagttacaaagccaggcaaaacatgttttgc

SEQ ID NO: 34060 - DNA, 629 bp, Homo sapiens
gggatcccagggaatcatgggtacacagaggtgggacattctacttagactgcagaggaaggcaaccaggaaagaattcctggaagtgtcactcgagtagagtcctgaaagatgagcaggaggtaacttggagaaaacccaagcagagacagagagaaaagctcctgcctagacatggaaacaagaaaaaacatggcacctgcaggaagggcaagtcgtttgaaatacagtggtgggagaaaatgttagtgctgttgtatggtcttgacacatgtacattaggagttcagagaatggagacatttttaaccccagtaatgataatatcttacattttttatagcactttacaatctgacaaaacattctctaccttatcttatcgtttaaccatttcatagataaggcaaatgagggtcaggaggtcaaatgccttgggcatagccttacaggaagtgagtggcaaggctgaatcaaaagttcagggattttccttcccaattcagaatggaatggagtgtcagagggctcttgccgagatcagctgttttgtcctaactctgtgttcacagagccacacaaggggccgcctagggacgggagtggctcagtttgggggggttctacca

SEQ ID NO: 34061 - DNA, 2721 bp, Homo sapiens
caggtgagggacatccccttcttccctgttccctaaggcgcctagactttggagtcagtcagtcttgggttccagcctcccgctaggacgcaatttcttgagagcaggattcgatctgttgttcacggctagatcctaagcgcctagaatagtttctggcacacagtaggcactcaataaacatttgcagaatgaatcaatgaatgaatggtcacgctccattcctcggctgtaaacacaatgaaatcacctagccgcaaacttggcgcacagtaggcgctcaacaagttgtatttttcccttcccttgcagtagaccgcggtccccaggcgaccgcgaaagaaaaaaaggggtttctctacctcgcgtggtctgcacctcgcttcgcccccgcagccctcgctgggtcgcagggagcacgtgggccaggcaggctgggtgggagtggagtggagtggaggggagggggcggcggccagcggctcgcgcggagccggtctcccgggcttacgtaaggcgcgagtcccgcgcggccggccggggctccgcgactgggcgggcggaggcggcgccgccctgcaggatccgggctggaagcctctcggagtgctgcctccagccaaggtgtgtgtttatttgattgcttttggtggcgaggcgcggggctcgggctcgtcgcgcgccccatggccggggagcgcatccgccaaccccgggcggaggtgggcccctccgagcgcgcgcgggcggcgggcagcggcggcagctgagactccgggggatgtgacagccgccggggaggggacgagacgcagaccacacgttgcccacgtgcgaggaccgggcaggggctcagcccctaggccgcccggtgcgtggggcggcgggggctggctttgagtcacccccgcttgtgccagcttccccggctcggcggagactggcttggggatgcctggccgcccggcccccttctcggacgcggcgtggggagcgagctggagttaaggatgaaggtgggactggccgggccgacctctgacccctggaggccgagtcggcagggcggggcacggcgcgcttcagcagctttgcgtgggggcgaggaggtggaggagggcgaggaggtggagaagggcggggaggtgtagcgtggcgctcagtccgcctgctactcggtcccggcgctgggctgaggggaggggttgtcttaaaagtctctccttccccctgtaggggcggccggcgagtcccagtgagagcggagggtgccagaggtagggggccgagaaacaaagttcccggggcttcctccggggccgcggtcggggctgcgcgtttgaccgcccccctcctcgcgaaggcaatggcttccaaactcctgcgcgcggtcatcctcgggccgcccggctcgggcaagggcaccgtgtgccagaggatcgcccagaactttggtctccagcatctctccagcggccacttcttgcgggagaacatcaaggccagcaccggtgaggggctgcggggacgagggccgggggcgagccgcgttgggctggggtgaggccctggagggactggggctcccggatcacggcgcccttcccccgcccgcgtgtggtcgtgcaggctcgtacgtgccggggcgcatgcagctggcggccgcgcggcttaaccgcgcctggggaggaggccgaggctccaggggcggccggtgggaggtgcccacggctcctctccaccgctcctcctgtcgcgaggaatagcccgagccacccggccgagggaacgagaactaggcagggaaaacccggagcttccgtctcacgctgccctccttaaggcagagccgtccccgtaccccttagccctggccccctcccccgagtccctagagagccgcgcgccccctcccgcgggagcccagaggcggagcgccgcccacctgtggcagtcgggcggggccgcgcgccggggaacctgtggcgccggggggctcgcagcctcgcgcctctccagcccctccacgcagcctcgggcctcggggcagagccctgggtggctttgaaaggcctgtctgttcgttgtcgccttctaaggtaaactctccccagcaactcccccccctcccgaagccgccgggcctggccgtcaggagactcggaggagactcgttctgataaattacattttgtaatgcagctttcctggaaatggcttcttgagctgcctcccttggcatgagatgcctcctttggctggcgtggtgaacttggggatatatagatcgcctgatttcttagtctgacggggttgagtgcgtccctttccccctctcctcccactccacgttcacaccagttccgaaagaattggcgttaaaaggcgagaggtagcggttgtgctgctgcgaggctcttaacccttctgggatggagatgctggtaattagcaactcctttatgaaaagttgttcttcccagcaggggtcctttactgtcgatgtacttctcaaggatgtccgggctggttattgcccatcatggactaattatccggagatctgcatttcagaagcacagactggcttgaaaaggaaggtggaggacagtaccagaaaacaaaaggaaagcttaaaagcaaggaattaagaagtatctccagaattgtattccttatctcttaagcagattgaaaaagcggacttttacaggaaactct

SEQ ID NO: 34062 - DNA, 2297 bp, Homo sapiens
gtaaattgttaaatggtattatattatgctagtctgctctttaacaatctgtattggtgcatattgtgagaaggtttaaggagttggaaattttgtaagttttttagatgatgtactttcacaatggacaatgaatcagatatttcaaccatgtattttcctttagcaaactagattttttttttctttgaggcggagcctcagtctgttgcccaggccgaagtgcagtggtgtgatcttggctcactgcaacctctgcctcctgggttcaagcgattcttgtgcctcagcctcccgagtagctgggactacaggctcctgccaccatgacctgctaaattttttttttgcatttttagtggagacggggtttcaccatgttcgccaggctggtcttgaactcctgacctcaggtgatccacctgcctaggcctcccaaagtgctgggattacaggtgtgagccactgcacccggcccaaactagattttttttaaaaaagcatgagtagataatagaggcttttggattactctgtgtattttaccccctccacttgatgtttaagctctcaggttggcctttaagacatagtacaaaaggtcttgtttgtacagcttcatgtagttgaatttaaatggctgatgttatattttaacagtctcacctctaagttctgagagtttttgtactagttaaacaacagatccaggagcaagcatcccttacttagccagacagataatactgaaataatgcagagtcattcttgtttatcatctaacttccaagaagctagaaatcaactattttctgatcttcagcaccttctgtctgggcagcagtaacctgtaaccctggcattttataattcttgtgacttggtcataaccaacatttgcagggggcgaagcaactgccaggccctggactgactaatgaatgcaaattatctctaattcccacacagatctccagagcagtttttgttatatcatttgctttacaaataaataaatggcctcagaaaggttgagtaactaacttggtcaggtacagtggctcacgcctgtaacccagcactttgggaggccaaggcggatggatcacttgagcccaggagttagagaccagcctgggcaacatggcaagaccctgtctctacaaaaaataaacagagttagccagagtggtggcgcatgcctgtaatcccagctacttgggagactgaggtgggaggattgcctgagtccaggaggctacagtgagtctatagtgaggctacagtgagctgtgtttgagccactgcaccccagtctgggcaacagagcgaaaaccttctcaaaaagaaaaaaagttggccgggcgtggtggctcatgcctgtaatcccagcactttgggaggcccaggcaggtggatcacaaggtcaggaattcgagaccagcctggccaatatggtgaaaccccgtctctactaaaaatacaaaaattagctgggcatggtggtgtgcgcctgtagtcccagctactcgagaggctgaggtacaagaatcgcttgaacccaggaggcggaggttgtagtgagccaagatcgtgccactgcattccagcctgggcaacagcgccgagactatgtctccaaaaaaaaaaaaaaaaaaaaagttgagtgacaaatatgtggcttcagaaaggttgagtaacttgtcctaagtcaaacagctagttaaagagaaactagcgttcaaacctggggctccatagctaggattaaacttcttcccattatgtcgtgctgacatctgagtactctagaaactagtgaaatactcatgtcttataaatgccatgtagggacagtgtgtcttagtctgtttgtgtggctataacaaaatacctgagatcaagtaatttataaacaacagaaatgtatttctcactgttctggaggctgggaattccaagatgaaggtgctggcaggtttggtgtctaataaggcctgttgactgcttccaaggttgcaccttgaactttgtattctcacatggcagaaaggatggaggaggaaaagggctaaaggccacattaagcttctttgattttattttttctaattttaaaaattttccactagagacagggtctcactttattggccaggctggttttaagctcctatactcaagcagttctcctgcctcagactcccaaggtgatgaagcctcttttataagacacaagacttaaaacaaaaacacaaaaacaataaattaagtttttttttggagatgaggtcttg

SEQ ID NO: 34063 - DNA, 771 bp, Homo sapiens
catggtggaaataacacttagcctaggccaggtgtagtggcccatggctgtaatcccagctctttggcaggctgaggtgggaggaccacttgaggccaggacttctgagaccagcctgggcaatgtagcaagaccatgtgtctacaaaaataaaaacaattagccagctgtggtggtgtaccccggtagtcccagctactagggcggatgagatgggaggattgcttgaacctaggagttcaaggatacagtgagctatgattgcaccactgcactccagcctggttggcagaatgagacgctgtctcaaaaaaaaaaaaaaaaagaaaaagaaaagaaaagaaaaaaacacacttagcctaaatattgcaggatatcattcagcggtgaacaactcatgactgaatttccccaaattatctttatttagagtttatttggattgtttccacatatctggattttttaaattccagaactgtattgatttatgccaaatgacttagtgatgcaaagctcagagaggtagtgtggttgtatttaagagtgtaggctctggatttcgatcctgatttgaccaccctagctctgtgactttgggcagagtagccaatgttttgtgtttactcatttgtaaatgagagtaatgatagagctaacacacagggttttctagtattacacagattcatatatattgacagcctggccagggtgaggggagtgaagctgaggcactgtcccccagtgaaaagtttaagggggcaccaa

SEQ ID NO: 34064 - DNA, 1445 bp, Homo sapiens
gataaataatagtttaatgtgataaaatgaacaacataccaaaatttcaaataaattccagatctggcctggtcaggatgagggtgaagtaagactaagtcaggcatatgtagggtcaggtcctattgttatttgaactttctgcagtttttttatcatggattttttgggcatgtttaaaagtattgcattaaagtattattttttcttggtcattagttgttcggttttgtgtgtgtgtgtggcccctcactcactccctcactctaggtggtgtgaggccagtgtattggtatttgttattagtgattactctagggttagttttgtagaggaaatgaattttagtgcctcatggaaagtccctcccacctccaggatattttctgttaggttgcgtcagagtcccaatccaaatctcataactaagatcagttttggccaggcgtggtggctcacgcctgtaatcccagcactttgggaggcggaggcgggcggatcacgaggtcaggagattgagaccacggtgaaaccccgtctactaaaaatacaaaaaaagaaaattacccaggtgcggtggcgggcgcctgtagtcccagctactcgggaggctgaggcaggagaatggcgtgaacccgggagacggagcttgcagtgagccgagatcgcgccactgcaccccagtctgggtgacagagcgagactccgtctcacacacacacacacacacacaaaaaaaatcagttttaaggtattagaggatgtcgttctttcttgtcttctgttaaatggtgctttgaatgtcatgtttcaaacactgctggagctcagatcccagaaaatgaaaaatgtgtgcacttagcttatgcgtagaggagcctagccaaaccaaacagcacgtttgaaactttgcttttcctttatggctgagattgtgaaagacagccacagatggtggctgagctctagctggaactgctgttagtcggcgcgagatgttctaagtgacgggagccaggaactcactgtggtgtttctagaagttaaattatgatgataggatcttcctgtaatactggttctgttccttgcctttagttatatcttggaaatctgtcacatggttagtgactagtgaaaggccaaaaaaatttgcagaatcagctatttaaagctttgttcttgatagttcaagtgttacgcaaggcaaagcagccctctgttaagggtttcaggctaggtgtctccttgttagggtgtcattcctgttgtaattattggtttgtcttgtcttcttcctttttttttttttttttttttgagacaaggtcttgctttgccatccaggctggagtgcagtggcacgatcatggcttactgctgcctccacctgtcactcaagagatcttccaacctcagcctcccgagtagctcggactacaggc

SEQ ID NO: 34065 - DNA, 758 bp, Homo sapiens
ttgtatttttagtagagacggggtttcactctgttggccaggctggtctcaaactcctgacctcaggtgatctgcccacctcagcctcccaaagtgctgtgattacaggcgtgagccaccgtgcccggtctaggtaacagttttctaaacagagtaatactggttgaattacacaggaaataccactattcagtggggttaagttatgaagagacatttgggtgacatgtgacctgaaattttagcacactgccatcttcttacacactttatccaaagtacacagcctgatcagactttgtatctagctgctgattgcactgaagctattgcaactcctttgttaatgctcccaggtgatcgcatgcatttcttctggtgctaagcattcataattttcgataagtatttattgatcagcagctgtgtgccagacaccacagtagagcaacaaagagactaggtggggcctggctctcctgatactcagaatccagtggtgttttcagctgggttttgttttttttttttgagacggagtctcgctctgtcccaggctgagtgcaatggcgcgatcttggctcactgcaacctccacctcttgggttcaagcgattctcctgcctcagcctcccaagtagctgggactacaggcagtgccaccacgcccagctaatttttgtatgtttagtagagacggggtttcgccatgttggccaggatagtctccatctcttgacctcgtgatctgcccacct

SEQ ID NO: 34066 - DNA, 1540 bp, Homo sapiens
aaaaagcattctataaatattagctattattattgcagccaggtcgtgttcaagggcattggttttgatcttcctctcagtctctcccaattccaagcaaaatctcaacagagaccagtgatggcatggggatggggtgagggagcctcacttctgccatctcagtttcctcatctggaaaatgggaaacgcctcccacaccacggggttgcaatgaggtttcatgaaatgtgtgtaaaagtaactggacatagaacaagttcttaaaaaatcatgtgggtgactagtaatctcttgtattaggaaaacaggaatatctgtcagaactaaaaccacgttctaacgtgatgtttcattttgaggcggtagcacggtgtgagtaaacatcgtcagagtctagggctctggaatttctttagcgctgtgtgattgtgggcagatgccttaccctctcggagtgtggagtgtatggtttgtaacagggagataaaacgggtgagagccccctaggactcctgtgttaataaagggtgctaacggtgccccccgagtgagcggcgcgggcccgcgcgcacccgcacgcctcgggcgccaggcgccgccgtgtgggcggagccgggcagcctcccctgtcggcgccagccacggctcccggccccaagctccgcccccggcgcgcatctcccagcagcggcccggcacctggcagacgcgcggcggcggcggcgagcggtggcgctcggctcgggcgaccgcggcgggggagggcgcggcgcaccgatgggcgccactgagaagggaggccagaagagccggaagctgttttccttgcggcggccgtggaaggcgacccggcggctgtggaggccacgctcagctcgccaggcggcgcagggtgagtgtgggcgcggccggtcgggacctgttaccctgaggcaggggcgcagcggcggcggggccgtccccggcggtctctcgggtcgcgttcccggccctgggagcctggatgcctaggcgacgcccgaacccgaccctcggtcgcgggtaccgggaccgctggggaagcgcaggggctgatgtcggcacagtctcctttcctctagcccctgctcgttgctttggctctggacacagggaagccacggtggcgcggcgacacagcctcactgaggttagcttgtccccggcccccagcacctggcctggcgcctgcaatgcagtgcctactgggggaatgaatcagaacccgaggctcccttcaaggtcctcccgccctgtacccacctcctctctacctgcctgcggtgatttcgaagctctcgccacgataaactatttccaagcacactcagtcctgtcctcgccagggcctcaactcacagccaatcactgactcactccattcattcattccacaatttttatcgagcccctccatctgccttggccggagaacacgatgggcaaagcccggatcttggaactacttctagagaggaagacagacattacacacgcaaaacagagaaagcccggtaca

SEQ ID NO: 34067 - DNA, 923 bp, Homo sapiens
ttgattaaaaccggaggtctgcagtgagggataaataactttgagccagagagttgtagctcattcctgatgtcgaagtctattgaacattattggccacaacctagaaggtgacgtattgttgaaggcatcctgagcttgcttggagaatgcagtccagtcatcagttgactttgggaaaccatgccaatgcaaaaggaagatgacttttgcaacactggtgaaactgaaacttgactaaaaaagattccaggaacaacttttgtggttcatttccaactagtctttaatctcaaactatttgaagtgcatcctcaggacaatatacaagaaattcccctcttacctctgagtcatgctcacttgagagagtctcctgattggatgttgactacctgtaggagaaaagatgcaggaatgtagagtagagttggttttctcactcatttaaaatgttaagtcatgtcattgctctgctcaaaatgcctccccattttactcagcatgaaaaccaaagtccttgaaatggcctgtgtagcctctgtatgctctagcatctcagtgcccgtgacctcatttcccattctttcccactttactctctgcattccagctgtactggcctctttgctgttgcactggctgtttcctctgcctcatactcttccccaggcatctgcatggctaagtccttcacctccttcaagtgtttgctcaaatgtcaccttctcagtggagtctactctgattcctccgtttcaaattgcaactcgtctccctgccctactctacattcccctttctgttgtgcttagtaacttccagtatatgcagtaattaacttatgtgttacatttttttgtcatctctctctctctattagaacatgaattccacaaaggcagggaattttgttttgttca

SEQ ID NO: 34068 - DNA, 581 bp, Homo sapiens
gtgtgcaaaaacaggtatgtgtatgtcttacagtatagagatagcaaatggttttcaactcaaaaactgattttggttgatttgaatcgactgtatggactgttatgttttggttctattttgttttaacaagcatttagatagccaggcactgttctaagcattttaaatgttaactaattcattttcaaaacaagtccataaggtgagtaatattcctaacaccatccccattttatggatgaggaagttgaggagtagagataataagtaacttgcctagattacatcactaataagtggcagagctggaatgcaaacccagggagttggggtccaaagtctttgttcctagccaccatgctcggctgcctctccaaacaaattgagaaagattaagaggctacaaccagacttggagagaaagagcaaagtgattgactaaaatatcaacagaatatgggcagagaagtggtagcatgcatgaatttcaagtaccaaaccgagatcccagtgccaacactgatatgagttagttataatctggagggataatgagtatcctcatctaaagagaaggt

SEQ ID NO: 34069 - DNA, 766 bp, Homo sapiens
agtaagtccactgtagtcctaggcagcatgacagaggtcacagatcttacaagtaacatatcaatggcaagttggggataaggatttggtttttagggttttactttctgtttttgatgactcttatttttgagaaaatgtggaaggagtaagtagaagaacagtttttttcagtgcaacatcaggcaaaagaaaagcagatttttttcagatggttaaagcctatggcaaaatagctaactttctctttaaggtgattggtaacctggaaaggacagctggcgtgggcagaaaacttgttcaagacaaacactgtcccagcattttttaaattccagacattaccctggggcaaacacctcaactttttctttcataccaccttccaatatcttactcctgagcctagggtgctcaaaccaaactctgcttctgatgtgttgtcagttttctctaaaatcacttatcttctgtgggactggagtcaggctgatgtggaaggctcccgcaaaccctatttaggctctctggagacagaatgggtggttggaaatggaagggggaatgagggaaatttaaccccatagaatatcttccccatgagagtagcttagcactacacgaagaaagctaaaaaccacagacttccagggcttgtctgatacgcaggttcccttgagtgctctaataggtattagaaataatatgatagggaaacaagctcttgtaggggaggaagaatctttttctctacctatcttaggtt

SEQ ID NO: 34070 - DNA, 6315 bp, Homo sapiens
cctccgcgaggtaggggaggagctctgtactgtcaggggcggggctctgagtagcgaggccgggtctgaactatcaggcgcggcctctgcgagctgggggcggggttctgcaccggcgggggcggggttgtgagtggtgggggcggggtctggagcagcaggcgccgcgtttgcgagctaaggtcggagttctgcaccggcgggggcggggctctgcgtggccggggcgggctcgggatccgcggggcgactcccggtctggcttgggcaggctgcccgggccgtggcaggaagccggaagcagccgcggccccagttcgggagacatggcgggcgttaaaggtacatcgcggtccccggctcgcttgtcgtgtggtggggttgccacctccgttccggtcaagcctggggctgcgccttccgcgcgccgttggggaacggcctcaccacccttcccgcctctccggttcgggaggcgatcgaccgctcccttcgtcccttggggtgtgggtggagcggcgtttcgggggagccttggccctttttgcaaggccgctggccttcctgctctccagtggcggcaccagacccctccccagcctgagccctcggcgagagcggcgccctccacctctcctgagtttttaaacaaggtttccacttcttgacgccaccctaacgcctttcttctggttttctgcccctccgcagtttcctatttgccacaaaggaccctttgtctccagcgttcttagcattgggaaacttaatcctctttttcctaatgatttttccaactgggcagagttgaccgcgggcgggtgtcaatggaaagcacccagaaagacggtgtttctcgcagtcgtggagagtagattacgtgtaattttaatactgctttcttcggtgttttctctgtttatggacagagaagaaaccagtgtgtgtgtagtatgtgttttttgcatggggcagttggtaaaaacaccgcgtcccttatctgtatggcttcagagcaatgcgagacggaaaaggttttttgcaaggcttcctgtattttggtaggaaaacattccatttctaatctgtcgaatagagtagcatgacttgtttttatattggcttttatatcatccttgaaatttgcacccaaagatatccccagttaacatctgctataaacatgtagatagtatatatacgagtacgcctctgttcactatgaatttatccgagtatgtgagctgttagcagcagacattttatcgttatttctggctgacttttatacttaatatcagtttagtaaacatggtttacttggagagtgtcgactgtgttatatatccatttgaagccaatgccgaaaacagatgaaaagtagtgtctcagtactacacatgatcagaaactaccaaatcatgatcacgtttatgtgtgaatgtgttagaaaattgtgatgtagtgaaaaaaaaggaagtctgaaatggaaacggactaagggaaggaagcattttacagattgttcaacttttattgaggaactactgtatgccagagacttaggatacaaagataaatgagaagttattggtgggtgacagagctggaaataattatattactatgtcagtgtttatgttgggctcagatgcggtgggagaacagatggtgggttggattttgtcctccaaaaagatgtgttcaagctctaattccctggtacctgtgaatgtgatcttatttggaagtagtatctttgcagatataatcaaattaaaatgataactggtttaaggtgggccctaatccaatgactggtgtccttataagaagaggggaatttagacatagagacatacagggagaataccatgggaagacggagacagaaattggagtgatgcagctacaaagtcaggagcaccaaagattgttggcaaccatgctggcaaccactgagtgttaggaagaggcaaggaagggtgcttccctacagccttcagagggagtgtggtggcgctgctgacaccttgatttcagaagtccagcctccagaactgtcagaagataaatttctgttgttctcagccatccagtttgtggtactttgtaacggcagccctaggaagctgatgcaggtgggattgattcccctgctccagagaaaggactgttttcacagaagaggcgatgcttgaactgaatctgaagggatcaatgtggcttcccttggcaaggcatggagtgaaggtggagtatatcccaagtggggaggacagcacgtgacatggcgcagggcttatgaaacaacatgccttcttctcttcaggtacttaagctacattagtaagaccagaacttagtggtgagggttgaagctggctggacaggcagttaggagtgagtcaggcgatggtgagcctccgtgccagaacaacttgtaggctgtggaagcaaccgcaaagggatggcagcggtgatatatatagttgaaagatcactgtctgctgtgtagaggatggattggaagagtcacagaggcaggaataagaggttaagggcctgcaccagggctgtagcagagagtttaagaagtctgggagattgagtcaccttgacctactgattcattggaaggtggaatgcaatcatggtgtcagtcctctaagataggacctttaaagtgtagggatagtggtttggttttacacgtgttacacatgttgaatttgaggttcttgttggcggtcaaggcagagaagtccagactggaggtggaagtacaggcctagttctttaggacctactctgggctggagcatcagttgcggccgggcccttgtggtagtaggagctttgggttgaacataagttttcagcaggagtgcgtggagtgaaaagagagatggggttggatttttggtcaactccaactttaagagattcagaggatgtgattcctgaaaaaagaggaaaaaaaagaccaaaaagaatcaaacagaaagatggttgtgaacgttgagaaactggtatcagaacagaaggaagaggtctgcagtacctagctttgacaggcctcatggaggagggggtactgccgatggtcaggcacagaggagaggagcaaagcctgctgggaaaagatcatctgaatgaaatagtatgtggtatttgctttccatccacacatgggcattttccattaaagagtggaaatgtaaaaagatatgttaaaattgacagtgtttctttgtcccttaacatgtgtatactttcagatgttttttaaaaagcactttggcaccttcctattaaagagtctctctaaatcttctctcaagtaaaaggaagcaatcaaaaatgttcattggcttaattaattagtttaatactaattatgagtattatggacttttttcagaagaaaatttggataagatagtctcctatgcttttgatttctacctttatcaaagaacattgctaaaatgagtagatacctgagtcagtcagcatttatttggctacctccttttgccaagcactttacatagattatctcatttaattcccataagctcaataaggtggcaccattatttccattttacaggtgagaaatcaggttcagaggattagcttctacccaaagtcataagaccagatggtggcagagttaagatttgactcatgtttgtgactcagagctcaagattttgtaacaaccttgatactctgtttctcactcagcagcacaacaagggcaaatacgttcctactcccgcagagactagtgtccaatagatacagggaatacatattttattcagtgcacactagttgggaattgtttcctacaaagacatgaaaacaatcttcaaatacttgcagtactgtggtttggggaggcaaaatgatcaaaggtatatattacagggaggcagttctggatataatttaaagaaggagggctttcaacatttagaagctgttggaattaaatgacttgccttgggaggtagtgagttttccttcactggagttatgtggaccaactggctgccctctggtgacaaatacagagggaattcatccattggataggggttaggtactggaattacttgagacctttgtatactttatgatttcaaggtggcagacatgggtcattgtcttaatcagtttgggctactataagaaatatattttagactgggtggcttaaacaacaaacatttagtttccacagttctgaagactgggaagtccaaaattgtggtgcagtcagatctggtgtctggtgagagccagcttcctggtttgcaggcctgctttctgctctcacattggagaacagagggagagaaacacagagagagtgtgtgctctactttctctcttcttataagggcactcatcccatcgtggagaccccaccctcatgacctcatctgaacctaattatctcccaaaggtccacctcctgatagcatctcacggtgagagggatggagccgggaaggtttcaacatgtgaatttgaaagggacacacataatgcagtctgtaacgggtcaaatgtaacctcaataaaatgagtaaattgctacatttgcttgaatttgggacctttttttctttcttttttattttagtaaatgtttttattgataaatgattcacataccataaaattaacattcttaaagtgtaagatttcatggtttttagtatattcagaaggttatgcagccatcactactatctaattccagaaaatttactcatccgccaaagaaactctggacctattagaagtcactccccatttccccaaaccctctagtgcctgacaacctctactgtgggaactttaacttttggctttatttttcacagctctcgtggcattatccttcagtggggctattggactgacttttcttatgctgggatgtgccttagaggattatgggtaagttatcatttcaaaaagaactattcctctttctgtgtctttgtcactattagtatgggtgttagagagttcggtcaatttagcaccaagttctaaccagtgagttagtggagcccagtttatgaacacagtccctttgtgggtcaggtgtacttttgcagagggctctgttaaaaattgatgtattcattccataagcatttgtttaacacctactctggactagctggggacacacaaatgaagagagagtcctgtcctcaaagaggaggtaaagttctagttgtgagtgagagacaggcaaacggtctagtcagtaatctggcagctgcagtggagatgccagcacagtacgctggagctcggataaagtgcacctgagtttcagtgggacagtcagggaaggctgcatggcagaggttgtatctgagccaagactaggtggatgaataagagtttttcagggtgatgagtcaggggaggacattccaggcagagggaacattctacacattttttcattcaaccattgttggttgaatgcttcccatgtgccagctactgttatgggaactagggattaagacataagaaaacaaaggtcctgctctctcagagtttgtgtttcagtgggggagacggacagtaaacaacaaaagtatgcatactgtcagaggtagaaatggtacaaaagatgaagagcacagaagctgggaagacagtggtcagggagggcctctcagaggaggtaaaaagtgagaagaaatgtcaagaaaatcagcaagcaggccatacagatctctagggaaaaagcactttaggcaccaggaaagctgaatgctaaggcccggagacatgaaagtgtatatagccttttcaggaaaccacacatggtacattatggtacagcataaattgtagtggagtggcaaaagaagggttagtcaagagtgtaaaagtcagcacttagggctctatatgcctgccgtgtagaggaggttccattttatacatcagacaatagaacctgggaaaatatcttgagaatgggtttggaggagggggttatgttaaaatgtcattcttgccataacgtgagactagataggaaagagctgagactgcagtcagggagaatagtaggggactactatcataaatcaagcaaaattgagggctggggcagtaggaatggaaagaaaaggagagtgagttaggaaaccaaaccaaccaacaggttttgttcatcgatgtcaggattcaacaaggagggagagttcttagatgtctcccaggtgattggcttgaacaactagatagaagatgatgtga

SEQ ID NO: 34071 - DNA, 1748 bp, Homo sapiens
attaagatttataatgaaaactcttttatctatatgtaacaggaattaaactttatgcaacaagttaaataacaaactttctcgatatccaaatgagtgctttctttatccaagttcatcagtgtaggggaaagtcctaaccttatttcaaaaatgtgcaaaatattttgtaataactaggtaattctaaaaacatataaggaattatctgaagttaagtgtggtgagtgaagtggatgattgatagtcatttgggagcagtaaagtgggtaagagtaaaaattaatgagacagtcttcttcacgtggttcaaaaaacagcttctgaaggcagtttccctggaagagctccagaagtgttcttgtatgtggcagtaaagaaagacaatactcctgatgactggtaaccaagtaatgctggcttaaacagttacttatgtgataatcaaacttcccttgctgatataaaagtttttatgtattcttggtttgatcactcctaatttgtctgcatgcaaggagaaccagacttaaggtaggatccactcatttactgactgattgcttattgaatgccttctctgtgctggacagtaggagtaagatgaggagcactgtggactttgtccctgccctcatacatttatgataaggggttgtggggtcagggcatggaaaaaacaaaaggcaaatctttaagacaaactgattggaaacgactgctattggttaaatacacccacatgttgagataatttgtactttcccaaaacattatcttgataacattatagtcccagaaagcgttagggaatgtagtaatgaaactttggcaggtcttgtgcctctacaatgtttgtgttgctcatgacctttgtacatgaatgcttttgcccatgtggccagtcaaaaaatgacctggttgacctgtttttccaaaagacctttgaccaaatctttgatggacaaacagagaatcatgttttcaagaaggatctacttgcaagcaaagttctatagtgtagtcagggaaggctctatgaagtaatgaactcttctggcaaagatctgaaggatgagtagaaaatagtctggtcatgagctaggggaagtgatttacaggcaggagtaacatgtggaatacagaataatttgactttaataaatttcaaatggtaaaaattttccaaagttcaaaatagaaacataacatcccgtgatattagaaaatctcattactttactttagtctggccagaaatgtgtcaagaggaagacttcaaagaggtagatttcatctctctggcctgtaaacaaaatgcccaaaacacttccccaaggcttaaagtcagtttgtaattactcttttcatcacctcagaagaatttccaaactttagtaacgtagtaaaattttttttggcctttgtgaataaatactatgaaatttggttcaaaagataaagcaaagagcaactgaggtcttcaaaacatcatgtatctagaaggtattaccaaacatccgttttttttaaaaaagcataaggcataaaatcaattcactaatgtcatgctagagtgaggtagtaaaatgaggcaactcagaccagatggtgtaattcataaacagggctgtcatttgggaaaacgggtggagtggatggagaaattaacttgcagtctttccccttccatttcttcccaatccaactaaccttattcctctgggtcatttagctgtggctaaaac

SEQ ID NO: 34072 - DNA, 707 bp, Homo sapiens
tattgcatacaaatccaaaaattattacattttattgtagcttgaatatatcttggtgaactcattttcttagagtggctctggttagctctttattaaaatgacaactgatgtcacagaagctgcctgaggacacatctaaaatgaacatgcttttagtggtggttaaaatactttgaacagtcaacaaatatttacagctctttttgtgtaacgtgctgtactaagtgctgggataaagcagtgaacggggtggacatagcctcagaactcccggagcttgtggtccaatagctcagtaaaggtctactgaatgaaagggagacttccctttgctcacaatgaggtcattcctcatgtttttgccaatgtatttttcctgcctggataatccaccctctgacctttatccacatcctttacccatttctttttcaaggtccagatcaaacagcaagttctccactaagcctctaacaataataacactgatggcagctaaacatttattgagcctgatgctaacctctttacatggattacataactcatttctcacaatgcactatgagatatttacatataattcttcagtaacccaattgaggggaattgcagggcaattaaaaaatacgtataacttaaaatgttgaactcagcatgcccagaactactagaatctttttgagcatagaacttaaaatgta

SEQ ID NO: 34073 - DNA, 2426 bp, Homo sapiens
tgagatttgggcggggacacaaatctaaaccctatcaggtagcatggggcagtatgtaggaatagctgcgtgatgaaggtcctcagatctgaagcagcctcatggagttccaacttgcctcagcaaggtgtaggagcagtagactaattcctgagcctagcatagtcatgttgctgcgccttcacccaggtgcccagatcccagaatggtgctggagaacacttttcaatgcacttcagcagggcatcaggggccaggaaggagagtcattgatcctgaagtgacctttggcatggatccatgtagatcaacacttgaaaaacagacaggatgaggagggagatgccaaattcaacaaatgaccaaatatcagaacgtttgcttattctggccctgccttccttctgtcccgtgtcccttgcttaaaattagatgtgaactgaaggaaaagaaatgggagcctgaattcattgaggctgagtttctatcatctagtaaaacaggatctcattgaagaaattaagttcagttgcatgaaaaaattaagccacgctttctgatcatctgcttatgtgacctgaaatttaaattttgtcttctacttcagactgtgttcttatatgcggcagagaacctggctactagcagctgcagcttgcaactgcatatattcaccatctggaaggaaaaagctcttcacctccttgactcttacagcatggtgccctcatccaagctcctgtttgaaaagcttcagagaacaatcttgactggcctttttctagtcatgttctcatcctatttaccaattacagagttaggaatgtgagatactatgatggttccagcttggagctcttgctatgtggcctctgaagccagcatgctgtaactggtagctctgcctagatccatgtgcttggtgttagggaaggaacagtttctctgccaaaagggaataaatactttgatcagaggtagaggaggaggggaacaggctgataaaaacactgaactgcattatctaccttgtgtgcctatactaataaaggtttccttaatgtcacattgatatgatcaaagcaagaaactaaaattatgaacaagatactgactatgtcttttatgactcattagttcagaattagaacctgggctctggaaaaaaaataacacagccatttcattgtaaatttgtaaactttgcagcagtttaaccatgagagttggcatataggtcagggaataggcctggtgggttttgctgtcaaatcccattatactcctgcagagaataaagtgctttgtgcttcgtgaaaattggtttgtagtatgtgtgtaccaattatcaggattgtcagaaatgttggccaatttcctttcaggttcatagggacttaaatctgaaatacttctctacaaaaactttacttagctgcataattctgaaatagctttattctggccaactgcttatttataacagccttttcaggtaatattctaggagttatttctcaagatttattccctttatttttcttgatattctttcaggtgcaaggaaataaaaaataatttggcttatgtatacaatttggataattttgtagtttttcttacactgtgttgctcatttatgagaaataggcaaatagataaagaaaattcggttactgcatgaagtactgaaaaaatgtaaaaaaaattccttggggaagtcatattttagtccacgttctgttgttaattttaatcttggggttaagtaatttttgctcttggtatgagattataaacaaacaatccaattgacttgcctttcaactctgaacagtttcttgatcacagtgtaaatagctgcttgaatttcactgctgttacatagcttttcagatagtcaaggaaatatgattctgccatattcatgccagcagattccaaagggcaaggaaagatgtttcaacagatcaggagtctaaatgagttacacgttgagcaattggccagtgaagagccaccaacagtaactgggcagccccaggcctgtaggagcatctgaatggttctagttcccaggaagagcttccaaagaacacatggtcttacatagatattttcaaatagctgttttcctcccaattattttagtaaacctatgattgttgtagataaattagaaaagtaaatataaacaggaaaataaacttatgcattattccataatctgaagatgcctttgataacattttggtgtatagctcatcattttttcttatgcatatatattttaaaatccatttagattatgctgaatatataattcctataatatatgttctgtggtaatttagaataaaaatcccttcggtatgtgaatttaaaacaaattataggcatataatcattgtgaagtatctattctt

SEQ ID NO: 34074 - DNA, 1586 bp, Homo sapiens
tcatatagctcaatcccctccaaacacccccacccaccagatgcgcgaatgccctcttcagccttcctgataagcatgacgaagatgctggcggaagcatccctggtatcaggaaactcatgacctcactagttttgatcttttccatttagctttcttttcccactcctcccagttattgcaaccttaattgtagcattttacacaactgctgctgcagagttctggaagtctgggggtgggagggacgggggaaccccagtgcctatctcaagcctgcggtcaccgacgcgggtccggggtgggggggtactgccagggaactcgcggcaccgcgtgcttgctgagttcgcctgggctctcggcctccctgcgggcaggggtcctccctccccagcgccgggtctctcctcccgcaggcccgcggccacccgcagcggcattccccgccgccgcccccgccacctgcgcgaccgccctagccgctcgagtccgctcctcccgctcaggggcggctgcggagggcgcggggcgcacgcgggcggccacccgactcttccctcccttctccccaccccagcctgctcctgctcagccccacctccccacgcactcggctgccctcctcctctcctgagagttgccccgcaccttgggcgaggagttcggagcggccccatcgcagagcccacggccagccgagcgcgcgcgacgcaggtgcccgagccccggcgccgccgccatctctgccttcggtcgagttggacccccggatcaaggtgggacctgcttccctctccgacaccccctattgccacctcttcccgctctgggtaactcgagaatggggctttgggacgcgcgtggcagacgcggagccccgcgggccgcttagggactgggagtccggggcagcttagcgggaccaccagaggggccagcgcccggcgggcggcgggggtggggtgggtgcgacgccgggcgactctcggctcccgtggggcgaggaagatctggacacacggctgacagcagccggcagcgcctggagcgaacctgctcgggaccaccgagagagcatgccacccggccaacttcttttccaggcttcgtgcctactttggaaactgaagggactgccacctaaaacagtaaaccctggggtcctgaagagaatttgctggttcgaatgacaagagaaaaaataattgttctgtagggatggtttagacctcagcttttgtttcccacctccccccttccctgcaagcaaattaaacaacaacagtagcagcatcagcagcaaaaccccaaacccaatcctaaccaaaccacttactgaaagagatttgtagtggtgagaaaaagagacccaactgaggaatcatttgggaaccgcaggtatggtgccatttaaaaactggttctttctggtgttatttctagaacttgtgtttgcaaacagattagaattctgggctcttgtcagcctaatggagttctttatactgaagggtggcctggggtgtcctctgttaacatttatttctgtaagtattaaagtatattgaaacaaataccctttc

SEQ ID NO: 34075 - DNA, 400 bp, Homo sapiens
gttacagaaacttgaattcataattacaattattttccaccaacagaccactgatttcatcttttttttaattgctcaatctatttgaatgtttttctgaatgtggcaacagaaagatttttgcttggctaatcattagtcgagcttctgaatcttctgctagcccgatctgtgcacattcctgtaaaatccagttttagcaaagaactctgctaggtcattttagcaggaacacccccaccctggatatctgatgaatatttgatcagatttctcatcctccaccattccccaaatgatgtttgatcaccatggcctgtcttcagcaagaattctgttaggtcagtttagccagaatccctcttaccatgatgtttttgcttagtaattttctatctac

SEQ ID NO: 34076 - DNA, 925 bp, Homo sapiens
ttgcctcacttctcttcgtaggggtgagataactgaaatgtgctgaggaatttccatgtggcaagtgtcatgctggtcttttaaacacacatcctcatttaaatcctgatgatgcttaaaatctccactgagaaaataggggacttagtaacttttcaaataactcagaagtagtacgtaaaagaggcagactaggagtctaggcctgaaggcatgtaaatatcaaaaccagcttgtcaaacagtgtgcttctcatagaaagattacttcttaacttggagatgagaacttttcatgctgtacaaactcgcatggacagtgggtgaggacagacttctaggctctaaatctccaaggggtcaggaaacaaccatggggtggccaatcggagttgaacccattaagttacttgtgaagtgaagaaaacatatcaatcaaatttttaaaagtatagtgtttgcaatctcttgtctttccagagctcccgacaaccgtccttctgctttgccttgtgctctgctgccacctgctggtcatctcagagaaggcagaaggaaactttgggcacagggtcagtgctctgggatctttgccagtgcagccctgcagagtgactacggtgacatctgcaattgttttctaggagcttgtgttgacattcttggcttatctcaattctttcattatctgaaaagttttgagtaaaagacctgtgccctaaggtctgaagttccagccttcaaacaggatgtgggcagaggcctccccttgcttcggtaataaagtagatggatggctgatagggagggcccagcagtccctgacggggaaatagtaggcattttccaaatgagagctcttccctctccccctcccttcaccagaggcccctcaggagatgcttggctcctgaagtccctgaagt

SEQ ID NO: 34077 - DNA, 734 bp, Homo sapiens
ggaaattcaacccattttgaatttgtggatctatgctctcaagggtttatatatgactacattaataaatcagccaatagacttcaaataggttgacagcatgtgaaatccaagtgaaaaattttgtgcagtgaggagcaattcatgtggaagaaaagcaaaaataacatatttgatcaatatattatacttcagaaagcacttgcacatgagactgtgacctttgtcagtcaaagaccattttcaaattatttgtgttcccattgctataagcaaaagtaaattcctaataaatatttcctaagttaattcttaataaatattcgttatcatatttggcccacctaacagccccgtaaggtcaggaatactatcattttgcaaaggatgaaactgaggttcaatattgacttgcccaagataacactgttagctgatggcaggattgggaaagggaacctgaaccatgtcccgtgattcatcaacagtgcactgtctatgacaccagctaccttccacatgcccacactcacagtttcctcttaataaacacacaatttcaggggagaggaaaaacagtccatgcattttgagttgctttttctggttcaaatgcctggtgcagagtaaaagctattttctaaatctggtaaatcttcttgtctgcttggattcagtcagacttcagaatggaatgagcaaattatagatggcagtaatagggtgcttccagt

SEQ ID NO: 34078 - DNA, 375 bp, Homo sapiens
cttctgtgatgaaaaagacctataatctctccagggttttcgcctttgttgtggtctcacatatgtcattcaggaaatctgaccccgtgtgttaggtgttctctcatggtgcactgaatgagctaaacaacgcagaacgagtcagacaggaggttggatagctccaaatgcaatgcaaaccagagaaggggagagaattgtatttgattaatcagatcactgtgaactttggctaaaagaaactccagaacatgctgacatatcaccaggaacagaggagaaaatgcaacatgagaatgaaaacagaggatactgtttaaagggagatatttctgcaatttgggaaactcaaattatttcttttttggaggcata

SEQ ID NO: 34079 - DNA, 2293 bp, Homo sapiens
aggacctgtgatgagacagggtctatatgtgcatgggtaaagggctctctgagaaccacagcaatagcctgagagcagtgctgcatcagatgactggaaatgaggcccagcacaagcagaacctttgcttggtttctacattaagcaagaactgtcaggcaggattacaacacttacggacaaataggaataaaatcaatcttgtgaccaaaggctctgaccagtcatgataaaggaaagattagagggaattataagaaaaaagaaaaaggaaagaaaagagataaaaaagaatggaaaaagaaaaagtcagaaatatcaaactatgttttcttccttattctgaattctgtgtgctgaattaatggaataattgccttaattactcgccttcagcgtttagacagcctgcatataaaatgatagcaaaaatgcaccagaaaagccccagttattttgagaataattttccaaatggttgttttgtaataattgcttttgtctaaaatagccctcttatgaaagtttaccccagagcatcaacactgagctgtttatattgatttgcagttatttcatacatatctaaaattaagtattggtactcgcaaaaacattaatacctcagctaaagtgcaaacgttaaaatgtttcccttaagcagatattgtcaaatataacaccctgcttattatggttatttcactagttcaaaattaatttgcaaatttagcataaatatttcttctctttgaatgaaaccgaggaggcctcatctaagttctcactagctgcctgaacagttgagtccgttccgtgttgactccacttcacatttttgtactgctgagaaacaacatccacccaccctccccttgaaagttggaatcatgcatgttagtaagtatttcagttatgctattgacgtcaatggagtcattaaatagattgctggccctcccagaggcaaatcgctgccagggacctagatacagacacgttttttacaaagacaaccatcaggttttgctatagcagtaagccagagaaagggaaaagtttatactgtagcagacctatctccaaacacagtttctttctttcttttgcattttagttccggcctttctttctctttggttacagtaggctcaagcagatacccagatactgttgcctgaatgttttgtgtgcaaaagcatctcctgtaattgagaccatgaagggaggtaccccacttttaaaaatgagtctcacattttgctctacacagcctatcttgatgttgacttggttgcataaattatttaggcaaatcactattgtctgccagtaaggtcgtgtttgatatatagttccctgaataaacagtctcctccaaacacacacacacttttgtactttctgccatccctgcgtggcatgtcgctgcatcccctcatctatgaatcaacctttttgcagctagcactgtgctgtagcatcagggatctgcagcaaagggtggaggaggaagctgggaagaaagcttcacttctctcagctgcctcatctgcagcgctcccacaggaggctgtccacgtgcctgtgtcctcccaaaccctagctgctgcctgcctcgagcctggtcatgcagctcccaggcatggcaggcagagccctttaggaaacatgtgcctctttctgggcattcttgacagctctatttacctgcacagccccaggagtcagagccagagattcgcctcacacatctggactcttccacctccaggatcgaagttagggagacatcttgagcagacagatttcttcaaatctggttgtcagaaactatcccattggttttagaacccatttctctcttcagtcctgtaccttcactccctggagacccccaacccccattacttatcagtaagtttgtatataaatgccagacatctgactacctctggtaaccccttttggttcatctggagacccaaattcattcacctacacaactgtccctttttctgtctttctgactttgagtagcatcttcatcatccacccttttatctccctcttcacctaccacagccaactcctttagtctttttctctaatctttttccttttctcccccacttcctctgcctttgtttattgttccatcatcctgtacctaaagcattgtggtggtcctccaacttgttattattgtcctcattctttccccactctaaaccagcttccattctggtactagaattctttttttttttttttttttttttttggagggacg

SEQ ID NO: 34080 - DNA, 2794 bp, Homo sapiens
atcctaaggaagtttgaatgaatttaagatattttccaatgactttagtacgaatgtttgcaaagggccagagctccctggaagtaagttgaaaaacaaacccagctgtaatagcctggtgacccagcagcccagacctgccattataacccatttggggattgcatggtaattgggtccatggcatttggcttagtggttctgattgtgacacatgatgattcaagtttattcatggacacactaaagcatcacaaaatgaccttttttgaggtccttgaggtcaggcggggagggagggagaagcactggggcactctaaacaaagcagctttgtttttacaccgcttgcttggacaagtgtctcctcacgtgcagcagtcatttgctgtggagctcttggcagagtaactaaaatgtgacagaaatgaagggcaaattctgaaatcccctggaaaatcaccctcccaagcaaatatttgccgtggtattgtagctcgatgacttattttttgtcattcactttttttggctcattcctttcctttatggccatttaaaaggtgggtaaactgaatatttattgagcatctactatgtgcattgcatgtaccgtactgagtttatggaagatagagtctgagctgaaatcatttaccatctctagaattcatcctccgtgtctgcaaaatggggatttgggcttcatcagtgattcccaagttagtttatagtttattaaaccatattcagcaagtgattcccaagttagttacatagtttattaaagcatattcaacattgcatcttctatttaaaacacacacacaaaatcttcagaaaaatctttagaaaccaagaaaataaactttaacaaaatcttctcagccaatagacatacaaaaagcatagaatctcaacaaaagggccacctgaatctgcataaaggctaggtatgtgattttgttgttgttgttctcaaccatataaaactggttgagaactccagatcagataatctctaagatttatctcaggttcaaaaagctctgtggccggacatggtggctcatgcctgtaatcccagcactttgggaggccaagctgggcaagtcccctgaaatcaggagttcctgaccagcctggccaacatggtgaaacctcatctctactaaaaatacaaaaattagccaggtgtggtggcaggtgcctgtaatcccagctactcaggaggctgaggcaggagaatcacttgaacccaggaggcggtggttgcagtgagccaagattgcaccattgcactccaccctgggtgacacagcaatactccgtctcaattaaaattaaaaaaaaaaatctgtgattttatttgggcttctctcaacaaagttggtgtttttgtagctcagagaagatatatctagcattagagaaggataaatcattatggcttaagagataatcagtcatttctaatatcaacttctgattgtttattcatggacatatgtatgtgctgacccacaaaacacaattttctaattgattctactgatattggccatcaaatctaattaatttagacccaaagtgaatttttttggttttctaaagtcagtcttcactatcttcgtagcccaaattagccaaataatttaggtaagaagtatttattctaccatttctatcaggtttctctctgatgcctgtgctttgcaaacaggtcagtaaaagagataaaagaaataagcaataaatcttaagtttttttcttgtctatctgtattttatctgtatttttttgttatattagctattttttttattaattcagtatgttccagcaaaagaggagaaaaaaacacacagtaaagggaaaatcaaagaggagagacacggttaagagactgactacattaaaagagaaaggggaggaatgaaatccaaaaagaattttcagggaaaatctctcagtaaaagaaaaaaagagaaagatattgcataggatgtgtttcatgactcatgcctggctctgtacctgagtgattcatttggtggaaaacatagctggctcagagaacctttcacaggccccagactttgttgaaatcatttgaagcttcattttgtgtgtatattttcctcacttctttaaaactgaaatattaattgcttatgagaaataggccctgatcattggagtttatgtgtatggccacttgagatttagaagtagatcagggacttcgaagtaggggaagtgtttaagaacctgggacaggtttgttcctagtggcttttctttatctcccagcaggaataaatagtaggtccaagggaatcctgttggatagagttcaaaggggacaggcccttggtaggggcagactagattagtggctttcaaacttttttgatcatgactcacaataaaacatatattttacattaagactcagccccacatgtctgtgtgttttgtgaaataatacttacctttactatatatgctttacttgatattttctattctattatattttattccattctattctttttgttttgttttgttttttgttttctgacggagtctcactctgtcatgagtgcagtagtgcaatctcggctcacttcaacatccactgcccaggttcaaacaattctcctggctcagcctctcatgtagctacaactacaggtgcataccaccatgcctggctaatttttgtattttcagtagagacagggtttcaccatgttggccaggctggtcttgaactcttgacctgaa

SEQ ID NO: 34081 - DNA, 1991 bp, Homo sapiens
aaaatgcatattggaaaaattggcactattgcacaaacacagacatctaggggaatgtctttctctctggtgttcgtgtttttaccttcttcagccatgtgaaaagactttcaaaggttctattttattctcagagttgacagactcacccttcaacagagtgggcatcaaaagccaatagctgccttgagtaaattaatttttgttgattttagttcccctttaagacttcctgagatactgatcatggaaatgaatattagcgatttaattctggcacctcgtcaggactcacactgcattcctgggtgcagcctggaacatcactgctggctggactcacttctccttgcccaccaagggacctgaaaaccacattaaggtggagaggagagtgtggcacctccttgctcagagatcggccagttcactgtactttattgactgtggactgttgatttatccagccttctcatttcacatgtgagggagggcgatttggagtgacttctgtgcacttacatagctgataatagaggatggaccagaatccacatctccaactaccagtccagaattctttccattccccagtcactcacttattcatacattcatctaacatttattggatgcctacagtgtgtgtatagctgtgactacaaagatgaattggacgcagaccctgaactcaagatctttaccctggcttgtgtttttgatttcccagagggtctgaggtccattaggaaggtgactatctgccagggcagtctctccatgccggctggattaggcaatcactgctggccgtatgcagtcccgttttcagtgtccaagtctattcttcatagatggcctattctctgtttttctgactttcttactggggtttctcacccaaacatagcattactgataaataatatttaagtggctgagctctgaagattaagctattaatatcacaaacaggctccatattctctctagtaaagagcgaaaaagagtcagtatgtatgtgtgtgtgtgtttacacatatgagcatgcggtgtggctctctgagacacttagaagaaaagttcctgcgtgctcatgaaaggcccatagtacagctatgagtatattccaggcctcacatggctgcagtattcaccagattaccaatattagagaagcagatttttttctatgggtaatttttaataatttaagggctctcatttctcattatttcagaaatccaacttggagcttctcatttgatcagcaagtattttccaagggcctcctgtattctcagccctgtaagaggtttgggccttggaggctgagtcagagatcatgatattcaaaccgttttcactttcattttgttgttgtcattttctctccatttgatcctgaggtaaaaaaggactagtaatattatctctatgtcacagaggaggaaccagaggcacagagaggcttaatgacttgccaggaccctcaaggctataagcaggaaagcaggggcgagaccaccaggcttcttaccgctaggacaatgcttttttttttttctaactatgccagattgccagtccatattttttttaattcaggaaggattagagaaaaaatattgcaagcatataaatgtaatctcatgatagaatagtaacaattacataaaaatactaaagttcattttaaatactacctaaactaggtcatgaattcatcctatagctttttctcccagcaggcataattgagttgctttcccaaatgccaggttattctacccatgcgagttataaagacctttttcttgaagggattactgctgaacttctcctaagtcatgactttgtgatgggagagatataagtaacatgttcgttgggcttttataactctagagaaagctcttcctaaatcttggagcttactgctcagccaacttattgactttgtttaggaggtggccattagcctctcaaac

SEQ ID NO: 34082 - DNA, 1273 bp, Homo sapiens
tcagaaattctgagaaaaatggacagcagaaaagggttagatagataggaagaaatatgtaataatttggggagctgttcaagccctaatctcatttaggagattagttatagagcagctatattcaaatttgtttgatcttttgatatttttcaattctgtatgaaggcattaatggtttttccctgctttgccttttaatatgtcacttgagcagagacttgtcctctaactagcaagtagaattgattctattgttgcttcatcataatttttgatgcagaataatggtagatatattcatgcttgtttttcgttgtatacttacctattgattactacgttgctgagcagttaagacaagaagcactcaattctaacatgtttagaagagtttctttctgatttggcacatggacagtgagaatgatctcactgtgtttgttccctggcacaccaaaggtttgctgcagatgttagtacagcagaacttgtttgctaagatgacccattatggaacactagctgattaagcagacgttaatggacaattgcatgtccattattacttctttgaccatgttaccaactcaattcaattgcacttgcttttcaaataagacaaacctgtcaataaagaaactggacatcaagtttcaaatgattggtagagtttatagggaaacacaaaaaggagggaagagatgagatgcacattgtcaaataatctgaaatgttaagaattgtggaaattgttagtttcataaggagttttagacaagcacactatatccctcattctgtttatttctttttcatttaaaacttagatttgctttacttctttgggtcttcatttcttcccatgcaaaattcctgaaagtcaaaaggaagattagaagctagccattttaccactaaagaaactgagccccaagaagttaattcagcttacccaagattacatatttgcttagggccagagctaagacagggacagactctgtttacttcatttctcactaaactgtaccactgcagtttcgacttctttctaccactgaaggcacagaatgcactgaaggcattctgtgccttcaggaggaattttcagccccttcactttcctgatgcccgggaattctttttaagttatgactaacaaagtataaaacatgagtcaaaagttagtccctaataaagtcattgtgactttaatgacttcggcagttgtttcattctgcaaaaacaggaagatcccacacaataaggc

SEQ ID NO: 34083 - DNA, 613 bp, Homo sapiens
atgactttgtaagctagcactgtttgagaacataagcatattttcaacaggggccttctagagaattgtcccataagccaacaggaagataaagatagtagaattattttaaaggggatagacctcatgttgcctatgcagaaagagtctgctttatctgaagctaggccagactcactctgtgtcatgtcccattgcttcttctatcccaagcctctatggatcagttgtgagatccacagacactcatatcctgtagcagctttcattccataccaaactatgtctcctgtacaaccagaagcagaggcatagatcagatgacctctggacttccctgccaattcttggaatgaagtatcaaagggattccaggcaaagtgattacaacccttggtcatttcttcaacaacaaacatttactaaactcctacattaaaccaggcattatgccagaatctgagcactcaaagctgaataagatgcaacatagccctgaactgggtgctaacctcctcccatgaaactcaaagtaccataaattcctatttgaaaagaaaaccaaaaattcttcccaggcattttctcatttgatcataagccactctgtaat

SEQ ID NO: 34084 - DNA, 425 bp, Homo sapiens
ttcaactgcttcattttacagatgagtaaactgaaacttgagaagtttaagtcatccacccaaggtcatccaacaagatagcaaccgaggtgaaactagaacagagctctcctgatggtctattagcactcctttctttatatcatgccgtcacctttgcaagggatgctatggtgctatcaaatgacaaattcatcaaatatttactgaatgccgattgtgtgtcaggcactgtgatgtaatagtaagcaaaagagtgtaatggtaagcaaacaaaatagagtctttgtactcttgagacttacagtttagtaggagttagagacatttatcaaataatcacactaatatataactgcacaccataaaagcactataaaaactacacagtgctgttatgagaatgtatagctaatctgctctga

SEQ ID NO: 34085 - DNA, 1738 bp, Homo sapiens
atgcggtgtctgtctcaaaatattttgttatacagtatgcacctctcttctgatgatgtgagatgttacagtgcctacatgatgagatgaagtggagtgaatgacgtatgcattgtgacacagcgttaggctgccattgaccttgaacacaggcactgcgatatgcaacaatatgatgactgagacgactactaagtgactaagagcaggtagtgtagacagcgtggatacactggacaaaggactgattcgtgtcccagacaggatggagtaggatggcacgagatttcattacactactcaaaatggtgtgcaatttaaaacttatgaattggttatttctataatttttcatttaatattttcagatcactgttgactgtgggtaactgaacccacagaaaatgaaaccttggataaggagggacttttgtgttactatccttattttaaacagaaggaaactagggcccactaaggttaagtgacactcaaggtgacctccttactagtggcagaaccagcacttatcagccaggcttgactcctagttaagtgctgtttatttgtataacggcgtaactggaaaatcttgctcatatccaaagtgtttggcctaggtctctgactggcaagtaaacagcagattgtttaaatctgactggatgtttcaaaagccttcttcagaactaagcaagttaattttattatcaggtcatgatctttcagaacagtcatcaacttgaagaaggccacctcacacagaaggattttatcccagtgggctcttttcagtagctcagtagaaaatttccacaattttctgaggaagagcgtcatgatgtgatgtcactagtccagtggactctaaactttcacagcttaccttctaccacacgttttatcaaaaagcctggttcccaccacgaacaaaagcccttttttttccctgaggaggacagctcggtgttcactgatattttatgaaagctgtggctgttatcatgaaaacatgataatgtgtgccatcatttgaagattaaccaaatgggttcaacctcattttagagttgcagaaaccaaggccaaatgaaaagacttacctaaggatttttattctctctgtaagaggacaagtcaaagtttattttagtaatgattccaaaactgtgaatagacaaagacttggagcccatggtgtttttcacgttcaaaggtgctgaggctggctgggtgactgccaagagacacaaatgaatgtgtccccagggtcattgttctactgagtacacatacaatgtgaccatttatagctctctcccctgattttctcagtgagtcagtacagtgtggggggaagggccaggacttgaagagggactataccgcctctgtgactgggtgaccttgagtgagttctggaacggttggcctcagcttccccatttgtaaggggagaataatgctggctacctacctcgtagagtcattatgaagagcaaatgaaataataaatatacatctgagagagtgtggtgcagatgccagtttttttctcagacagttttttctcaacctatatacccatggtaaagtttaatttataaattaggcacagtaagagattggcaataataactaataataaaatagaacagtttccattgttctattgggtgttacttgtggatttcttagcctttggaggctagacattactgcttgctcttttgctttt

SEQ ID NO: 34086 - DNA, 1722 bp, Homo sapiens
ctcaggtgatccaccccactcggcctcccaaagtgccgggattacaggtgtgagccaccgcgcccagcccagtagagattcttttaaagactgcggtaggtcgataaaggagacattgtggcctaggagcttcaaggtctacagactgaacccagttagggtagggcccctttccaaatccagaaatggtatctattaatagaagggctccctccgggtcccagggggatggactacggtttttagcgccggaacttacaacccgaagttctgctgcttgtgactgcctgccggagagactggcatggtggcgaccagctggggagtggtgcaccacccctttttttggccgcctctgaagtccctgtacccccaagctcctccgttagcggctcgggccgaggctccggaatgtttgccgggcgtcatggcgacggtggagccctggctcaacaagcggccgcgcggttggctggcggcacgaggccgaggaggagggcggaggcggaggggagggcagagggttggtggagctggaggaagctccggacgacgactggaagaaggaggcgggcggcccgggcctcaggcccctcccaggctctgagtctcccggctgcaggcggatggatggggcttcttcaggcggtggcggcagcagcgaaggtggcggcggcagcagcggcagcggctgtaagtgcagcctccacaagccatctctccccttctattccagtttgggatgaggggctcctgaggtgtcctcagtcccctttctctccttcccctcccccacggcagtgtaccgcccggaagacccttaacttccggggaggggctgccgcagaacgcgcctggcttgctctccgccggctgccaaaggcgcatgcgcagcttcctccctctggccatcgactgcctcccagcgccgcctttttgccttcgcggtggtggcgccgcgctgggaatccgctgcggagtgagttcgcctcgccccgttcgcttcggtccctgatcccagtcggggtggggctaagctgaccaccctgctgtggctccgcctctttctcctgtatttccctcacttgtgtcccatccccgggaggctctcgcttgcactgcagcctttatggtgagcagcgccctgggccaacttgcccttttcggatggagtcagggagggaggagagactcgaatagggtattactgtaaggaaacgaggtcctcctagcgcgtgggaggatcccttgggacagatgcccgccgctctttactcttgttctttcagcttgtagtggctaggtccctggcctggagcctatctgtggtccctgcatgctgtgtaaccttgagcgagtcactatccctctctgggcttcagttttccctatttaaagcttcctccaacgctagaattctgcatttctgcagaagaacttatgtaattacaagattgacttggctattgaggccgcttcaccaagatgacccggagttgactgaaccttcttcacttatgggtggaatgaggcgacctatttattgggtcgcttttattcctttatcattagttacaaattgcatgacttaaggctcattaaatgtttttctaaaattgtcatgggatccttgtcctgattcccgaccatctttttaaaaatgcgaaacagggtggatggtgagcttgtatcatcgtttctgtctccttgctactgaggctc

SEQ ID NO: 34087 - DNA, 2226 bp, Homo sapiens
gtacataactgtgttgctaccggcatgacagaagtgtgtgagaaaacgcaaatgacatgaggatggcggactgcctatcataaccccttccattaatttttgctctgacctctctagagatttggggatatagaattttacatttcctgtcgggaatctactgatggagaaatatttgtcaaggcataaccgctttcaaagcacagttcttgccgccgttgcatcacagcaacatccgtttttcagcaaatgcatttcaaaaacgacctacatgtaaaatattacgtatttttcctctgctgtgtcaatgctggatgtgactcctttggcactgttccttgacctctctgatccgtagacaaccccctccgcctggagtggcggatcagctggagccagcgaagcgccccgcgcggttgcccacctcctcccacacccaccttgactccgccccctccgctcttcccggggagggctggccgcggggccgcgcgcgcgcccctgctccggcgcgtgctcgctggtcttttccctccagtccagcccagccggggcgccgcgagggggcggagtggggtgtggtgggcgcgctcgggcggctcctgcgcgttcccgccgaggcagtggcggcgggagcggcagagacggcagcggccggagtcccgttgctgagtctcacatccgggttctggccgtgacccagctgcggccgccgcggagatgtgacccggcagtacggcaaatatggcggaggtaagggagcgagctccccctccctgtcccggagccgggcgcccccggccctgggccggggaggagtggagtgggcctggccaggagaggcccggccctgctggcgccgctgcccacctgttgtccggaacaggccattctctgggcgggagcttcgcctggaacttagttgggatgggtccgggggtaggaggaagcggaggcgtacttggacttcgggggcagtttgaagggtagtgcagcgtagtagtgcggtgcgagggggagggggcgcccgccggggaaggggtgcctgtggcgcaacttcgccggccggtgctaggggccaggagagaagctgctgcttcctcttgcgaagttttttcccttcctaaccgagatgctgttgcgcccttccgcgtcacccccatccatttgcgactgacatccagtctgtgttagtggggaaaacgtaaggctgacggcctttgattaactctgtaattttcatgatcgtggtaaaatgagagtggataaattaatctggccagccgcaatccagccctccaggttggggggagtctgcccatttatccagacagttccatctcccgctccccaaggtacaacctctgagctgcttttccacctccccccaccaccttcactttccaggcttccccccaccccctttccaaatcaaggctacctattcttgtcttctttctcttctaatttttctttcattggagaagctttttcttgtttctttttgctcgttttatagtaaacaagttcctaaagcccctttttttgattttacatatttgggccgcagttggcgggcatacaactgctgttgatttattaatcggaactaagtatacgctactggaactttaaataactggaagtttaaaaaatgtttaaaatatctgaagttttgtgggatttgttttgtttccgtttttccttacccgtggaagaatttcagtattctttattcctgagagttcgagatgatgtatttggattttttttatgactcctttgaaataagccactgtaaattttgattgataaggcatttctcttgtttgaattgccattttcatggtttcacaggcaccccaaaacagatttaggaaggagggtgagattttgctgtagcagacaggactgtttgctgcgagtattctttttaaaacattcaatatctctaatttacaactaaatttagatcttagatttattttcatttcttttgctcttggtggttaaagaattgtatttccaggcacatgaattggagaacgtagtactttctgtttccccaaaatgtgactgcgtttgttccagtagactgagaatcggtacctggattttagtcctggtgaggttcttattcttaagtgtttgtttccttcatgtttaaggagttgtgtgtagctggatttatacattttgtcagttagtgtcttcagtggacccctt

SEQ ID NO: 34088 - DNA, 2836 bp, Homo sapiens
atgtttttagttattttctatttaatatcagttcctttcctttccttactatcttttcctttcctttcgtttagttttgtttcctttcgtttcctttcctcctttcctcttttcttcctttcttttttgagatgaggtctcactgtgttgcccaggcttgtcctgaacccctgagctcaagcagtcctcctgccttggcctcctaaagtgctgggattacagacatgagccactgcgcctggcctaataccaatattttctggtgcttctgaaagggcacaatgatgttaagtgctttgccatgtgacctggcttgcattcactcgtcttagtacatagactctccttaagtattctttgaggcagtatactaaaataatttacaggaggcttggagtccagtaaaagcataggtgttaggattagtatacccaggattcaaattccgtctttgccatctactggctttgtaagtttagacttgctacttgaaatctctaagccttgagtttttattttttttttttcctctttaaatgggatgataatacctacttcgtaggattatttgaagattaattgagataatgtatatgacatgcttgaacatagtatctggcatatggtaagcactcaaaaaaatgattcttttgaaaattattgtgagtaactgaagaaccctaagctttgggcattcccttattcataatagtcggattttcaagaagtcagctctatctctttgctttacttattgtttatctttctggagtgaaatgaaagaataggtacatctattaatgtctaaccatcaacagttaaaactttaaaaattgttaattttttcaatgttcagtaactcatttgtttatcagtaaacaatgcttttgcaaatctaggtccacattggcagtagtaaaacttggggatattttacatagtctgtaaaatatccccaagttttactactgccaatgtagtacaatattttacagacaatattttacagactatgtatgcccagcctttgcattctactattacaaagcttgaccctatagggtccagcaatattccccaaccacatgtcagttagacatgtttattagactagattatttttaatgcctttgataggagttctctatgcagttttaataaattttgctcttctactcagtctttggcgttatttctgatcaaaatccactaagttaaggacagctactcaaatattagatttttttttatttattttttattttttaaagtcagggccttgctctgtctcccaggctggaatgcagtagtgtgatcatgactcactgtggccttgacctccctggctcaggcacttctcctgccttagcctcctgagtagctgggatgacaggcacacagcaccacacccagctaatttttaaattttttgtagagacggtgtctcattatgttgcccaggctggtctcaaactcttaggctcaggtgatcctcccttcttggcctcgtgaagtgctggtattaaagcatgagcaactacatccagccactagaatgtattttcaaggaagtacttatagaataataatatttgagtgcagctgtgtcttcactagactgtgtattcagatgactgtatatttcacatgactatacagtcatccttcgatacctgtaaacctccctcggataccaaaatcgtggatgctcaaatccctgacacaaaatgcatagtatttgcgtgtaacctatgcacatttctcttatatgctttaaataatctggtgtgtgtatatatatatatatatatatatatatatatatatatatatatatatataaaatacctaatataggtaaatgctatgtaaatagttatactgtgttgtttggggaataatgacaaggaaaaacgcctgtacgtgttgaagacagaggtttttttgtttttgtttttttctctgaatgttttcaatctgctgttggttgaatccacatacacagaagccatggacatggagggctgactcacagtctcctcatgggccagaggagttcatactcattggttctatcaaacattaatcaaatggttaagaattgtgatttttagggccaggtacacctgtaatcccaggactttgggacgccaaggcaggatgattgcttgagcctgggagttcaagaccagccagggcaacatagcaagaccctgcctttaccaaaaaaatattaaaaaattagctgtgtgttgtggtcatagtcccagctactttggaggctgaggtagaaggatcgcttggccctaggaggtcgaggctgcagtgagctgcaccccagcctgggacagagcgagaccctgtctcaaagaagaagaagaaaaaaaagaattgagacttttttccacacgaaaagcctgttcttatttgatatgaccatttattatttacaattttttcatatttataacattataaacacttttaaagctataaacattttccttccatttttctgttgtaactattaaaaagcaatacataatagttgctgtgcgtagctttttcttggtacttttgacttacatccagcatcaaataaaaatatatacattaatattaataagatccacttaatttggtttaccaaactttttgaaatattccttaccaggaggttcagcaacatcagatgaccatgaatttgatccatcagctgacatgctggttcatgattttgatgatgaacgaacattagaagaggaagaaatgatggaaggagaaacaaacttcagctctgaaatagaagatcttgcaagggtaaataacatgtaga

SEQ ID NO: 34089 - DNA, 2204 bp, Homo sapiens
ttttgaggctgcaatttttaaatacgcaaggcactgataaaatatgttaatacatactgacttcatttcacaaaataaagtatcgcttttcttcttttacctttcgaggtacatttctgtcaaggtcaggaaacttgactactctgagcgcctttcccacccagagaactgccactgtggccaccatctgtaaacaagagaacacagattcactgttctacacataaagacacacacagaagttctaacaacataaaccacgtaatggtgaggattccaactaacctggccaagtccaacacatagtgaggagggaaatctacaaaaagggcaaagaaaaaaacaagatcagaacaaacctaacttagctccgtgaattcaatttgcacatcggcaacgttaataaggcattccgatacaagccacatcaacgtccgcccctaaatcaaacaaaaatcttgggagaaaactctctgcctgttggttgtcagtccaccccgctgatgtagcctcgggcggccgcttgtcccatcttgtccgagtctacagtttcagtccgctgcctgcaaaggatttctcaaggcagtgcagatacagatctctgcaacgatttcacacaccttaaaaaaaaaaacaaccaacttctgcctctgggtcccagtgttagcaagggaataattgtctgctgggttgaggatgcgtacgtccccagaggctgtcagcgggtgcaggggacactgaagccccggccccctgtccaggctgcggaggagggaggcttccctcgctctcctccctgatcgacaggcataacggctcaaaagtcaccaagcaaatcactttgctccatctctctgaagggcagggttttcggggcggtgcgcccagggcatggcaggcgagccccaaatgtgccgggccggccggagctccgcgcagggagcggacccctgccacaggcccgctcgccaggccggctccgctgcccgggccgcgcgcgtcagccgcccgccctccccagctcccgcccaactttgttcggctttaactttggcagtcaaagtccagggagccggcgccgcgccgccgccgccgcccgctcctcctccgcggcctgggccgccgccgcctcggccctacctgtaattggtgagcacgctcttattcaccaccacgatcaggaaggagctcacgccgtaaaagccggcggccagcagcttcagaaacacggtcagcgtttcggccgacgccatccccagctcctcctcatctcggagtgtggaggatttcgcgggggcttctcctttaacccgagcatgctgacgtctatgaacttccgccatggctgccgcagcagcggtggcctggcggcggggcctagcggctcgggggcctgcagcggcagctcccaggggactccaggagttggggaccgcagactaggccagctgcgcgctcgccgcctcgactccccgcttggccgccgcctgtccccgcccaggggcagggacgccggggttcacacccctggagactttgctcgggcattgtgcaacgcggggtcagagagtagggccgcgccgggcttagcctgggcaggggttggagagagcctggagaaggggcagtggcgacccccctgcccgaggcggataaggagaagccaggggaactacatcgagacaccagagcgccgggcgacaaaccacagactccgggtgacagtcgccctgcgcctgcgcacgagcacgcgctgggtctctccgcggggcgcgtacctggggcgtggggagtctggtggcagaggggctggaaggccgtattctccggataactgccgcaactaagtgcagaccctcctcccctctgttacaggtggccggccaagtagttacagtacactgcgtctagactaattctgaatgctcttttagtctctcttgcagggggtaaaaacccttcaaaagtatcagatgtggatcaacagtaaacactcaacgaaaatttcattccgcaatgcctcaggcttcttacattttctgaacccagaaaacaccaaacaatacttttcagattgagaagtttcgtttgtttgttttaagaaaaatgttgacatatcccaaaaagtagcaagataagcagcttggggattggggaaagcacaaggtgtttggagcctaaaagacttgatttccaattgtagg

SEQ ID NO: 34090 - DNA, 479 bp, Homo sapiens
gtaatcacaggtgcccggtattcctacatcttttggcttttcaaaggaagacagaaacataaaattttaatgtgtactctctaaattttaaaatgttgccaatacattcaaaaaacaatttttcacctctaccctgaacgaacactgcatatgtgagggccagccccgttagatttaaaatgttgctcttttaatcttcttgtttatttttctaaactaatataatataattaaccttgaagcagatcccattgagaaattttgaggccaaggtttagggagagttgcaaaactagttttgtgctcccactgtactgctaggtttgtgaccttggacaagttgcttaagcctcaattcctcgcctgtaaaaggaggctaattatacaggctgtgttatgcacttaatttcaataatttatttggaagcatatgataaagtttaaagtacatcagtacccaaatccttaaaaatgcatcc

SEQ ID NO: 34091 - DNA, 911 bp, Homo sapiens
gaaaaaaaaagaaagagagagagaagaaaaagaaaaagaaagaaggaaggaaggaaaggaacgagggaaggaaggaaggaaggaaggaagcaaagaaggaaggaaagaaggaaggaagggggagggagggaggaagggagggaaggaaggaagggaaggaaggaaaagtaaagaaagagaaaggaaaagaaggggaaaataattgtacacatgacattttacgtaatgtttgaacaagctgatgttgttagttctccatgaactgagaaatgaaatgaacttaaatctgtgactccaaagtctttaaaagtaaacagattcttcctaaaactttttcgttgggataagctgtttggctttttttgttgtttaaatctttatccctcctctttttttattttgtttctcctctttctgtccgataaagggttgctggctcctcgccaggtctctgcaaactcagagggcatggacaacattctggtgacttggcagcctcccaggaaagatccctctgctgttcaggagtacgtggtggaatggagagagctccatccagggggtgacacacaggtccctctaaactggctacggagtcgaccctacaatgtgtctgctctgatttcaggtacctaattgttcaccttccttctagagggttactaagttcacatttgtttggggaaactgcaggcaagagccagaaccctgccttcaattacaggtggctacatgatgagagagactgatgacctagagtccacccagcagcactttagactactccactgcagacataaatgaccaactggttgactaaaagctctcttatttatggaaaatccatatccctagcacaatgccaaagaagatgaatgaataattgaaccaaacaagtatggctgagagct

SEQ ID NO: 34092 - DNA, 3297 bp, Homo sapiens
taaaacaaatcctaccacgagaaaattgttttgatttttaaaattagttcactgttacagaattcaactaaagctaaagagaaacaactcctttcagagaagcacgtggcaggaaggggtaatttcaactttcaacatataaatgcagctttaaagattcagaccttaggtccaacacctgcttgctattgatcatgcacgttcttatctccaaactgcttgctcttttttttcatccgcaacaaactggtaaagcgaatgcaaaaatcaagacaatcctgtgaaactcacagtgccctagaaacaactattaaccgccagtgaaactctgaccatgcttcacgcacatgtggtggaaaaaaaaaactgcgaactctaaagagctctgctgcgactaacgctgtgacagcctctgcactcacttcacccacgaggcccagaccccaccacgtgaaagattcagtttggggagtcgagagagaggatcgtgactcgaggacgttcctcgggatgtcctgcaatcaccagtcttcattcataattcccgctcctggttaatcgagtgtggccaaactcctccatttcccaacggctcaactcaccccagcaagttatgagaaagtcctaacagttgagaggtggaagagaaacaaataaaggacatgcggcaccccaacctgcagcttactccacacgtctgatggcctggaacgaccccctgcttttcagcggggatactccgcgccgtcgtgggacaagacggcaggacaggagcctgaaacaacagcacctcaaaggagcagctctgcgcagtaagcagcgatggacccccaagctcctccgtaactacggaaagcttcggtgaggggccggcttccccgcacctcagtccatgcgctcacccgccaaggaatccggcgggaaggcaacagcctcccaggacctcgagcgcgctcgaggagcagctcatctccgaccacgctcctctgctcacaacctgaggcgggaaggggatggctccgagaacctcgccggcggtggcttgaacttggggctaccacgctcctggcaccttcgcaggaccggacttttgtcgcgtgaagaaacgtgaggatataggcggcaaagtctcccgcggaccctcggagctccagaaacaagtggcagccggcagccccctcgctccttccctccatcccagtctcccccacattctgcccctgctttaccttctttcttaagcgccacgggcggctgcgtctcctctttcttgtcaaccacgccaacgctggggggcagcgggttcttgcggtctttctgggactccttgcgcagctgtttgcctgccgcgttggagttggtctgggccgcggcctgagctgcgctcttggccccagggcccccaacgccgcccccgccggcttcttttttcttgttctctgctgccttcagcacctcgaaggggtccgattcgtcgtcaaataactggtcgaatcggttggtgaccacgcagccgaagccttcctgtaagtgcccaggcatgatggtggctcggcggcgcgttcctccacggattgcagcgggccgcgccgagccaagagcgcctgcttcagctcttcccacaagatggccgggccgagagaggggggccgtcttctcttccggcgccaggcacacatccgggagcggcctgcgccgcaaggcactgtggggtatgtaggccagagtcatttctcctgaggcgactctccgcgtcgggactacaattcccaggacgcaccgcgcgacaactcttcgcgcgcgcctgagaggcgagaccccatgaggggagtgaagcgtgcgggctgaaggaagggaagcgtggtggtgggcggagtcctgccacctgctctggccacccttaaactctctaggtcttcagctaccttgaaaccaaaaaaccgtgacggcgtaactgactcgcgaaagtgctctttggtttcactcacgccccctcgggctcagggctaactttccccaccgctccaggggggtcaaggtgactcccagaccttacatctgagacgcacaaacttccgggggagggggtgttgctgaggcgccgcgccggccgcgggtaggctggaccctgcctgtgccaagtccgagctgctcagttgctggagtggccctccgtcagcctccacggtgaatcgaggctcttctgtctaatgtgagggggaatacgtttcctctcgcggggacatgaactagggtagcagaactaaccaaaaagacaagtgaaactatcacatgggagcgtggcgcgtctttcccgggcttctcaccgtgtggcggcgggtgtcgtaggagtggttaactcctgacggtgcagcgctagacgcggggcaagcctccaggaagcactgtttatagaaaccctgttacaattattccaattaatcgtccgttcgtgtccggcaagtcagggcttaggtggctgtgttgttagtcacatgcgctcaatacatatcatttgagaacatttcgagtgcatgtgtgctaggagttgcggtgaggggagggaaatattgaagtcaacacttaataatgacaaagcattgatactagttgagaatattaaaattcattaaaagaatacaatttgaatgcgtatttaagcacatttggtagcaccgggtttaagtatatcataatttttaagtccttttccattaacacaaagtagcaaatgcatcgcttatttggtaggagctatgaataaccttgaactcaacattttgttaggcaaatagtttgcctcttttcacaaatgttgaaaccacttcagagatgaaatgatttaccaaattcacacctctgtaagtgctagtgacaggcattagcccagtattctatctccactaggagactggacatcagctctttaattcagactgccctgatagaaagcagtccaatttttaaatttccgatataatttaaacattgttgcgtgtcaggatatgtaacatggcggaatgtaatcatcaatttccgagcagattttaaatcaattccttagcagggaaaatagaagacacgagtcatattacatacatggggcagcaagcctcctggttttcttgtttctcaatcctcccctattcctcacttatttccctgctgcctcagtcctgcaccctgcccacaacgcccaacctcaaacacaccccctatctcatccccccttccacaggctctggttctgtggcacctaccaagacaaggagcttttgaccatactcttcccacctt

SEQ ID NO: 34093 - DNA, 366 bp, Homo sapiens
agaaactaattaggtacacagttataaaggatgtaattactctccctaataagagactgacactttttttccctctctccataatgcgggaaataaagctgcacctgccatttccctgggggtgtctgggtgccctggtgactgttccgttcacacctatttcctgccactgaccgtcctttcttctgccactggagccatgaccttgctctgtttcgcaagataggactcttttttttttttctttgagacagagtctcactctgtcgccaaggctggagtgcagtggcataatctcggctcactgcaatcgcaatctccatctcccaggtgcaagcgattctcttgcctcagcctcctaagtag

SEQ ID NO: 34094 - DNA, 1395 bp, Homo sapiens
ctgacctcaggtgatccacccacctctgcctcccaaaatgctaggattacaggcatacgccaccgcacctggcccaaattattaattgtacgtattctcattgttctgcttcttccaagaaaactgaagtcacggtattctgaagactagagatgattcaacaggctgtgaatctattccatttggaatcctactgggcctgatctgttttccattgccaaggcactgctgtttaagctataccatatgaagcaccctccctaaaggctcaggggccatagtgaaagaggacacatgggattgtaagagccagattatgggggtggagggtaaaggctgaagcaagtccatcttggatgctaactcactatgttagcttctgattaaccccagttccaggaaggctgctgaaatttccagtttatgtgttgttccttgtgtaagagcatggacttactgcaaatcctgcccttagggcaaattcctacctattcctgcggaagcatgtgtatcattcccctatggtttataacccctgagtctgggggtaatggcacggggacccaccagcttgtctgccgccatctggggtaggtttgcataaacacacctgcccactgcgaaacagttcctcttccttgctctcctcccaccttttactctgaccccttttctttctttctctccttccttccttctttccttccttccttccttccttttttctttcttttttgtttttgagatggagtctcactcttgcccaggctgcagtgcagaggcacgatctcggctcactgcaacctccagcccctgggctctagcaatccttccacctcagcctcccaaatagctaggaccactgatgccagcaaccatgaccagctacatttttgtatttttggtagagacggggtttcgccatgttgctcaggctgatcttgaactcccgagctcaagtgatccgcccgtctcagcttcccaaagtgctgagattacaggcatgagccaccatgcccagccacctgagagacatcctcttttctatggccttgttgttcctatcttgctcagtttggattttatgcccaggcttttctcctcagggtggagctttgtcctagaaagatggtttggtttggtttgtttgagagttcacagggcccagacctctaggccactccagcgtggccagaggtttccctagtctccatgtgaccacatttcttctcaatgccagctttgctgctgttctccagtggcccactgaactttccagtgagttcctttggtgatttggggtcattcagttcttatggatatcacgagtccctttaccttccgtcttcttgatgccgtgtagaccatgcaattataagtagcttgtttccactc

SEQ ID NO: 34095 - DNA, 1860 bp, Homo sapiens
agactggagttattcagccaagtcaaggaatgcctggagcaccagaagccggaagaggcaaggaaggatcctcccttagagcatttggaagagtgtggccctgccaacaccttgacttcaaacttctggcctccataactatgaaataaattcttgttgttttaagccaccaagtttgtggtaacttcttacagcaaccctaggaaattaacacacagagtgtcagttacctaaacattgtgagcctcagttaccttatctgaaaatggggctaaaacttagacctaccttttagggctgctttaaggagtaatagaaattatacatgggaattacatggcaccaagttgttccttaatagagggaaactgttatgatggcggaagagcagtaatgaaatactgaattcatccagcagatggcagaagatggatttgcaaacaagaggacttcataaggtttgctgcccagcaatgcagctccaggcctaaagtagccttcctagctcacagactgatgaggattaaccctcgccaactcaagtgtgctctcagctctgtagaaactaaactaattctgttttcctttgaccattgtacaccacagaggctggcaatggagaatataaagagtggtgcaacagaaaatacctgggttctaggctcagctctgtcacctcattaggattcagtttgcccatctgtaaagtagtgacaagatgaaataccaagtgtaacgtaattaaagggctgttgtgataccaaaataacataatgtgtaaaagtgctaaaaacaagatgccataaagcacagaaggggcccaggagagattaattcatggagaacttactcgtttttttgagacagagtctcactgtgttgctcaggctgcagtgcagtggcgcgatctcagctaactgcaatgtctgcctcctgggttcaagtgattcttgtgcctcagcctcctgagtagctgagactacaggtgcacgccaccaagcctggctaacattttttgtatttttagtagagatggggatttcaccatgttggccaggctgttctcaaactcctgtcctcaagagatccgcccaccttggcctcccaaagtgctgggattacaggcatgagccactgtgcctggcctaattaatggataacttctgcaagaatccagggtcacggttgatttgtttattcatttattcactcagcaaacatttctttgtgccaggcattgtgctaggtccagggaatactgcttacgttggagaagttcgcattctagtttgggtggacaaacatgtgataaagatgtgtacagggcatagttttctctcagcagctagggtaacattccaactccatgttttggtttaagaaacacatttgattttatttaaaatattatatattttctcttttatttcttttccctatttacaataaggcttacttgcaaaattaagaaatacatttgagtgggtagttcccttggtaaaacatttatatttccttcttaatttctttgtaaaagtctactcttaaacactactatttagagttaagtgagaaaagaaaattgcaggacagaatgcacagaaagatctatttatctatctacataaaaactggaagaatacactcccatactgttaacagtggctacctctagggaaagggtgaagtgatatttgaaaaaatggggcttttaccttttcttttctttccttttttttttttagacagagtctcgctctgtcgcccaggctggagtacagtggtgcgatctcggctcactgccagctccacctcctgggttcacgccattctcctgcctcagcctcctgagtagctggg

SEQ ID NO: 34096 - DNA, 3948 bp, Homo sapiens
tgtatttttagtagagatggggtttctctatgttgggcaggctggtctcaaacttctgacctcaggtgatccgcctgtcttggcctcccaaagtgcagggattacaggcgtgagccactgtgcctggccttacctgttattttctatactcctatatcatttgcattttttaaaaacaagcacgcacttcttttcccattaaaaaaagaaccgtaatattttttcatgaccctgtcccagaaaactcttctgtactcacatggctaactcaaacactgtggtgtacactgctgagggagctagttgtctctctttttgaaagaaaattaaaaggaagaggaaagtccatatttattttcctttgtactcttgtagaggtcatctaatcggaagtgttccaagctgctttaaagcccctctcctctttaaagtggtttacaaacattagctcagcacccttcagggcctcatagtgaggcgggctcatataagaggctagtgagtcataaggaagtggcagctgtggttgccatgtcagtggtcctaataacacccctaacatgtgtctctggctgtactgtgctcaaagggctttctcctgcattatctggtgtaacccttctatgacccttgggaagtcaggtcagtactgctattcctttattatataacagatggagaaatctataatataggttctggaaagtgaaatgataagcccaagatggggaggccagtcagcatgagggtttcacatcacttatatgtcaattactgcacagcacaaaagagaggatcactaatgtcaaacctcgtataacataactttgacattggggaggtaggagagggagaagagcaaacagtctttctgcctaatctgcccctttttttctttcctcccttctttctttctatcctccctccttcattccctctctgtttctactccattgggaaaagaagaggtgaggaagaggaccctattagagaagtaaacagatcatcacaattcagcagccaagttttatgcaaatttaaattatgccacagatttgaagcaatgtgccaaaatatattaatcaagtctcatttatatgcaaatattgaagaaaagagaagcttctcacactgtaaattagtcgagtttctccagttcaatacaggaaggctgagtgacttgcaggtggtgttcacacttttgccacatggggacgccaccaccgttggtagccggacatactggcactccgtcagggtggaatatgtgagcattgcataacacaaagtttcactcaccctcatcactcagcttgaaaggaccattaacacagttttctctcccattaaactaaattcctcaaaggcaagcttagacttattcttttaaaccccatctcctagaccagtgtctgacatatagtaacttaccattaagatttttttctattaaaagtattctttttttcttttcttttcttttcttttttttaagacagagtcttactgtgttgcccaggctggagtgcagtggcgtgatctcggctccctgcaacttccgcttcctgggctcaagcgactcttgtgcctcagccttccaaagtgctgggattagaggtgtgagccactgtgcccagccttaaaaagtattcttaacacaaaaaatttcaaatatatcccaaagtacagactataatataatgaattcccttgtactcattatccagcttcaacacctaccaactcatggtcaatcatctgtcctctatataccctatttcttagaatcaaatacacaaatgtaaatattttggtgtaagacactgtaaaaaagaaaagaaaaggaatgtaattgctaggcctctctcactgactttaaaatacctgggtgggtggcggtgggcagagtggagagaaggagcatttttctagaggtcgcagcgttttgtggaacaatttcctgtaatgggaaaaattgagacgggtaagaggaaggaataatgattattacatgccaagtgttgtgcattattatttaatttcacctttctgggagatagaggtatgacgtacccattttaaagatgaggctcagagatgttgagtgctgtatcttcagcaaagctgggattggaacccagctgtgtgtggcttcaaggtctgtattctccaccctctgataggacgaacttgcaatgcatatcaaaccaaatccacccatggtttgaggctctccctcccgcccatgtacctaaatccagcttcattcatagggccttgggggacaagcccctgagggttactccagccctttggagaagggagggtttccatgcccagagtgtcaaaggggaattcagtttcttattcaacagagctcatttcctcttgttgcttgtcctaagaaaatgactgcctggagtcccagagaatttgtaagtaaatttgtaggccaagagtggtggctcccacctgtaatctcaacactttgggaggctgaggtaggaggattgcttttatcaaggagtttgagaccagcctgaaaaacacagcaagacctgtctctacaaaaaaaaaaaaaaaaaagaaaaaaaaattagctgggcgtggtgacacacatctgtagtcccagctgctcgggaggctgaggcatcagaattgcttgagcctgggagtttgaggctgcagtgagccatgatcatgccactgcactcatcctgggtgacagagtgagaccgtgtctctaaataaataaataaataaataaataaataaataaataaataaataaaaagttgtaagggattaagcaataaaacacacatacactggttaggataaaccgtttgtgggaaaaatctaagagattgtgtttaagtgtgttcttgaatagattagactgggtttgattgagactctaaggaaataaaccaagcctcaattacttttaggggaaggagaccccattgtaagagaaggaagctgaccagccatggcagcttggaaaatgacaagtctcaggggcaaatgctggcaaggcctgtccattcagtgtccaggcaagaagaaagcttggcaagcagacctgagcaaagaggtttgccaggcaaagcaaaccctctagtgggtaagagcgctttgagcaattcagccgaaagataggtcttctattcaacctttgccacaattccttgctcgctcttctggataatttggcttcttgggtattcgtttttcaacagggaaagaacaaagtgctctggcttgtgtgaacttccagtactctcgaaagctgattttctcattataaatgaataaattggcgttctggttataacttggcttctccagtaatttgcctccagggagagaatggactgatctccgtactagagtgttctgtctgcttgccagcttaacttcgctttgtaagcgaataaatgggcctcctgtagttatatatcggcctctcaggggtgcctggttaatgcctggtttcctggggaagaaggaccaggtgagaagtgccaacaaacaggtctcctggcctgcaggagagcaggctcctcaagtggagaaatcatcaaggcaatgaatgcggtctcctggggtctcttgggagagagctggtgtctgaaccacagtgacacgtggccttaacacgaggaactgaaccttcatgccccaaaggaagcaagtttggatcctttaacccctaagcaggttattccagctcagtgagaagaatccctactttattcccattggcatgagacgaagaggttcttggaagcaaaactttgccatgtcgctccttcctttaaaatcccttgacagcctcttattacttggagtataaagtccaaactccttggcaagacttgcctttgtgacaggaaaaataaaaaaattattactacatgatttcatcaaatcaaatccccttat

SEQ ID NO: 34097 - DNA, 1567 bp, Homo sapiens
ggcctatgcaagttggggccgccacggtcagtgtttaactgtaagtggttttctgtctgtgctgtggccttctttggctctctcaagcctgcagtgtgagctggccatcccagcactcggacgttactggtgttttggggaatggaggaagtgagttgctgcccagaaaggaagatgcagaggacagacttcaggggccgactgcagcagcagagctgagagcagcgagggacagaggatcagggccacagagctcagagccgggagagcaccacctcgccttaaccccagaaccacaccaaatcttcagggatactgggcttcccgctgttggtggcatggctgtttcagcttttccatttgaatattgaatgaaaggatcatgcctaagggcttgaggaactggggacattcagaaccaacagtggtttcatcatgtgttttatgatctggttcctgcccacctatcctacccactccacacctatggcctcaccctcacctctatcctgggctgcttgaaatagctattcacccttaaagactcagcccaaggtttacccgctctgagaaaccttttcttcccctcccctgtctttcaccccgctggatgatttcctcctgctgctccgatggatcactggcaggcctcccagcatgccgccgttctgggttgaattgtgtccccccaaaagataagctggaatcctaacccctggtgccttatgtgaccttatctggagataaggtctttataaatgttatcaagttaacatgaggtcatgagggtgagctctaatcccataggactggtgtccttatacaaagggagaaatctgggcacagagacagacatgcacagggagcaggccatgtgaagattagagttgaggtttccacaagccaaggaactaccagaagtaggggagaggcctggagcagatccctctccggctccgccagaggggaggagtagagtacaccaagagaataattaacaggggaacctggctaattccagaaagcttttccaggaaagtgatgtttgagctgagcagagacgaatggccctgctgacaccttggtcttgaacttctagcccgcagaatggtgagatagtaaaattctgtttttctaagccattcagtctgtggtactctgttatggcaggcctagcaaatttatacagcctctgacatgtcagtgacttcatgtttttaggtctgttaccccaactaagctataaacccctcaaaagcagagactgtcttactcacttttgcacttcatctaacactgcctaaatgtttgttgaatgaatcagtgattacagttcatccccagtttcctgaatctactctcagaaacagcacatggtggtagaaaatgcctggtgcttagttggcagctgttaccagctctgctgccatctgtccatgactgtcatcaataaccacagcaatgacaatgaccccagtttcagctagcattcagtgggcatcaaactatatgagaatgcatttattcagtcagtcactcgaaaaccattgagtggtgcttgctttgg

SEQ ID NO: 34098 - DNA, 1183 bp, Homo sapiens
gggaatttttgttggtgtcatttgagttttcagtgactgtagctttgcttattgtttgcctgttgatcagtttccgttttttcatagaatgcactatgagcatttgctctagccaggtaatgcactaggtactggaaatcaaagttgaataagattttgactctgcccagaaggagtttaccaaccggcaggatagtttatattttcatggaaggacacagacaatgggaggattggatatttccatggaaatgagctcacttacacttgttttattcaatgagatcattcatgtaggagtaggtagggcatcagagaaagggttataggccctcttggctgagccagtgtggctgtggccaggttcactggagtcagagtacagcccgggttcaggagggctgagctgactcaccaggaaaaagcacaatcaggagtcaggccaggtcaggtgagcaggctgggctcacctgcagggcaagcaggcacggagcacgtggctgtgcagactcagtttgttaaatactgggctgcccccagtggtatctccctagacaccacaaaacccacttgcattagaagccctctgtgtgtgggtttatgaattgccagcaagggctgagccaaggtcttcaggcaaaaggttgagcaaatggccctgtattcagggagagcagagtttgaacctggtaccacttggagctatgggatcgtgagacagagttatgtcagctttctgaggcccagtttcctctttagcaaagtgagacaggaatatctgtggctcactggggagatgaaataatgtacagtgagtgcctctgtatagttgatattcattagctgtttcttttcttgtaggtgtgggttctgctttgcaagaacttttattccctttcttcactgctctgtcctgtcacccattcccctcccctatcacatactttctccagtcttgaagaaacctccagttgtggcgtgatgagtaggctcttcctgtgctatggaggggtacctggaacctagaaggcactcaacacatatttgtgataaatggtcagatgggtggagaaatgaacaaatcctccatttaaaggcttctactgccactatagtaaccatgtgtagtggcgcaatctcagctcacttgcagcctcgacctcccaggctcaagtgatcctcc

SEQ ID NO: 34099 - DNA, 2305 bp, Homo sapiens
cgggggtctcgctatgttgaccaggttggttttgaaatcctgggctcaagcaatcctcccatctcagccttccaacgtgttgcaattacaggcatgagccactgcacctggccttgtcactatttttgaatcatccatgagtctctctgggtatcagaggcataagaactgtcagatagggatggtgctggcacatttgtgggtcaattgcagagaaccctgtcgagttaacagtccttcccatctctagtttcttcagcctcaggaaatacacagctagcaaatgtgaagaaaataaggcttcctgttacttaagatggactggaacgctagaaccaggaacttgattctgagatcaactttgaagtaacaaaacttggctggggtcaaaatgaccagcattattgcaccatacaaataagcctgcagtatctgcagccctcatcctgtggtatggcctctgcaggcatccaggctgaggtccacttgcaggggcaggagctgtggaaccgctgcatactggcacagccccccacctatgaacagaagcagatgctgggagaatgtttgctcccgctcatccaaacaatgcattcaaacctggctggaaagatgataagaatgctgccagagactaacaactctgagctgctgctgatgctggagccccccaagtttctcaggtccaaactggatgagccacggcgttctacaggctcattgtggcaggagagaagctgcccaggaggtgggtgcagttgctgctgatatctcttagtcaagaaaaactgactgcaaagccaaataaccccttgaggaattcacctcaagacttgaagacttcatagcttatcctatgaacctcagtgtcaagaaccacagatggcaactatgataggccattttgtttcaaaaggtcaattatgaagctgtagactttttcaattatatgaatatgttttctgggttctgctacggcccagacagtgttaacttctttttctattgtggattttgatgttttcctcccaagatattagttttattatatgtccccaagccttaagtttctccataaaggaaaaaaaatctccagggaaaaaaaatcagcctcttagcaggtactggtggtcataaaacacccagacaacaccagacggtggcgccagagaggcaggcaggtggcaggagggctgcacggagttggaggctcctgagtcttctgtttcatttgctggcagcttctgtgtgcctcaggtgccagcggcctggctactcttgtttctcacagtgtgctgaagtatcatggggtttgtccctagcaggtcacccagagtccaacaggaagtgagagcagctccttcctgctgcagtaagagatgaacattccctttggagagacacactaggtcactacaaatgggccactgaagaacctggcactggccgctatcactggccccagctgcagtgctgcttgctgttcacaggtttgtctctttctgtattatttatagcaaacatggagggttcacactggcctaggcagcatccaagtgcttttacatgtgacaacgcagaactttctaacatggcataccaggactgcaggtgacatatgtgcctcaatttttcatcaccttaccactggctatgagtagattcatccatttatgccactatcatttgttttgtgaattatgttaatacctaatgcaaatactattttctggtcaagtgcggtgcctcacacctgtaatcccagcattttgggaagctgaggtgggcagattgcctgaggctaggagtctgagaccagcctggccacatagtgaaactctgtctctactaaaaatacaaaaaggtgggacacgcctgtaatcccggctgctcgggaggctgaggctcgaaaatcgcttgaacctgagaggcggaggttgcagtgagctgagatggtgccactgcccttcagcctgggtgacagagcaagactctgtctcaaaaaacaaacaaacaaacaaaaaataccatgtattttctctggatgccatggcatgaaaagttgggaaacactgccgtgaatgaatcttcacacaacttatggggtagttcttcctaatacctcctttttacatatgagaaaatagaggctccgaggggttgcttgactggaccaaggtcacagagctaataagcagtcgagccaggactggaacccagatggcctatgtctagagtttccatgctcgtgtccctagaccaaaagctctcaaccctagctatatattagaatctgaggaactca

SEQ ID NO: 34100 - DNA, 4863 bp, Homo sapiens
gagccactgcacttggcatctcctcttgaggttttaatttcttcaactgttaaatcagttccacagccctttctatccataaacccttcatgattcctactctttgaacacttacagcttaagagatatttgttgatttggtaagaaagcatgaccgcacttaaaaggctacttattatcaattttaggccatttagcttgtgtctgacatacttcaaagccagagaagaaaagatattatctgacagtacacatctttcttcacctgagcacacattttccattttacctctggctctgcaaaaaaaaggagagggagtggggaggggaaggggaaacacagccaaactatggagctcatgggctctggtgcaacatgtcctggggaaacttcccaaaaccaaggcccttgttgggtaagaaggcagaccctgcctgacctctgcaggaaaattccccttgagccaatgttgcggggtcacacacttccagctttccaaggcaaaacacatatgctgcagacacaatgggcttggagtaaaccagtccttcctgcagataccagcctgcagaaaacacattttgggagcctctggccagaggaactcagtacatgccactcagcccgggagcagtcaaagatgccatggcaagtagactcactcagctggggagcagtgaagattggccacactcattgctaccccagaagctgcaagctccactcacagttttttccatccctccctcatatgataatagctaccactctcaagcacctagttggtgtgttgactgtgctcagcattgtgtagacattaattcttctaatctcatagctgcttcctgaagtaggtactgttctcctccacattctgcagagaggatcctggagcccaggaaggttgcatgactggctatggtcacactgctagtaagtgcaaagtcaggatcctaacccatgacctgtattccaaatccatttctaaggtttgtaataaatcagaagctgtggtagaaggagacattgatgcttccagacctagcctgtctctccccagggacagtgctcattctgcctctcccatccacaagaaggttctgaggatactggggctgcctgggacttcctatcctggttggaccaagacctatgcagagcaacttggcttccggggaacttcagcagccctggtcttccatgggctgagtcattgtagcttagcctaacgttcttagctggaacagtcataggaaagtgtctggaaactcccccatgtcttatcggcaaagaatttattgaagacagttcagccacattcctcagctttcccaaacctcaccttgccctgggagaatgagaaaggccagaaagacataagggcgaaaatgagccatggaattaggaagagcttttcatgccagtgcagggaactggcagcttctgcaaacataccactgacaacagctggcctgtgagggcccaaggacaatcaccctgggcccacggatgcctgggcccctaataatgaccctgggcccaataaccctgggccaatgaccctgggcccctgccgtacgccatcctatgccatccatctaccttgactagtgccaaatgcctaatgtgtgcaaggagctgagttaggcgctgatagagcccagtggttgagtttcttaggcagatctggactcaaagttcacatctgtgcttattggctatgtgacctcagacaggttatttaatctctctgagttttattttcctatctgtcatttatcaaaacttatgagttgtggtgaggattaaatgagaaatatatatgctcagcttagtgtgtgacataccacaagttgtcaagtcatagaagcttttattaagtatcaaacaatcatgtcacaccttaatgaattcaaacctggtatgggttaggaactgtgcttggctctggagggaggtggaaagacagacacaatccttgtcttcaaggagctcacaggacagtgaattagcaaattattactaggaaggaaatgtatccagagagatatataaagggtatgaagagaacagagactggagacccatgggaagggtaggtacaatttcctggagaaggtgatgtctgagctggtaccaaagcaaggtgggaatttgccagctgaaggagaaggggctgggaggtaagggcagccagagagggcaactggcacaaaagcttatgcattactcaatgcatggtatgaactagacagggaatggctgaggatgaaaggactccaggcttgatggagaagagctgggttccaaagggctatccttccctttccagctgttaaccttttgtgtgtcttattatcccttggagacttaatttccttatcagtaaaatagagccaccactagctacttaacagggtgagctccattagaaaatgctacagtgtttgcacagtgacaggcatgtttgtggctgagtctcttgcaccccaaagcacggtccctggtgcagccagtagtttggggtgctcaaaaaggtatcacactagctttcttagtggagtactcactatgggccaggcactgtgataaaccatatgaatcttatccagttagataagctaagcatgatcattactcctctctaggcgtgtccagaactgagggggttcttagcaatcagaaaattctgggcagacctggaggagttggtcacccaacaaatgggcatcggaataggcccaaggccagaggctgagctggaatttgaacccagtcctgtcagcacacagcacccgagttcttaaccactgcactattacttaaacccataaatgatattctttcaaaacacagtaattgctaaaccgattcattcctaaacagaccaattaatcttccctgtctttaaactaattccccttccgcacaatgggcccagcattccgtcttgagcttatgacactcatatttagaatacttgaaatattgtccggtgaacagactgtaaacaggagagcagagggaaggaggggaagggaggggggaatgggacaaggctgcagccaccagcacctgtcctacccggaccacagccgagcgcagtctcagcctctctgcccccatcacccactcctgtccggagccgggggcatcagttccaaatatttggcaggcccacccgataagccccgcagttgagtagcagctgtgaaatgggagtttgggagggccatggagctgagcaagcagcagaaggcatcaggacctttgatttcttttccaaagcacattttaaatgagtagcatgctggtacggggctggcggcccacagtgagggatgaactgacgcctgctcggcgacaggcaggcatatgacacaagggtaaagtattatttactttctgggaacaggtgctgcccaggactcccagtcctctcttgcctgacttctcccctatccacctggcccggcccttctcagaggctgctccttccctcaccctgcacagccccggccctgggcactgcttccttctcagcccttagcaacatgtggctcacaggcacccagcccatgccagtggggggttgggtcccacctgggacatgtgcctgctggaatcagctcattttacataagctcttggcacagatgccaggtgataacaactttttggccccagttaacctgcaaccaccctgtctgtgcccacacagacacaacagaaagtcatggaagagtgagaaagaaagttactgcacgcaaatgtctttgcatactgccagattcattctggaaaaatgtcctagattatgatccactatcagcttttgtattagaagggaaacaaccaactatgcaggcaaaatccacctaccaccagctggtctttcctcctctgattatgtgttatttccctaaatctctggttggtaaatgtgcaagagaaaaggtttgggctcttctgttgattcacaaaacaatacagatggcagttaagacatttctttgcatagcttgattagggacagacagagaagggggagtgagcaaagggcctggaggtcttgcttggctcatgaactgatcacaggctgcttttactccatgcctctctttctgaaccccatgaaaccccacacccctccttctgaacctcagaacacattggcaccaactgtgaagcagctcctcagcccagggatgtggagaggaaaaagtgctctcaatctggcagtggagggaaaacaaatatacaattcatgatagcacatggtcctgggtcataggccatgagtgaaagaagccacatgctgtgggtttagaagaggacaagattgcctgtgattgaggagctcagaagaatggccccatagttgcctggtttagagcctcactcactctccttgaccacggtaaactgcatcttcactagcatcttgtttctgagcttgccccacttcaatgcaccttgaattcttctgccagagaggtttttctaacttgaagattggacatagtttcattcattcaaaatctttcactggttgccatcactccaggataaagaatggctcattatcatctagctcctacctccctccccagcctcgtcttttttttttttttgagatggagtctcgctttgtcacccaggctggagtgcagtggcacgatctgggctcactgcaacctccgcctcctgggttcaagtattcttctgcctcagcctcttgagtagctgagattacaggcacacaccaccatgcctggctaatttttgtatttttagtagagatggggtttcaccatattggccaagctggtcttgaactcctgacctcgtgatccccccac

SEQ ID NO: 34101 - DNA, 2200 bp, Homo sapiens
ggcccctctcctgtagtcctcatgccacacacccccttacaaagcctgtatttcctccaacctcaacaactcacttcaccctccaccccaccaaaaaaggcctgatctcaggggaagataatttaagcccttctagtgattaattttatctgtgttgtctccagcttgcaactcacccctcattatagaagcgttactagacttcttcatctggtggaccagagaagagggccaaaaaaagagacaggatttgatcatagttaatctttttgtgtcttttgtttatttgctcctttgttctcacaacaactctgcaaacaaggtatttttacctccattttacagattaagaccctggggcttggagacagcaagtgactgtcccaagatcactcagctgataagtgatggagccaggattccagcctagactgtctgactgcaaggggcttgaacttttcaccgtaacgcaggtgggagtctgtggagttgggggtggggtgatgtttcccagctaccctccacacaaaaaatggaaagtcactgtcctgattatttatctaccctaaatgtcccggggtaaaatcccatttcttccaagagaccctgccttgtttatccagcccagactgatcttgttttctgatctcccattcatttctcaaccacatactgaccctccactctgtaccagtcttaggtacacattgtgatgggccccagagatacaaaatccagtaggccctggtccttcccccaggttcctgtggtgtacaggggagagggagctgagtgacccgagcaagtttgatgtcctgctgggggcctgggcctactccaaaacacgcacatctgtcatgtatgtcccctctgtggccctaaattggattttcagtactatgttttattttctcatggattccactgcaactcacatttgttatcaggaatagggattaagccctactggcctatgcgtgcctcagttctgtcatctgtgaagtggtatattggccccaacagttcagtcctcattcaggagcccccacggtgaactcttcctctagcctcatcacccagcgtcactctcctcacaactcactcttgctgggtctggactgaagactctgttcccacaaacatgtccctctctcacccttctgccccgggtctccacccactacggccccattcatccttcttggctcatcaaagagtccacctccatcaagcctctcctgatttccctaaccagatgtaatcactgactctcagcccttccttgcagacttcaagtttccagcaggcaagggcatgtttcatgggcaattttccaaagcatgcaaatacagcaattcctaaactctgaggcatagtagaaagtacaactgaactaggattggctctgaaatcctgatttctagcctcctctctagttgatacttgtgtaacatacaagggattaaaacttttgtttgttttcattgatcactaagcaaacacaaaaaaattaaagaaagtttaaactatccatttctaccaccaagtgataaccactactgttattttggtatagtgtctccttgtttatgcatgtaacacagacggaaataaacatactgtcaatattgttttgtaaactttttcacttaatatttaatggacattgtcattggtaaaacttgtttctatagaagagttttctttaaaacaattattggctgggtgcagtggctcatgcttataatctcggcactttgggaagccagagtgggaggatcatttgatcccaggagtttgagaccactctgggcaacacagcaagaccctagttctactaaaataaaaaattagccaggcatggtggcactcacctttatagtcctagctaactgggaggctgaggtgggagaatcgcttgagtccaggaggtcgaggctgtggtgagctatgattgcacaattgcactccggcctgggtgacagagtgcaaaaaaaaattataaaaaattgttgaggtataatttacatacaacaaatacacccattttaagtgtatggtttgatgagttttggcaactgagtgcgctcaggcaaccaccaccacaattaagatttagaacacttccaccattcctgaaagttcctgaaaaacccttgaaatcaattcctccctacacctaggcccagataaccactga

SEQ ID NO: 34102 - DNA, 1030 bp, Homo sapiens
caaggttgcacatttggatggtgtcatattgggttttctttctctgagaacaggcaggtctccacaaccttcgaacgattttaacgtgtgtgtgtgtgtgtgtttgtgtgtgtgtgtgtgtgtgtgttgaggtgggcatgaagaggacagagggagaaagtgaaatctgcgatttactgaaaatgtacattcttgatcaaactcacaaattccattgtttatttcctgttggtttggtttagtttttcactgaaacaagagaagtctaccaagtaagatgaggtagatagccctgttggccacagctaagggtaacctgagggctggtggagaatcaatcgaacgcagtcagcagctgattcttgttatttatctttctgttatttatttaagctatgatttattgagcacttaatgggcattactttatttaattctcacaattacactgtgatgggcgaactgaagctcagaggataaatacttctttcaaggtcacacatctagggagttaaaaagtttgggatttgaagccaggtctgcctgcctttgaattcagtgcatctagctacaagtgcagcaaagcaaatagtatgcacatgactagggttagctggggacagggccactgtgtaaacggacatgttagcctggtagatgtcacactggggcaaaaggtgggaggtgacttcgctgtgaggtgagttctccaacaatccttctgttcaagcatctcagacagattcccagcaccccaagcccaaggaggtagactagtcatttacagaacagattttcaaaaatgtgtttttccttaaaaactcctttactataaaaggttaaatgaatttacacccaggttaaaaaaaatctgaagttttctacttacctctgcctctcctccctgtccttctgggcaattaatgatgtcagttttaatgtattcttgtggagttcttgccatgcattcagaattgtaagtaactattagttaaggtcaccttcaggagcagaaaaaacaaaaagcaaa

SEQ ID NO: 34103 - DNA, 854 bp, Homo sapiens
accctttctttcacttattcacctactcaaggaattactgagtgccagtcatatttttgacaccgtttttactcagttgcttataatccagcaatgtatatgaacacatgctcagctaaagtcacattgtgctgcattctctaataattcaaatgctatggatcttcagggaaggaagggctcatttctgtctggagagatttgtccatttgtttacagatttattgagcactgtggtcagcagcctgaagatggcccccagtcatctccacctcccagaattcacatccttgtgcaatctcctttccttgaatgtgtgctggacctaatgactcacttctagcaaatagaatacaacaaaagtgacaaaatgtcacttttgagattaggttacaagaggactgggacttccacctcactctttctcagacttcactctggggaaatccagctgctgtgttttgagaaatattatggagaaacttctgcggcaaggaaataatatcttcagtcaacagtcagcaaggatcctaacgtctgccagcaccatgtgattgagctggaaagtcgattttctgaggactgccaacagccacccaagtgagctgggaaacagatccccctgcagttgacccttgaggtgactgtagcctgacagacaccttgattacagctttgtgagagatctgcaccctaatcacccaactaagctgcacctgtacctgaatttctgactcagagaaactgtgagataataaatattgtgattttcaaatgctaagttttggggtaatttgttatgcagcaatagatgactgatacaagtacctactgttttcaggtagtatgcgagg

SEQ ID NO: 34104 - DNA, 1372 bp, Homo sapiens
ctgccctagacgatttaggggacgtaaacagaattaagagtcggcatttatctttgatgagttttcagtctagttagcagactctagtagaaactgtcttgttcatcttggttgcccggcgcctgactcagtgcttggcacaaagcaagcactcagtaaacatttgttgtaaattcacgtgtctgggctagaagggttgcttcagactggtcattctttgtctacccctccaaatctgccagcccagcaaactcagctccacagaattactcccagtgatccgacaaactattacagttagccaggaacaaaagccactaggaaaataatgcatcacttttcatctggatgtttccaaaggaactgaagtattaaagtcacagttatcccaatcagatcatcttttcaaaggaattacagggttgtgagccaacagcaaccacatacacctttgcagtaatcagaaccagcgttctcgatgctgaaagcaaaatcaagtaaacaaggttgtgttgtggacttccttgacccagactttcaggaaggagctgacacactgcccagacttgcgctcacccacatcgctcagaagccaaacaaactcgagaagctcgtgttttcccagctgtatgatgcactcacttcaccaagtgactggccagaaaacaagaaaaagaaaaaagaaaaatccctcgttcagaccagtcaggggaataattgcttcagctggcctttactttttattttcatgaagtatcaagaaatctaaaaatggaggaagttagatctatgacttttagtcactgaaaaggaaagaaaatattattttttcttttagagagctgatcgtgttattactctgccttaaaactgcagtggctttctatcttataatcttcaaaccccttggtatcccttccaggtctttcataacttgtttaaaacaatctttctagccacatctgcctcctttcctcccactgaaagctgttcttgagctttgccaggctcccatggtcttaaatactgcatgtgctttcttgcatacacgcttttttgttcatgctattccttttgcttggaatacccttccttgccttgatcactaggagaactgcaactcatccttcaagaccagttcaaatggcactgttactcaacccaacagcagatttagcttctccttcatctgtctccccttaggactactttgtgtgtatctcttactgcacttgttctttatatcattcatccactcattcaataacactcattgtctttgcactttgtaccagatactatgtgaggtgctgaggatccaggtgtaaaagttcctatctagtggggcatgcaggtaagcaaattgattgtt

SEQ ID NO: 34105 - DNA, 810 bp, Homo sapiens
atcatgatggctaacatttattgagcacttaccagcaaggcaatggcaataaagaaggtacccggtaagcagttcatggctctgctgctaacttagtaatgttttctcagtaagtcatttcctgtgtcttgacttcagtctcaccctgcaagcagtggagttgaactagttcagggcttttgactgggaggtcactaatatccttgataagataaagttctcagtttatgagctagcacactgagctattgcctgtcctaaagtgggctgagcatccatcagtttttagctctgacatgctcattgggatgcacacagtgtgttgaaggtaacctcaccagcctccttcccctgtgtattggggagaaaagaaatgactgtgtcctgagcaagaaagttagagatgctgaatctcttgcactttttttttttttttgcccagcacacagtaacaatgagggtaattctgccaaaaaacaacttttcttggcatgcattgtgctgttcacatccatggaatttattgtcatatcactgccaagttggacaaattattatcagagccaagtcaaatccaaggacagcttaaggcctgccatctctttgcatgatgtccaagcttctcttgtggcctcctcaccccctgtggcttctgcacaccttcctgagggcctggtaacaaggaagacggatgctggtactctgatccttcaccactcagctctaaaatgatgcctttgctataactggagggttttgtttcatttgttcatttgtttcctcccatccttcaatacgttattatttccc

SEQ ID NO: 34106 - DNA, 748 bp, Homo sapiens
ccatggtgaggggagtgaaaatgcatccatgccaaagaagacacaaactgggcagagtgattgtccccttatttctccgaaagccaggggtttgtagaagagcattcctgggtgtgtttcctgatggggagagctaagggcagagaatctaggataacacttggccttcatccattccatgacacgtcacacctttggcatctatttggctgttggtaggaagggggaaaggtgagatgaagaaagaggagatttgccacctctgacttcccctcatgactcccaggtcatattagcactaacactagttatattttaaagtgtcttatttgtttatgtcacaaataatgattgagagcacactatgtatatgccaggctctgtactagacactggagacacaatgcaaagcagccatactccctgctctttgaggtattcacaatgtggtacatgcaataagacaatcagatgtggaaagtgtccagtgagttctgtagaatatggcccacttagatctcttatttacagtattgtggctggtataatttaattatttgagtaattatttgttagtgttggtcttccatttttgactaaaaatcccataaggacaaggattccattaccactgtaagtcctagcataatgcctagcctatgaggaagagctcaataaacatttatgaagaaggaaaggagaggagaggagggaagaatggagggagggaaggagaaggtgggatgag

SEQ ID NO: 34107 - DNA, 2211 bp, Homo sapiens
aaagaaagaaagaaagaaagaaagaaagaaagaaaagaaagaaagaaagaaaggaggggagagaaagaaagaaaatgagagataggaaaggagagggaagaagatggaagggaaggagaggaaaggagaaaggtagattagtgtcctggaagaagggtgaaaggacactgtgaataaactctgggcgtgtagagggaagctgggtactgagaaggcaaggaaatggatctaagtgagaggaggtcaaggcggcaggcactaggtgtataggaagtggatgtttcatctgggaaaattccatggcagaataaaggcaggtggctgtgcagagcctgggaacttgtcataaagtgcactctctgtctggctgggaggggtcctgactgcggagagccacacctctggctgcacctgggaatccctgacctagggctgatgctgtgccaggtggggcagagaactctggactctggactcaaacagacctgatttgcctctagcctgtgctgttaataacctaaagtttctctgaagagctgttgaggtgatgagctgtgctggaagaacctggccaatgccttctggtggaggcaggcctgggctctcttcataaagaagcattttgttttagctaattgatccctatggaccattgttctagtttactatttctcgtccttagctatattcacactataattacacctttctcaccgtttcttagaagccttctatttcaaatagaactgtggtcttacctataaaaaccacatttcccaaatacagattgtgatcgatagtcacaagggcacttacagggaaaactctggaaaaatgaacagcactgccaaagggtgtaatatgtgcacagcctcatgctgagtgcttgcattgcaatattccatccagtctttgtagcagccctgaggggcaggtgctattgttatccccagttgacagggaaggaaatgaggcccaagcaggctccagtcacctctccgcagtctctcaaccacatgtggtggaaacaggacccacaagcagggctgactctcttggtcaggcctagacactccagccccaagccaggccaaggcgatgcaggccccagtggcaatgagctgcggttttagaagaaaagtcgacaaacgatttctaccctaatcgttacatctatttttaaagcttctttcttttattttgataagtggttgtcatttttcatagactataagtatgtaaagttttatttaattaatttcgaaagtgaacttttaaaaaagaagtgttctgtaatggtttagcggacatatggatacagggatagtgaagatgaatacaggtgatgatctggggaaactcaggccgccctcagggctgattttgatctttgctattggactctgtgacactgtcagtctgccaaccctcatgggacatgccactggggtttgttgcatcttactgggctttgcctaatcggtcttgcctgtgtgggtctgtctggtctctcgggtcatggctgtgccccatcttgacagaataaatatcaggaactaggtaaaaggtgatttggcaaatatcaggaaatgaaatatcttcagctgcaattggcacaggacacacaagggcttgctgggaagcgacatgaaagatgagggtcccctctgtcctctgcacaagacctggggcaagggcaagtcaggagaggcatgtacacacagagagaggatctctggagggaaagggctgttgtatttaccaggaggctgcagcctcagagatttcctgctgtcacagtgaaagcaacctgcttcaggcctgtataactatcgttctgacctttacgctttctgtaggcatgaagcctcatactttctaggtactcattaaaattgttctgaattcactccccttgccactgcacttgggagagaacattctacgtagaggaccacaattagagttgattaggcacccagctctgttcctccactaccgaaaactagatatgcagcaatctacttcctaatgattactgggagtttcttttgcataacgcagttctcccaggaccactccctgagtgaatggataatcaggtcccagacctgcaaggctttaaccagttcttggacaaaactatataaacctatcatctcctaaagtatccctgctgcttctcactccctacccaccccatagctgact

SEQ ID NO: 34108 - DNA, 2610 bp, Homo sapiens
attgatggtctaggttactattattatatcgcatagattctcaggttctacttcaatatttgatccaatgtttatccctatttttaaattttggattaaaattaccaattttggattcatggtattcttactcactttactgatgctctagttttttccccctatatttcttttactcagattgcaaagaacttattctaaatctctttccatttcttccttgaaaattctcccttcttacatttctgccacctagggacaaatgtacttcaaatattccttggaactctgttctactatcccctccacttcccaaatgtggtagtctctgaaggcctggacagagagggaaggcctgaccacagtgcctatagttggttagtcaaaatggaaccaaagctagtgtgtggcagccaagaattgcagcagcctaagtccccagggcatgctgacgtacaaacatgggaagccaagggcctacgccagtttctagaggcaaacagaagggatcaaaggtcagcagctctgcagaagctggagcaaagtggaagccaactagaaatgcagcgcaccagcatggcacatgtatacatatgtaactaacctgcacaatgtgcacatgtaccctaaaacttaaagtataattaaaaaaaaaaaaaaaagaaatgcagcaaaaaactttccaggcagttccaagaagagcattggaagggcctcactctccattatcagtcagaagccacatggcacatggaagtgtttcccctgcatgcacaaagggaagaatgagagaatgcttcctagtacatcttcttttcccaggctcacattttttatagttaacttaggctattttatttattaaacaaagttaattgcctccatatcctctgaggactgggctgctccagagtcagctggccccttgcctggctgcctgcacatttgcaactgaaggacaccatcagtttggacatgtcaaggatgccagtaggatggtggtttccctaggctgtttgcctgctggagagcctctaacatgcctgcaaggaggggaaaacagagagagagagaaaggcaataaaatgtggaaaaaaacagatctatatctagtcctagaacagcagcaatgtccagagggcagccaaaagcccagtgaagcaagtaaaagataacagactgcaagcagcaggcagcaactgacagatttctcagagcaggcaggaggtagtctgagcaattatacagggataaagctgagacccacagaggcaatgaaaagagatggaacaatgccaacaaaggcttgagggtaaaaggagcatcacagggaaataggaacaaagcttcatgtgagccattagataccagataaagaaagttccagatcgataagacatattgggtcatctaagaggaagggaggatgatgggaatggatttttcaggacaagtgttttaaaaaccttgttttatctaaaaaaaataaagatgagctcaaaatgagatcactggggactgtcacttcagcccacagctgccatagtataggagggggggcaaggacttctagaagtgcaaagtcaccccattgactcattgaggggactccctgaggtgttagacatctgttactggtggccctggattgggctgctggctgcagtgtaagggaacaatgtggcaggacaaagggagaattctggtttctgaatgcagcaaggaagatcttaatctataaggaaagtggccagtcgctaggaagacagtccgtccagggatagagaggctcatggcaagggcaggctcaggggaggcaatttgattgatttgatggaacacttaatgttatctatgtaggtgacagtgactctccctgtttttaccaggaaatttctatgagggcatgggtttgtttaggtatgcaatactcagcactcgtttggcacttagcctccctctcctcccttaaccttctgccacatcctctggcccatttccaaacctggatcatttccatgatccctttttcccttatcctggggccctgagccctggcctgccacacgtccactgtgaggcctggacagcctagagcctgctaatgatttttcgtccatttctaagcccacttgccacaaacttttttaagtgtctgctctcaagtgagcttcattttaataaaaaggagttccttctatttccaccccctctcctccagcacacaaatgcccccaggtcctttacttgtcttttaactttgatcatctctcctcccgttatctcccaattggatccctttcagcaaatgctgtcaatcttctctttccctttcccctgctctggtcagcagataacatcatgtcagcttcaggtattacataatctgacatcctctcttcttcgtagtcctctgtttctcccctctctttctcatgcctgcctcctccaagccttgcactgtttcatagtcccccaaatccctcatcatccccttgactttcttctcctatacgtaaaagagaggttttccgctttagctgtgttttagatcacctgaagagcttctaaaaagtattgaaatccctaaacgattgaaaagaggatctt

SEQ ID NO: 34109 - DNA, 10902 bp, Homo sapiens
tcaccatgttagccaggctggtctcaaactccttagccaggctggtctcaagctcctgacctcaggtgatccacccgccttggcctcccaaagtgctgggattacaggtgtgagccaccacacctggccccaactaatttttgtatttttagtagaggtggggttttaccatgttggccaggctggttttgaactcctgacctcaggtgatccgacctcctcagcctctcaaagtgctgggattacaggcgtgagctactgcacctgaccaggaaccttatgatttttaacaagaaaaaataatacaatacaattctaggtaggtggaaaatacatccatcatagttgaactgatcttctcctttgatgtggacaatgatctaatactgaaataacaagcattatatttctttcagatgttaaagcattgattgttttttgaaagaaagaaagaataattctgcattatggaaccagtagtaggaatgtatgtaggataagcatgactaaaatatcaaaaagatctttaatatgcaaagcaagtagcagtgctaaaataattgaacaattcttgagtatatatttccatatgatttctaaatataatcatttggtatctttacaaacattactacaagagcattctactcctgtgtacttggcagttgtcagagttacctgtagtggtttttaaaatgacatcacatattggagttatcacactgattataaagaaatatatatatatatataatattgatataggaaaatttctctgatttaccattgactatcaatgtcctccaggactaataaacagttaatgataaatcaactatgtccattctaatgtgtaactacaatctaactgtgtagctaaatgcagtttttacttccagtcatgaggcccaactttgaagataatcactgagaaaacattctaggtatactcagcaatcaggcaaaatgatgtaacgtatctgagtcagaaagtatgacaaatgaatatttttgcatactggaagcccaagcttatctcagagaaaatccccaaaatacttgggcaaataactttctgatgaagtcaaatatagcatgcagtataatttttgagtggaggactaagcctataataagaagtaaccatttgatatcacatttttactggatatagtcgacttgggtggggcactttaggactgtggttcatttgaattggtgtaaacaatacaccggttctactgtcctacagcctccattcagatgactgaagtcatgggactttcagcatagctagctgatgacagtgcatactattttgtcccaaaatccagttcaagcatggacataccaataagagcctaagctctttaaaggcaaaggaccaggaattgtacagttcttggtatagaagaagacaggcaaaagtgtttttgaactaacgttaaatgtgcaatatgttagaattcatgcaatgcacaggactgcaggattctgatatcttatttaactctcaaattctattcaactcaataaaccttgactgtgcttctactaaatgcaggtattgtactaggagctgaggacaccaaactgatgaagtccttgctgtcaagaaactcacatgattccctaattctttgtcagcttgctgtgatcacattttcttcccaagaacctctaagaaatgcctagtggatagaaccttggagttccacggaacatattaacaatcgccaaatgatgactcaggctagattgtgtaattcaggttttgtctgcaaaactgaaaatgcttcggtaacctacctaaatttcaatgttgaggaattctttaagaaagacatcaaatgttaagatttaaggcatagatatgagatacatagtcatgcttaggtgaattatgcactgaccatgaccatttctttactcaaatgttgtccatggctgacaacacagtgaaaaaatgagtgcaaaatgacaactcaaataaatgaaccagaaaacctatcacttttcttttccaccaaattaagatcaagagagctggagaatattttgtctagagtgataaaaacataagggtgcaaaacttccaggtacctttgcagaaattacttctgtgacctttggctgtacagcaaccttaataatgcaagcactgttttgaatgcaagcatgtgggagccattttcaccacttttgatgacttcagtaggtttaagaaatgtttttgcttttattgcataaaccataaaacaaaggaagggacttttgaactactcagtgagagtctatatattaaagtttgtttttcaaaaatgtgtaactaccatttgcagttttaaaggtctgctttccacctacaagttgccattatctcaaaggtgaaattttagcatatgactaaaaacttcctatagttacagcttcatgattcagcatctaacatcaataattcacagtgagatcataggaggctctctgtggaaggtaacgacatacatacgttaggaaaggaagcttagggcatatcgagagcattttgaatttagacttgtgggctgtgtgggtgtcagatggttgtctctcagctggtgggcgtccagaaggatccttgtttgggcaaggctctttgagaaaggagaatctgggttgccagggattcccacatgtggtcaccagctccccacgcagaccagctcacgatttcccagttacaccgggcaggtgggaaaccgttctgctttctgtggaaaagattctaacttggttccctgccatccctgaatacaaacgggttggtttttcttttttcagcttccaacccttgcagctttccaaaaataaatcaaaccagccatcagggcaccgaaataatactactgctaataagcagcttcgcctagacttagataaacaacacttctgaggtaaactttgccccggaggtctggagacacttttttaatgtaacctgcttactaataattactagacttcagtgcattaaccctggaaatagattttaatagccaccccttaaaacaaaagacatgaaaagataataagaaaaaagtgccgcaactattatagaaaaacacttggcagcctgcttcagcccaagctgaggccacctctagcctctgctaaagccccccactcccaatggtccccgccaaccggataagagtgcgcgcgggacccgccttcccctctcggcaccgcccccgcccccgccccctcggctcgcctcccgcgtggctcctcccttttccgctcctctcaacctgactccaggagctggggtcaaattgctggagcaggctgatttgcatagcccaatggccaagctgcatgcaaatgaggcggaaggtggttggctgagggttggcaggataaccccggagagcggggccctttgtcctccagtggctggtaggcagtggctgggaggcagcggcccaattagtgtcgtgcggcccgtggcgaggcgaggtccggggagcgagcgagcaagcaaggcgggaggggtggccggagctgcggcggctggcacaggaggaggagcccgggcgggcgaggggcggccggagagcgccagggcctgagctgccggagcggcgcctgtgagtgagtgcagaaagcaggcgcccgcgcgctagccgtggcaggagcagcccgcacgccgcgctctctccctgggcgacctgcagtttgcaatatgactttggaggaattctcggctggagagcagaagaccgaaaggtgagtcggcctgcggactcttccggcccgaacttctcttacctaccccgcgctccccggtgcagccgggctgtggaaggcttgcaggggaggaagctaaaaagtttgcacagggcaactcccgcccttgctccctcgggactctccgtggagctcccacggactgaaagagcgtgccccccaacccgaacgagccccgccggggcctttgcaaagggcagcagtggccgtcgctgcccgtgcggctcccgtggctggcagcctgtggcaggggcactctcgggacttctcacgggacgcccggtccttgggcgtgcaggggtcatggggggtgacggggccgcgggagcgccgggttttcgtagagcccaggtgcgcggtggtgcttgcattcgagagggaggggcgtggtaccggacgaggggggcggcgatggccccgagggcaccggggctgacgggacccctcgcccttgcccgcgtgtaggatggataaggtgggggatgccctggaggaagtgctcagcaaagccctgagtcagcgcacgatcactgtcggggtgtacgaagcggccaagctgctcaacgtgtaagtggggcccttgcgcgtcccccatggcaccccttcccgccccagcccgggaggtcgccttggctgggcgcccctcgcccggccgcgccacttcctgtcgcttttctgcctgtctcggaagggagggggcgagcgggccgggcggcgacccccagggacccgggcagtggttgagggcgcccgcgcttctgcgctcactggccccgcccgctgcccccagcgaccccgataacgtggtgttgtgcctgctggcggcggacgaggacgacgacagagatgtggctctgcagatccacttcaccctgatccaggcgttttgctgcgagaacgacatcaacatcctgcgcgtcagcaacccgggccggctggcggagctcctgctcttggagaccgacgctggccccgcggcgagcgagggcgccgagcagcccccggacctgcactgcgtgctggtgacggtaagggactgggggactgcagcctgcagggtagagccccggaaggacgggagtcagggctgggttgcctgattgtggatctgtggtaggtgggggtcaggagggtggctgcctttgtccgactagagtgtggctggactttcagccgagatgtgctagtttcatcaccaggattttctgtggtacagaacatgtctaagcatgctggggactgccagcagcggaagagatccctgtgagtcagcagtcagcccagctactccctacctacatctgcactgcctcccgtgactaattcctttagcagggcagattagataaagccaaatgaattcctggctcacccctcattaaggagtcagcttcattctctgccagtcagagctaaaaatagaaattgtgtaggagacaaaccttgttaattccctagaaatacattaagaggatagagtggaattttttttctctgcaatcttgcatttttttaatggctctttttttttttcctgataaaaacctttggtaggtagggaagttatgttttcaggggtaaatgtgctacttttgtcttctaaattttgctcttttttgactggtctagtcaagtgacagcccgattattttgctactccttaaaagtactattctgtctcttggagtatggttgatggcaattccagttaactgctgtgcagctctcatctcattgtgcacacagcatggaaatctttctcaaaactgtttcactcaggtcagggtaacaagtttggtagagcaaaccggtgaatgatactctcatgcaaaactgaacagatatgcaaacatatgtatgtggttcagcttgggttgcatgggttcagactttgcaatgtgtagtttaataggtaattacccttaacgcttttgcagggaacccaactaccttgaagaaactttaatttttttgtgcttctaatttgtctccatgtcacatagccaaaatatagaatgttcaagtgttttctcctcaaaagtataattactagaatatactggtttttaaaataagtttatttttataaatttgtttccagaatccacattcatctcaatggaaggatcctgccttaagtcaacttatttgtttttgccgggaaagtcgctacatggatcaatgggttccagtgattaatctccctgaacggtgatggcatctgaatgaaaataactgaaccaaattgcactgaagtttttgaaatacctttgtagttactcaagcagttactccctacactgatgcaaggattacagaaactgatgccaaggggctgagtgagttcaactacatgttctgggggcccggagatagatgactttgcagatggaaagaggtgaaaatgaagaaggaagctgtgttgaaacagaaaaataagtcaaaaggaacaaaaattacaaagaaccatgcaggaaggaaaactatgtattaatttagaatggttgagttacattaaaataaaccaaatatgttaaagtttaagtgtgcagccatagtttgggtatttttggtttatatgccctcaagtaaaagaaaagccgaaagggttaatcatatttgaaaaccatattttattgtattttgatgagatattaaattctcaaagttttattataaattctactaagttattttatgacatgaaaagttatttatgctataaattttttgaaacacaatacctacaataaactggtatgaataattgcatcatttcttattgtgtgctcttgtttcttttaacttgtactttattaaacacattttactgacgctttgctgtataccaggtctataatcagaaagcaggtgatttaaaggagttggagttgtcaggaaaaagggatggttagagattcagcttgcaaaatttgaataattaaagataaatgatattagcgccgtaataagattatacacaaaatgttgaggaggcagagaggacagagtgactaaagttacctaccagtttttactgaagagagatcattttatgttggtcttagtgagttttatttccctagttacagagggcaaagggatattgctagcagctgcattagtttgtgcaaaggtgtggaggcctgaaagaccacaaccaggtcagtaaaaacagagtgattgtgtgtgtgcctctggtgtagaaagataagggagcagcggggctgaaaaggaaggtggggattaggcccaggctgtgaaggcattctgtgttacccttatgcatttgggcttccttctgtaaacttcaggcagatagcggagcccctgaaggaagtggcatgatcagtgttctaggaaagtaacaccggggtctgtgaaagatgattattgggatgagcagctgtaggtgacaaggccagttaggaagtgactaagaatccaaggttgtgcattttgcagaaccatttttacagagcaaacagggaagtggccaggcaaggttttttgctgcccctagtctcttcctaaagctttgtgctttccagctgaacatttctatggttctgaggggtctgcttaaattctatcagatggaatagatggcagagaagaaaagcaaaagaaaagtcttcagtagaacaatcatttttagttagaacagtcacttgataattaactccaacaatcttgtaggcatagaccaaagaaagcaaaaatgcttatggaggcaaggcctagccttgcttttgtccacaggaattttcttatcctatttctcaaaccgtcccccttatggctcccctgccatctgtctttcatcctagtcatgactacatacaatcagaagaaagggtagggaaaacccactaatagcaacaaaaagctccaagtttctgcatatattatgaatacatagctccatgagcccttcaccttgcaaatgactctcttttcccacatctgctagaattgtggggttttaggccttgtttaggcttcttgtatcttttcacaagtgactttttctacatctgctagaaatgtgggtttttaggcttatttaggcttcttgtatctttttaaaatccagtgcccactccaaaacataactggtatttaatatttgtttcttacattaccaaaagattgagagcagtgagttttaaatagcaaggtgttttgccttcccattgaagtaaggtttttttcagccctttttcacaacgatttggtaagaaccctcttgcagagatgaatgaattaaagtggagacacacagtggataaagctggtttgcttagtggaacgagcacagtagcagctagccttgattagtccttcttcatcctgttttactcatgtaaaatggagataagattacctatcttgcagacttgtggcctctcctacaactctgcaacctccctcaaggcaggtaatgtctggttcattattgtagcccagtagtggacacaagtgccagcaagcagtaggtgctgaattaatatttattgaataaatgaatgattagaaataatgaatacaaactacctggcacatgataggtgctcaatggagtgtggctgtttctaaaacccaggtgatagcaataggaaaacttaaggcatcagagagatctgtgttatgacatgtacatctatataactatgtttttcaaaaagaatttttgatctttattctaaattcataatgcttagagatatgtaatagtacttatacattcttcagattgttttgaggaaaatctcaacaattactgtaatgccatttggtttcttcaaaaattttaaactcttgtttttctttcctgattgagcataacataaagttaacacagcattgaaaaacccaatcatgaaacagttaattttaaacaaatataaaattacctggatggcttctatctctaattgatgcaaatattctttagtcgttgccttaaaaaccattaaatgtacttattgcaagctacgttacaacaagaacagaaatcccctcatctacctaaggtgtattgaatgttgaaaagtggaaaatacctaatttttccactggcaacttcacctcagtgtcataaatagcattgcttcctcctttccacacttaacctaggatcttggtaagttaaacttttataatgaaaggacccatgaaagtagctaatctcctataatacataccttagttcccaaataaagaaaaaagggtcattttttaggaaagaattatttgtatactgtcaattgaaatatttccaaagcatgttttgagatgccttactggagcccttgtgaaataattgcttaattttcatttatataggtagaattttattctttgatatgtggtaaaagactgaaatttgggagataagttctcttcaaatgaacaaaactcagtggcatgatttgacaccaagtaagtatccctcaaagaagtgaatactttttttctttttaacaatactttggtaaacataagaacctctgtgaaaaggtcgtattcatgaaaaccaccaagaaatattaagtgagtgcttactgtggacaagggactatgctggctatattgaagtctaccaaaaaaaaaaaaaaaaaaaatcagacacacactctggcctcaaggacttcgtatcactacataaatacaaaacagaaaattaccagcaacgtaagaaaggcccagagaactgttctggaagttcaaaggatagaaatctccagaaggcatataggaatggaatggagaaaaaggttgtaaactctttgttcataagctagcatcgtattttgcaaacagcacaaaaatgtgatcgattgattgaatattgaatataattttgctaggtgctatgaagaatacaaagatgtagcctattagagcatttctccttaagttgacaatctataaggaaatcattaagcacattaaaaaaaagataagcttgttcatttcaatcatgctgcttattgaatgcctatcattttcctggcactatgttaggtcccaaggccacaaaggtgaaaaagcagccacctttaaggatatgtacaatttagtagggatacctgatacctgtaatactaggtgacaagtgataatgaggtatattcaagacctaagtgttcctggggccagggaatgtttgccaggttcagtgagacctgaaagatgaagagatctgccaggtgaatgtgaagggcatttactccaggaggaggaactatagctcaggaaggtacacactgaaggcatgtttggagctagcttttgggtgacagcaacactcatacaagatttactacatcctgagcactgatctaagcattttatcaacaggaactcattagcactctcaacaaccctgtgggagtaggtactattattagccccattttgaaggtgaaaatactgacacacagagatcttaagttgcccagaatcatactgtaagtggcaagaccaggatgcaaacatgtcctccagtgatgggtgatggagtgggaaagatggtagaaaccagagcatgattttctggcaggccaagcttcttttctactaggtgatagaaagccattaaaattaattggtaaaactaagagaagagacagatgctgtcaccaccaagagacagacaatgaaaagatgatgctatagcttacaaagtcctaatgtgggggtggaaactggtagccaagagaaatttggatcacacaatatataacaatttttaaagatcagttgtaaacatttaaaaatgggaaaatctcttagcaaaatccagacttttattgtttcttgaaaatgtgctatactggcaaccgtaggtccatactgcgtggtggcaattcgctggagccaataggaggcccctcccttttggacttggatttccagtttgccacagacctcacccctccctgttataactctagtttgctggactcatgtaagcttccctccctcatcctattaggcatctgagatccacccttcgcccccaccccaccgactcagactggggcttagaatcttcctgtgtaaaatgaagtgtttacactatcagaatttctcaaactgtttgga

SEQ ID NO: 34110 - DNA, 1183 bp, Homo sapiens
atgagccaccgcgcccggccatggtcagagttttaagccaacagattataatcctggcatagggaatgagggacaaatactcaaaagacggtcgcctagccccaaacaaggattatagagccccaaataaaaaggtttagagggaatatccatgtgtttatgtgtaactgaccctcgtgccagggaaaaactgatcatggcacatatccagaagaggtggaaagccccatgacatgcatctccacactgagttccaatcactacccgcaggcctgggtttcttgtccatgttaaggctaagtatacatctcatctgcctcttccagcttcattaccttcccttcccccatcttttaaaaactcacccctacccaatcccatccatcatccccaactctcctccactgagagttacaagaactttgtaatttggtcagaagcagtaaaaagtgcttgttagttgttgcctctttttcaaaaccgatgtatctaaatccttcagtcttttactagaaagggcccagggactgtcttttgcccctaccttttgtaagtgtggagtgctggctctcagaagcaggggccatctctgcagcgtgtccggttcatagcctggggcttgttggctgcctcccgcccttgttctttgatgattttgccctcccctcatctctgtgggaatcccagccctgggggaaggggcagaagaggaggcagggcaccttcagcaaacacatagtgaatatgagtcaccaccatctaatgacctttccatttgttatcagtttccactacctcagctagtctcaggatgggaaacagccctccacaggtcagagtcattacgtcactcctcagcagcctctctagctcccctgttggtttcaggataggcaagcaggataggagggcgggatcgggggtcttctgcacactggcttccagtcctcttttctcctcctctcatctcctcccaggacctcattccaacgcatactgttcttctctcactcagcccaaacatcaccacccttggaagcctttttagaggtctttgttgatgtggagctagtccctctttcctctgggctctcacagcactctgtgttcacctgagttatagcacttgccacatgatactacgatgattagtttacatatctgtcattcccatcctccttgc

SEQ ID NO: 34111 - DNA, 1061 bp, Homo sapiens
gcatgcctatagtcccagctactggggaggctgaggcaggagaatcccttgaactcaggaggcagaggttgcagtgacccaagattgcaccattgcactccagcctgggcgacaaagtgagactctgtcaaaaaaaaaaaaaaaggacactactttttttctgtgcttaagttttcaaagctctgaataagcaaaaattctaacttcttttaattaccttaacctacaggattaagtgttcttcagactgaaatttttcttaccatttaacatacttctttgctacaaaagcctgattttgttaacagccattgctttctgaaaagcatctcctccctggcatcagtgatgctagactctcctgttcttgccctgtccagtgatattcctttggtacagctctcgctccttctcctgagtaggtattctcaggggctggaactctagcacagtgaacatgtgcttttatagccagataaattcaaatcccggctcatcacttattacgctaagttgctgtacttctctgggcctcattcgctcatttgtaaaatgggaaggaataacaatagtacttaccttaaagagttgttacaggatgaactgagagagcacatatgagttgctcagcacgtgcctgacatgcactggtcctcaggaaaggcagatgatgctctctccaccctatgacttcagctatgaccaacccacttcacatgcagccctgacccttcacctgaattccaatgtgtaaatgacagcctgtttaattttaagcttgaatggtccacagttgcttcaaacacaacacaggtaaaacccaatgaaacaccaccgtctaccctcaacctgaccaccactgtcctggtcacagaggcctccttttgcttctgccctctttctaactcctcagaccatctttgtcctataaaaatgtgagccacgtatgtgatttaaaattctttagtagccatattaaaaaaaaaagtgaaattaattttatttagcccaatatgaaaaaactgatatgtaatcattgtaaatattattgaaatgttttt

SEQ ID NO: 34112 - DNA, 2876 bp, Homo sapiens
ggtcagaaagaaggttaatggaggagtcagcactctaatcctggcagcctggctcctgattctatgctctttaaccacatatgatacttttatgattaagaaaagaaaaacacctagtaattgttattcacaaaaccagggggaggagttattagtcactttacggggtaaaaggaagtagagggcaagaacagctcacagatgactgggagttactggggactgctgagtagtttccacagcttgaagggaatggaggtcaaatgataaggggctgaacacagaactattaattcagggaccaggcagtgactacagaggaatatttagaaaaatttggcagtgtagtcaagacaaggaattgtatcgaaactttcaggggcaggagggttgtttcagagatggttggcactggagcatttccagaaacagaggaggagagttgagaaactagggagagtgaagatgtgcaaagagggtaactgagagggcagaaggggatgagctcaggactgcgctcagaaattggtcaaaagaggagctgataaaccagaactggaggatacagtggtggaaaagcaggaaggaatgaactgctcatacaatacaggtgaatctctcagatattatattgaacaaaaaagccagttatagaagagcatgcactgtcaattccattcgttcattcgagacgaaatctcactctgtcgccaggctggagtgcagtggcgtgatcttggctcactgcaacctccgcttcccaggttcaagtgattctcctgcctcagcctcctgagtagctgggactatgggcatgtgcttccaagcccggctaatttttgtatttttagtagagatggggtttcaccatgttcaccaggctggcctcgaactcctgacctcaggagatccacacaccttggcctcccaaagtgctgggattacaggtgtcagccaccgcgcctggcccaattctattcatataaagttcaggaacaggcaaaatgcatctacagtgatagaaactataagagtacagagtgggtggggatatggatgaagaaagactggctatgagttagttgttaactgctgcagccaggtcacttcaacaattaaactgcatgaggttcattctacttttatatatgtttgaaaattaaaaaaattaaaagtctatagtcctaaacatgtcataacatattatatgataattaacattatcagttatttttatcattatttgtcatgaaagaatggaagacacgttaattattatctacaatttccttctttagatcatgatctaacaagtatgtccaatgtccacagcacaaaggaagcagctgccttttgagggagcatggacaggattaaaaaagccacaatctgggccctctgcccatttcacacaatgctcaggctctgggtcacagacatccaatttttacttgccaggaagcatcattccttggaggtacgcatgaaaaaggaaaggcccaacattgtggtgcagatactcctaactttgacatgccaaaaaatgcaaaataggatacttaatttttctttcttccctcatctcaccttctcccataacacgctagcaaggaaacatgccctcaccaccttttaaacatgtctggatttgaggaaacatgtctgtcaaacatgtctgtactttgaaaaaggtcaaagtctgtggaatttctggggtgaccagcaaggtgaacattttgtgttggccctcatggttaaagtacttgttttgagactcacagtatctaaatgtttatatattttcaaaggggaaaggactgatgatacaagatgttcccaagtcaacttctgacagttctaactcattccctaaattgattagaattctctctctctaaaagcaaacttgataacagcttctttttaaaagtgttacttgagggaaaacatgggacagaaatcaaagcaagccatttaaagtccaaacccaatcagcaacatcaatacaatttacataacatggcacccatacagtacgtttatactttagttcactgagttttgtatttcagaatgtctccagttcatcttaaggagtgacataaaatttctcagaaatattatttcaagttcattaaaatttttctttaaataggtacagaacttttaacatatgtggttgagtcaaacaaaacatgacggagcatcacttacaacaaatgaaaagatgacaccaatttaaatactcatgttactataaacaacttgcttgttaagttttactcactcaaatttaagaatatcacaaaatgagagcatgaagtggaatggagtaggaggattcctgtctgtaatccccctaaaagaacttccacggctaatttcagcctcaggtttcttgggccagacctatttgaaatattctgcttcttttggtatatcagtaactgaccaggccatgggtcccaagcattggctttttaaaactatagtcagcagacttttcacaaatattgacatctacttcacccatgagagtctttaagttgaatcctctatctgatggtgggcacctcatattatattgtgctttatatcttccatatgcaatacacaaagaataagtatgtgctgatttatcatgagtcacatggatggtcttggcaggaagtgacagctttgtcattctttttcataattcaggaaacacaggaacaacatatgccttgggttgggcacagagtgagaactcaataaacacttcatccagtgaaatgatgacacagaaatctgtggcagtgctttagttgagtgataagggcttgaacccaatgtgtgaaagccagaatttatgaaacaaatgagatgatgtcaca

SEQ ID NO: 34113 - DNA, 3596 bp, Homo sapiens
gacagaaagactgaagtacctaaaaagtctgattttacatgtgaactttagcaacacaattttcagctcatctctaaagatttgaacttgtgtgtgggtagcatcatgtgtggaccacaaaagtcaccatctctcctcctcttcccggaacaaacacccacaaactgatggggatgctctgaaggttaaactggatcttctaattgtccaggaacgtatgctatgcaaacaatgttggctccctgtaccaaggcagagctattgtgggacttgaggctgctggctatgaggagaaggatggtggggcacagttctattcactggggcaaagtgggaacccaaaagagggtggctgaaatgttttattatcctaatcttcagaggacaaataattacagaacattctatatcagaacaagagactgttagtctgcatgagggggcagggagagaaaggcagagggcagagataaagaactttcctttttgtgggggcagggaaaggagagaacctaaagggtggactacaattcacttttcgaaggagttttctgtttgtaatatgcttcctttgaagagtggaagttctgggcatttggaagtttggttacagatcaagaaagaaattcctggctttccagagtttggtggctaccaatcaaaggtcaatcagatacaaaaatcagagtagtcctgaaaccataccataggctactgggaagatgtaacatgctttataaaaaaataacaataatctcttgcatgcatttttctcttcagtgaaacacagggatatgagttctttaaaagaagtagcaagaagggcacaaaaaacagaaatcgtgcttggggggataagaagagagggtggaggaagaagtgcagcgtcttttgggatggcagctgttttattcgcaccctctaagagttcctgaaataattaacatgcactgccattcttgtttttccagtggtgatttcatctagtccctacagaaactgagaattaaatgtcatggttttgtgttttggaaagcaaaactctcccccaaacaagggagttctgaatactgctgagagcatgtgagatctgaaaagtctgcagagtgctaatcattaacatgctacttttggaggcaggactgcccctttctttgctatcacatttccttctatttgatcctgccctgtactggtttactttctgtttctcccactcattaccacgcattcttccataacacatgtgaagtccagaatagcctctccctttcggttggccaactcaacacttcccttacaaactctccttaaaaaaaaaaaaatcatctctgacttattttccaaggactttccctcttcccactcccctggaggggaggaggtggggaacaaccaaaccctccatttcttcctgaataatgcaggagaataaagcagaaggtctacagacattacttatagtaaccgcaaataaaaaggtgtctaagaagaatagtctgctaacttagtttggagggagacagatttgggttcgcatcctgcctttgtcatttgctcgtagtgagactatggataggtcgcttaacctttccctaaacctctgtttttttcacctgcaaaatggaactttacattagggtaaaattattattttaagataacagtattaggagttttaataataaaaaagcccttccaaggctgtaaagggaattaaatgagacaaagcatatggagtgcctggaacacagtaagcactcaataaatgtttgctgctactgatgatgatgtaaatcttttgaggaggaatgtcatcctttcccccactgcatatatagtaacacggattcagtgcttctcaaagctaaaatacagtaccaggaggaagggtctgggtacaactgtttgctgattgctgcccccaggaagcacgtctcagaggcagcctgcacgacagagcaaagggcttattttaggagcctccaatcaggacagactggttgatctggatgcctcacctggcaaggcagcctcagccacacgcccatctccacaggctatcggcattcccagtgggatgcaccacagccccagactgagaatttttatccacaacttgttcccctctcctgatctcccttctcccttttggagacctcaaggctggagagaaatgaaaagcaacagctctgcctgacaaataaggtaaggactctgcctctcaggtgctgagtcactggttaggaactgtcccatctacagactctcccagaaatttacacaaaaacacaaagttgggctccaaaccttgggcactctcagaaaggctatgattcaccagggtgtgcttcagaactgaaactctgggtacagaaggtacccactgcccagcctgccaacaacctatcttcctttaaacaacaaaaacggagcagaaagaggaaaaaagcctgaacctttcctaataaggtaataccacatgccatttgtagttttgaattgcttggcacgccaggatcatatgacattcaccgcagctactgcttcatgcttgtgtgaggctctccaggaaaaatgagagagtctttggtgtgcctctgggggattacaaacgaacagggaacatgttctcccagtggaacctcacattttcctgattaaccacacttgcctcacatccctctttcacactgctgcctgcaggcctcttgctttgtgggctcaggcattgtaaaagttctcaggttgctttgtatgcaggttttctctctccaacgaggtgcacgctttttgagggcagaaacactcctttatttcttttgtttcaccctgctatgctcatcacagcgtaattcacccagcagttactcaataaatgcttgatgacagactagtgctgagaattttacagatcagtaggtgatcattttatatcattagcccctaacttacaaatcggcagggtttcaaaagttggtttcaaagaaggtatttatgtagcatattttcccatagaaacagtgttataactggggcttaggtttccaggccctcttatttctcagaatatcctatatctacttacatgcagtcttattgagctctctcatttgcctcagactcacattagactgccagtatatgtgcaggataaactctagttctttcagttacagcaatgctgacttgcacaaatttcctttcccacttattagtcgtattttcatattttatgacactatatgtagcagcaggtaataaattactcatcatatactttaaaaataacactaacaggtaaggagttatttttgctcctcattaaaaaagatgcatgaacttttgtttttccttttacattaaaatatttttcaccagtttttaacctcagttattatttgggccactccagactttcccaaccatttacacacattcaccccctcacccacccacccacgcatccactcatagtctaccaggactgcccatttacatggatacacatacagacacacacacacacacacacacacacacgtgcatatacacacacgttttaaaatgcattctgggccactaaaaatatttat

SEQ ID NO: 34114 - DNA, 2274 bp, Homo sapiens
atcattatacattgtatacatgatcaaaataccacatgtatcccccaaatatgcacaactattatacaacaataaaaaatgttttaagaagttaggggtgaaatccagcacatggaacagcatatacatcccacagtactaatggaggccagagggcatgtggctttgggtgggaggagtgtcaagatctctatggttcctgcgtaggcagtcttctctgtgttggctaactatagtctgagaactattcacctcagtaaacactggtcaagtgcctaactgcatccaaagtactgtgggagacaatacagtgtagccattaagaaaacgaattctggaatcaggtaggcctgggtttgtgttcggactctttcacccattccctgtgtgacctgcgaatatctgttggctgtaattattataatcttggtgcacctcaatttcctcatctacaaaatggacataagaactatatgtacctcaaagagttgctgtgagagttaaatgaaatcatgcaagtatgatgttttgtataataccttatacatagtaagtgtgcaataaatactagtcattgttattcctagaagcttccccaaattattttaaaaagaaggcacctagatctaaatgacagtccatgtaacaaagaaaacccttacttgagcaatttcagtgaaggccatttttcaacaatgctcactcacttccctccactctgggtcccagtcatgtataaaacactctgctttgtgttgactaagctccacagtgacattccaaggagttctggtgtccctccaaatattctaggctgcccttttaacctgatactgataccctgtccactctactgtttaaggggctatttaaaaatttggctttgtaaagcagggagcaaggcagaaagccttcaaagctttagcagttggcgtggcaaggaacagaaaagcagcattttacagtatcaaataccagaagtagccctcataaccactaactttgtagtgctcttccttcactgtggcgaagtgctgagcatgttacatgcattacattactgaaaccaaggccctgtgacgttccagtgagtccaaggtgctagctggtgtgagtacagctgtgggctctaatctatgctttgcttcaaagtccacgcatgcaaatcctgggcaactccctgagtttccaaggcaactcagccaactcatccagaggtaactagcttccaataactgtataagctcactcccatcatttggtaggttggtaggtcaatcagttcaatttatttttatttttatttattttttgctttctctgatatttgaccaaccacgacacctagtggccagtggagcacaaacatgggttgcccgaaaaggctgatggacgggtgatgtgtgtctttagctttaagacacacgttgctcatgaccaggaaaaacctgatggatcgtgttcaaggcaaagaaaccaaggcacagagaaatgaagcgacttgcctaaagtcaaagctaatgtagaactgtgtggaaatactgaaccttagtgttagaactcgtattctgattcagacttggcctaaatttgatcctcagcaagatactttcttcagttattcaacaaacattgactgggcacctcctgagtaaggcactgtgccagatgccggggacatgacagtaagcaaggaggacacgtctcgatccttgcagtcaaataggaggggaagataaacagagaatccacaataacaataccagctaatatgtattaaggactctgcttcaagagtttcatgtacaccaactcgcttcatccttgacttgaaacaatcctataatgggggtgcgattattattcttgctttgaaaatgtgcaggagaacatttaagttgtgggtaacaaacagggctcctatgcctttctaggtctaagtttctgaaataaagttgtgctagatactggaagatttctaagacctctttccagatcagtttcccttcacttctaggattctggggtaaagctgggattagaccttggtcggttttcctgaccaagagtctagtgttccctctctatacactgtgctggtcaatatttatgaataacagctggaagttattgaatgcttactctgtgccacgccctgaatttctcagttcaggcaatcttcttcacaacctatgagacagctttaagatacaaataataactgagtgaaaaatcatgctctaaaatagtttaaaagatttccaagataaacag

SEQ ID NO: 34115 - DNA, 1484 bp, Homo sapiens
aagaatttgcagaaggctgaattgtggcaacttttgcatcttttcctcccccattatctctatcacctcctccaattaaattaagttccaattaattaaaatggcaagcatttattgagtatctaatctattcagtgtcaggcatagttgtaagtattcatatatatatgtgtatatatatatgtatatagtagtatatacacacatatatatgtaattaaaacttatgcctcacagtaaccccaggaggaagataaggtaacttgttcaagtttacataggtagcaagtgtcagagctgggatttaaaccctgccagtcaggctcctgctctctaatactacatgagccccctttttaatactgacaatgaaccttttcccacctttaaaagtaaaaatttaaaacatcattagaaaacattacagaaacacataaagtaaacaaaaaaaaattgtgcttgcttagcaaacagctttcagatttgtcccttagcactcttctacactgccagccatgagcccttcctgtttagaaattttagagaatgccaactctttaattctgtcatttttccaacattcactctgaacttcttccgcattgttttctggtgaaataactaaaaatcctgcatgtagtgtaacagtcaactaaaggcataataaccattagcaaaactgttcctacctattaattccttgcttaacaagggtgggtcacaataataaaaagacaatgaagctgggaactgacaattccagtctttgcagctgtcatgagacagtttaaaaatgaatttacataagtgattgctgggctttttataaacatggtacctgccaggaaacagttccactttctcttccctggactttctgtcctcttgtagattctgattctcgagctttacaatgctttatatgctttcatgttttatatgcttatcaggacaatcttctgtggacagtaaaaggaaacacgtctcttaaagctattagaaaattaacacttgagttatgtgtttctttagtcctaggggtagtgtactcaaacaggcacaggtttcaattctggctctgcagccttgtacaagttactgaagctctcttgagttgtactgtcttctgtaaaatgaactaattatattgccctaatggagttgtaatgccaggtcaacaacagacacacaacaaagttacttcccataatcaaagttgtaaaaagttagtttcaaaaccaagctgcacttttgagattccatttttcatttttatccagtttgtggccattcccaaaggactcctttcaggtgcttctggaaagtgttaccatacaaaagacttctagttctcaagggggaatggagaaatacatgtggattggaaattcaatccaaacaaaacctctctaaaaattttttaaatggtatttgtatccaggaaatcaaggccacaaatcgtttctatgaatgagaactttaca

SEQ ID NO: 34116 - DNA, 847 bp, Homo sapiens
gaaagagagatcaagaataatgttcactgaggatttctgtgtggccggcatggttatgagtgcttcacacctattaactcatttacatttcataacttatctgtgaggtaagtgctattatcacacccgtttcagagatgagtaaactgagacacagccgttaaaaacattcccaagccagaggtggtaagaagcatcacgaggccttgaacctgggcagtgtgaatcttcattactagactgcgatgcctttggggaactcatagacaattttctattgtctatgagttcaggaagtgacccactgaaatttatgttttcaagaaatcatgctggtggcagtgtgcagggtaaaggtcagttaggaagccacaacaacaatccaggtgagaggcatgggggtagggagaagcagacatgcgggcgctttaggaggtggacccaggctttagttgggggcagggtgtccaagctagggagagatgaaggggagggaggcgttcctgatgactcaagggttcagagcttagcaacctgggtggatggaaatgtcttacagaaaacaggcaggaaagcaggttttaaggggacgatgatgagatcagttttcagcaaatgtctatctgaatttgaagagcctgagacaatctacagttgtgtcttaggaaaattctacagactgtgatcttcgtttactgaattcaggtagtcactatttttaccctagttctgccaaaccactttcctcctcctctttcccctttgcactggttacacttaaaatagtttaaaaagcagcagttccaaaaccctaaactttcctcccttcaaaaataacacagtgtgt

SEQ ID NO: 34117 - DNA, 4638 bp, Homo sapiens
tactgagctttttttagatttgggggaaatattaaaattttgtatagctgttttcctgttacaaaaataatgcatgctcattatacaacatttagagaaaatttcaataatttaatgttaacatttattgaatgtggactatgcaccaggcactattccaaatgctatatacatagattagctcatttattcctcacaacacttattgaagcatagattaagtaacttgctcacagtctactcacctagaagtatgagccagaaatcattatgttatgttctaggagtgaaacgaatcaataatttactcaatcaaatgcttcagttgtttcagagcataatgtcataggcaagaaacaattaataatcacactgtaccctttatagttatttaaaattattataaaccacatctctgtgtcccagtggagcaattagtaaaatgagaaatcatctgtggcatgagctaagatcctggttcagcccaattctgtgcacctgacgtgcattaggacaaaaacaagaagctttaaagggtttgttttaaagatggaggctttttttttttttttttttgagacagagtttttgctcttgttgcccaggctggagtgcaatggcacgatctcgattcaccgcaacctccgcctcctgggttcaagtgattctcctgcctcagcatcccgagtagctgggacttcaggcatgcgccatcacgcctggtttattttgtatttttagtagagatggggtttctccatgtgggtcaggctggtcttgaactcccgacctcaggtgatccgcccaccttggcctcccaaagtgctgggattataggtgtgagccacagcgcctggcaagatgaaggcatttaaaaaattttttagattttaggaaatgagtcaacaatgtgatgagtagatttcctgaattaactgaacacccaatctcatgaaagtttacaaataaaacaacgactcacaatcagcctaacacttcttatggcttatctgttggccttggacatcagcacatgcaaaagtaaataaccggatacccttgggtcacatgttttcatactttgattaagaattacacttggttaaagatgaatacttctgttcctggcttaatttcttacctagggctaataaacacaactatttgaaatataaattctctttaaatgtaaaggataatgcaatgtttctgactgtcaaaattactatgcaactgtaactttagcactaaaagcatattaaaactattaatcctttaatcataattattcatattgctgtggtagaaacatcacacatacacacacacaaacacacacacaccagttactttctgtagaatttgaaattgctctatctagcatttccggaaggttcaagctgccaccctgcaatttatccagtagcctgctgcttgaacaagctagataaatatctaataattttgaccatgtactgcgtgttaagtccagtttaagtgttttccaaagacaaagttttcatatactttctgtaaagccctacagatagagaccattattatccccatcttataaatcagactgaaaaaggttaaatagctaatattttcatctaagtctgtctgactccaaagccaacaccccaaatcactgttaaacaagcttctcttccaagttagggctcagaaaaatttacttgctttcacaacttgccttcctaggttaagcttaagctgacataaaactccaaaacaaagcaaaacacaataaatcacataattctaattttaaaaaaaactaatttgatattggctaaccacttcctcaagttttctgaccatgaagccctttgctctcacactttaataaaccaccgatattctctaacaagtgacaacacaaatccacaaatctaattgttagagagctttcaagtaagactggagctttctggacaggaaatttttataattctatttttttcaggctcttgtgaaacacagattcacattttcatatatttctacacaaatctaagtgctgtgtgccctgttgggggttcgatatctagtaaattacatgagttaaatacagcaaaaataggactgcattatttataaggtctaacgacgcagtagacttttcagcattttttggacttaaaccagggctttacggcgctggttaactattagagaaggcaaagggactgaacattttatctgaaagtccttttatcacttaagactctgtaaaatttttgattactttaaaaattgtgtgtgtgaataacgttagtttactagaaaaggggcttgctagtatatataatttggttaaaaaaacaaaaacaaaacaaaacagctccttacttgaatgtgattgttttggcaatagtaaaattcaatcccgtcgttctagcgctgcctgccttcctggttctcctaggtgagggccgccatcctgcgataatttacttcgagagctgcgaagcgctggcaagggtgcagtctggtgactagcacttttaaaaacaaagccaaactccgcttttaaaatagagaaggcacagacgcagaccctgcctctgacgacatccaaaagattcattatacacagcctattcaggcgaagctacaaccgccccaggaaatataaactgtgtcggcaaagacagcaggggggagaggaagtaactgatgggaaggaagctaatcatgtgaagtttgtccaactccacacggtctaataaattcccgtttgtttccgctgggagcagccattaaacgcgccctgacacgtgggcgcaggaacctcccttctacctctggtgttcagagatttccttctcgacccacttgtttgtatacaaccacgcccggcaggatgaccaccagatgaccggccgcagcaatgcctccactcagtcccagttgggcaaagtttcactccactgcggcgacgtgaacaagaatcacggcttccttatcgtgagttatgaatgatttaagccaagtttacaggacacacaaagcgagggacgagtgagtgacgggaggtgctaagtgacagcgttttaaagttagctttaattgatatgccctaattaaaatgaaaaacagaattcaccctgccccacgggataactgtcggggcaataattaaaaaaaaaaaaatcacccaagactaagcctcaacctcccccttaccacttgcaaatacagtctgcagaaaagcagcctcgggtccccactcgggggtccctcgcggggtgcgtcatatgggctctcccctctgcgacccgctatttccctgctagacccccagcgcccagcggattccaaggctgcgctcccgccggctggtcccgggaggtagaaagtaggcagaggggcgtggcgtccctgtcgcccccacatgccagccctcctccaacgcctgacaccaccacaagccacggctgggaacactgggggcctcccaacccggcgcggggcgcacggccgcaggctggcgaggaggcaagcgagctcaaggggagacctttccttccacccccagccctagccccagccacagccgtgggggcggcttcccgcaacctcgggcggccgcccgtcgagggcgcgcgcgccgtttctgcctctgggtctcggtgtcccttggccccttcctccccctccccccggtctccggcgcccagcgcccagaccagtccccgccctccagcaggacactcttccctccttccttccttcctccgctccctccctccatctcgcttcccagcacccgggactcggaggcggcccccgaactcgctggccgacgccccgcgccgcgccccgaccccgcggggacccgactcaccacccgcgcccgccgcttggtactcacccgcctgccggtgcgctgccccgccgtcgccgccgggactcggtctctaagggctcctggagacggctccgacctctcctcctcctcctcctcttgctcctccgggcgccggctccgcctcgctggggtgggcggggcggcggcggccccgggctccttcctccgcgccgggccctgcctcccgcccggacgccctggctgtgctgtcccgggccggggagcccgcgttgtggccccgcaggaggaggggcgaggcctggcctgtggaagctcggtggacgtctggtcgtctttggccatcccccttcctctaattctcatggaggacctgaagttctaggacttgagggcccccactctacgacccgcccccgcgcggggccgccctgactcctcgcaagtttccttcgcgtgcgaacgcctcgcttgcccctgtgccagcggtccccagggctgtgaggatgagcgctgccaaacccctacacgaaagtttggttctgttccagaaactatggaggaaaacacgcatagtaacatttaaagggccctggggccacggagagaagtttcccagaaagtggaggtataactgcggattatagaatttgtagtacatccacccaccatgagcttcccgtccatctgccccgaccccctgaaatttgtttccgaatgtccagtacctggcagagttctgcctaatgaattaatgggatttggttggtcttttctggaagggt

SEQ ID NO: 34118 - DNA, 3229 bp, Homo sapiens
aggagcccagctgaggaggaggggagggtgtccagctccagaggaaaggctgggaattagatggagtaaatctctctcttttccccttccctcatcacacccttcccacacgatccatctagcctccagatatacagaggaggtttggggatttttctccttcacagtcagcagtatccagcatcaaagctcccatttgcagaactcacatgagcaaggctaactaatggcagtctgagcaatgccaggcccttgctcatttccagaactcagccagaaaagctggatattggccttgatatggaatgtactcagataccaagtaattaaatgattcagcagaaacacgctctttgtcagccactcaccttagaccttccctgaagaaaacataggcccctgcggtgtcagaaagaaaagcagcctgtgatatgattagattattggttcacctatagcctatgctattgggttttgactcctacacaggcaactctgtggacctgtaagctaagttaaaaagggcatggaaagtatttactctggcatgttgataacaaacctgttaatttcatctagctttagatactggtgagaatggaaagtgccaagcctgcaacctcagtgactccaatttacacggttcccaaaataaataaaatattttttcagaatatgggggaatctcagaaaatgtaataaaaatgctattttctttcagtgttccagtattacatattttagagtactgaaatcctggcattattgttggtattattcatttatctcagtattttttgagaataaaaatatgaacgatttctgtcttgagactacccagagaattacataccacattaaaattttaaaggtaatagaagtgcattagtttaaagagtgttctgaccacattccttgcctgtttaaatcctccacaggtgtcttattgttattttatttcctatttcctggattactagggaggttgagcacattttcttctatttattagtcatctgcagtcccaataccaatttgggcatggatctacttgcagaggtctttgatagattgtgctggatatttctgtattcctataaatatccttgagctttattctggaatatagttaagttatttggaaacagatttgtcctttcagttctgcttttaagatttgtttagcaggattggagcagttaccactctaggttttttgcctctattgaagcaaaaggggattgtgtgtctattcaatgctccatagatcttgagatttttttcaacctggatggtggaaggagggactcttcttggccctgtatgagcatcaggtactgttccctctaataccttgcacatggttcttctctcagccttgggtagttacttcacctgcaagagcccatcatcactcaccatactcatgctagtttctggattttctttctgtacactctcttctctctggttctctgtcttaggaattctagttgccttaatctcttcttgtctccatcaccttaactcaaggagtccaccagattcttcctgaattccccctctctgctgtggcctggaaactccctcaggggagggtgctgggggagtggtaggatacacctcatctgtttcccatctctcagggatcactgtcctcttgtcacctgatgcacagtgttttgcaaactgtggtttcatttattttacctgtttttaggttgctacgggtaggacggcaaaactagttctttactccatcttgactaaaagtagaagttgcccctgtcactctaaaacatgtgttattcttctttttaacttagtgttatctaatattattgcctgcccccctcatcatgctgtaagctccatgagggaaagtactatgtctgttttgttttctgttgcctccccagcacctataacattgcctgacacatagtagtactcattaaatattgaatgactgcatgaaagctagaccaggatggagatcatgagaaaacttgaatgatgaacaggaaaattgaacagattttgctgagagtggaggctcctattctgaaaccagaagaatgtaggccaagttctattcaattgcaaagtgaggatcttgagcactgcaatgctggtgactttactcaagctagtctgtctgtaaatctgccaaagctcttggcagattaggtcacatttttggaatctgcttggaattcaggaacatggcggtcataatgaatcatgattttgacccttcctcttaatctgattggctctaagcccttaacaaatattaattatgtctcacaatggaattgccaccctgacctcttttcttagactgctaacactggatactgcagtgttcagccctcctatcccataataacgtgcctactcctccttcccaaaaaaggaaaggatagggtactgtttctatcaacatccttaaattatttagtcagtatcctaaagatggacttgacaattgaacaattttcttaaaaacctcacttggtaattgcaaaagcctgtctactgttttttctgactctagtctccaagacagtcctctgaggtacaggaaaaaattttagaaatcacagctacatttaatttttgtcttttccttttgttattatggtaagtcaggtatataatttacaaagacacatatattaggactacatgctcgaagtccttaccgatgaagtatacaataaaaaatgtttggacatcacagatctcatctctgaattccctgtagttaaggctggcttactcttcctgtgaggcacctctaattgtgcctctttcttctgcaaaacaaacaaaacctcaacacctctgaggcttaagtataagaaaacttttgcagcaagctgaagttgaaaagaagggagtttttctatgtagattcaaaatccagtctgcaattgtttgttagtccccacatttatgtagcacattgtaattgtgtactgcactgaatatggctacagggcttccgatttcagaagaacatgagtctgctctcagccaagatttgtatatatttagttctctgtgaagcctctcaggtccactaaattatggacccagaacaagtacgaggccatgaatatttcctaggtgccatgttagcagactgaattgctaaagagattatagaaataacaaactttaaatatatgaagttatttaccatcaaagtagtttacagaag

SEQ ID NO: 34119 - DNA, 1459 bp, Homo sapiens
aagatggtggaaacaagaggaggacttggtttgtatggagaggtcggcagtggataacagtcctatttttaggtgaacataaattctgaagcctgatgcatgtctacgaaacgaataaaccctatttaattgcatagtacaaacaagagtcctacagctgaggctgaaatagctgaggctgaaagagacaactcaagttcaacatacatcacccttccctttgtttttaaaattgctcatgaatattttttaaaagtattggctgggtgtccaccaggtggcaacatttctttaaaaaaaagcccagatttagaagccataccttcttagctacatcaaagtggattcttgagggccacacaaccagagtctagtcaaaatcactgaaagtgcagcccaccctgctgagttcttctcttaatatgcataggtggaggcagttttatgagcaagatccttctgtggcctcttacaagaaggctcatgtgtgtcagtgtgtacctatgtgcatgtactatctaggacttatatcatatcatgaaaagccctttaatcctaaaggtacttagtgcaagcaactgagtaacattggaagccttagataacctctctgagcctctttcttcatctgtagaatgttgtatacgtattagtaccaacttctttggggtgtgagtgtgaacttagataatgcatgcctataatgtatctagcacagtcctgggacaaagtaagcacttaatacatggtagctcttattattatttccacagtgacccttatccccactttccctgctccaagactctattctttgccagccttagttgtgggcagcctgccaggcatgatctaatcagtgaagcacatgagtcatgagaggatgactgactccctttcaggttctcttagtacttggctcctggaaggtgctcctccttgataatccttcctcccaactgcattgacatagatggagtctttctgctattgactggtctgattggacaggcaagccatgaagatggagagggaggaagctcctgaatggaatgtggctgccggaaaatcagccccctcctaatacactgcaatgaattaaattactctctatttagtagcttttcctcatctattggaacatgtacaattgctatctgctatgatcatgtattcccagcctttcaggtgggataggtccaagcactcattttgtttggagcttcacacagtatgaatatagcacagatttacctagggaagaagttgacttgatgctagtgcctgtgattcagccacagggaatatttatacagcaaagccagccagctgtccccactgtatttatcttcttccccctttcctactagctcaggccaccagatacttcactttcttttatcaaagtctaaaatatttgggtgctttaaaaataggttttcagaaatgttaccaatta

SEQ ID NO: 34120 - DNA, 1062 bp, Homo sapiens
aaaccttgaaaagagtggggaaggggtgttagggatatttgcatgtgagtgggggtaatgatgccctctgaatctaagctgcaaagttatagaagttataatatatataatagtaatatattataatatataataacaatgtatgcagacagaggaaaataatggaggagtcagtgggttagagatcttatagaagtcctagaattgtactagtggggtgccagagaaagtgagctaaaatgacaatgaaaatgagtccttggaatctagaggttagaagtggcccattttctggtgatggcaaagggcaggaaatgaccatgcagtgggtggctggagtagtgtggaggaaatgtcagtgaaattgagggttggagtgtgggatgactcacccatgtggaactttcagctacaaatgatgtcatgagttgggtagagaggaagacaatgagaattttttttaaaattaaacttgagaactctttattatgtaagaaacagctataactctcattttcttggttgctaggtgtgctgtccaggatctggaaagaaaagtgcacacaacatctaaatttttctcccagtgggagattctactgctggtattagaatcacaggcagacattactgcacttgtttgggcttggctgaatctctgatcagttacatagttatatatgtctgcattttccctttccttgctggaggtaaatgccttttgaatggtcatagtctctatagagaagtgtgttattaaaaaggaaaaaaaacagcaacagatattttatgatatataatggtttttgttttgcaaaagcctttcacatttatctcatttgatcctcagaacaaacccataaaacagtgagcattttcccatacaagacagaaagaaacagtctcaagttaagcaaaccacagagcttacacatgttatagaaaccagagctgaggcttgaatccaggtattctgcctccctatccagttctctttccaccaaagcatggccccatatctttgtggtaatgttgccatctcagctgcttctaccaaattgt

SEQ ID NO: 34121 - DNA, 999 bp, Homo sapiens
aaaccctgtttaattacaggacagggttgattctgggacagaactttgactaaagcctcatcccaacaaaatcccaattatgccatagtccaatctcccagctagtatgtaacctacattccatcaccaagctgaagaaccggctgaacaagtttattcattactgaaaatggaaacacatttgtaccacagaaaacaccaagatttaggccagctagatgcttctcagagtaagatttggcctctaattttgcccagagatcctacatgagaatctctcaatttgtatttcaaagtaaaggctttctatctccagggtgtgtgtgtttacacatcaagtggaaagatcaagcaagcaccagttccagaacgagccaagaaatctgcccacctcatagtgtagccgccggactttgctcatagctggcaggctggactgcttcccactgatgttccgaaacacctgaaataccatgaagcatagaaacaggaagtagaggcagaggcagattccagccacgatgatgaaggccatctggtcgtgtccagtaaaggaaacaacgggctagccaaggccaagttgagccgggtccaggcccttctccccaggtctgttggcaatacttgttttgtctccaaatatgtagaaaattttcaaggggataaaatattaaaacctgatattctaatgccaatgataggtttcttgacacattagtaccacagagggaggtgttcaatattgctttctaaaccaagtaagaaaagaaatggtgtcttgcttgttagaaatgaagaatctaggccctaccctagacctaatgaatcagaatctaccttttaaccaggtccccaggagatccgtatacacaataaatttgagaagcactaataaaccatatattcgtcactatggatcagatgaaaaaccacagtaaaatcaccagaagggttcaaatgtagatccccaggtccctccctagatatatggaatcagat

SEQ ID NO: 34122 - DNA, 486 bp, Homo sapiens
gtgcccctctctctctctctctctctctgaatgcaattagagaagacagcttcattcacactgtgtctaaaaatagatgatggcagagttcacagactgacagctgcattgtcatacagtaaccaggaaaggaaagggatggctaatttaacttaacaacttccaaaacaaacagtgcagagggagtccaggataaagaaaaaacacacaggtcagttcttcaaagagctggcagagggatggggtcgctccatggcagtttattagtcctcccaaaatcctgacgaaaccagctaagtattttgcccagatctacccagagtccttcagacaagagctctggcagatgaaccgctacagagattcaggcaatattaggcagcagggccaggactttccctgctgacttcttcatacatcccctggacacaagtaagctaagaagagtcatgacgtttttctaggcaagataaataaatgagtttt

SEQ ID NO: 34123 - DNA, 365 bp, Homo sapiens
tgcccagggaagggattacggttgggcttcaaaagaaacaagggaataatgcctgtggacgggtagcagattctctctgcagctctcccgcagctccatgttggctctcagcgctgctgccagccagctaaatgtcagatcacggcaccccaacattccctcactgcatacctccatcgccctggtgactaagctgtttcaacagctgtgttattgctggagtcaggccagtgttattcacacgaagtatttgtttcatacggcttatgtggggaattattgcactcagctttggggttctatttaaagataaggtccttcccttgatcaatcagccaggacattcctcgagttgggctccagga

SEQ ID NO: 34124 - DNA, 3001 bp, Homo sapiens
atccatctaaaatcagacatctgacttattcttagaaatatgagtcaatcaaactttggttatcctgactcagctaaatagcccactgacattagaaaagccaaatggcacatttaactgaaccctttttaatgtggttggagaaataaacagtgagacaaaagtcatgaattctattttcggctaacatactcaaactgactatttgctgcagaaaatagttactacattttaaaacttctattcttccaaaatgaacctaacctttttttctttattttttaccttcttgaaaaacaagtctctcacttctcaggccaaaacgaaaaataactagctgagttcctcagctaagctccaaaaccacattccaaacttaataacagagaagctgaacactttatggtcacaaagtccgcatttttaatgaatgcagtgaacgcctgcctttttaggggcctgcattattttcatcctctcattagtctagtgtttcttctataaagaaaaaaaatcccagaaatactaatattttcataaatatcatggcagtgaacttggagaagcctcaagtgcatctcaagctatactgtgagaatcacaatttttttcacttgaataaattagtccttgagtctcaaaaatgctttccataacttcaaaacctgaagataattcaacattttccgtttttctaatagtgttcaaaagagaaaacacaagtattgcttgagaaagtaaacagacatcctgatattcaaacatggacagttaatgttcccccaataatatatttacagctcagtgcaatgtcctactccagctaaaagtgaattcccaagtgtttctttatatagacagcattatcacgtaaaccaaaagcaaagcttacagctggtagctggtcacctaccatagaatgtgttttcattagctatagtcaaaattttagctacatgggtcacaaattgtgtctagaatcaaaaaaagtttgatctgtctgtaaatttttttaaagtgtgtgggattaagagaaaagagctaaatggaggaagtttaaatcatcttcaacctttgaacaagccacaataacaggtatttgtaatgaaggccttacttagtcacttgcgtggttctagggattaatagagtttgtgtattcaagagggggctggatagattcaggtcaacaaactgagtcatgtttgctcaggtgaaagctaaaaataaccactccccagtattcctaggagagtaatgcaatattacccagctgcctcagcacacattataaatgtctcctccacccacccatagtataaggtttaactgaaaacaagtaggccaaaaactacttctacaccagaccaattcaatgacagaataatttggccaaaactaaatatgcctagtcactgtaaactggttaactcatggttggttaagatagccttgggaatatgcacagaagttataaaaccatgagctattcattgaaaatgcagtccattatgaattcagttctttttactttatcaaacatgaccattttattttgtctgtatttcaatacagtatttttggcctccacttttccactacagcacatgaattgtgaaatgtgattctatataacatttaatgttaaagtgatatgaaatcaataagacttctaacaaattcaaggtgtgaagaaatgtacaaacacaacctgaagtctctatgaaaattcagtggtccctcagttacacacattactatggctcacagtatattgtccaaatttgtcttgagtatctaccatgcactagacactgccggttctggagtaaacctgataggcaccaaccatatggaacgtacaaataacggaggaagcagacaataaataaacaatttcaggaaaaaataattttgatgaatgttatatgtaacctgacattccctgagaaagggcaacagtcagatatttgggaggtgggagaaatgaatacaccagaatgacagaaaaatccagtcatcgttacaacataaccttgaataaaaatgtaagtgaacaatgactaaacctgtagtacttcttttggaagaatattcattgactccagtcagcttcctgttatttcacttcaaatggctatccagtttacaaattactatctagccaaccgctagcatttatcatgcttaaaattgagtcaacattaaatcattagcccctattccttccagaacctgtaatttaagagttagagagagacaagacttggttgcctcttagaaaagttaaaataaaactaaaacaacaggctgacatgacacattgtctccatttaagccaacatagactatttatttctttgctttattatgagtaatgaacatttctttagcaatcacctaggagcattactattatgcaggtaccgtactaactaaagacagagacgaatggcctcccagacccccatttgctcacaggctagtgtgggaggctgagaagttcacaaagaattacaccctgattggaaatttctttgacagaggtttgcacaggatgctccagttgtaaaaagagctgagggtagctttcggcagggcttagccttggaagagagcaggtaatagccaagggagaatgggggatggccaaggagggaaggtgctgaggtagagatagaacatgtgctgggtcatagaatatctaaaacaatcatattttctgcagatatctgtgcttgaatattaaaaattaaaaagagatcatttaacggtgaaaactgtagtactactcttatctctgtgtccacccttgccttttctaatcagtggtataattctactagagtgccttggcctctgctcccaatcatccctgctgtactctatagagcaccataaagaaggaataataaacagagccacacataacaaagaacttttatttggcaggaatgtttccttttatgacacctatctctgccctgtaagtagccacaag

SEQ ID NO: 34125 - DNA, 1982 bp, Homo sapiens
cggaaatatttttttaaaaaacattgaaatcacaaaattaaatagtctatgcaattatttagtattttaaatttcatcagttttaggttctagctcaagggccgtctctccttcattcaatttgttaaatgcctatagtgtgccagctggaggcctcctctgattttccttcagttgacaaaagatccttacttcctttggtgccagtatcacctggtctatgtctttattatagcattctactttatttgcaggcatcacttctgaaccctacaaaattataagctcctaaggggaaggactacatcttattctgccttgtgccactaagcacagaaacttaaacatgcaagtcctccagacctgaactgaactatttattatatggcttttgtgtcataataaacatattaatgtaagttatgctcaatgtaactaacaaaattttatcaaatgcctactaagcatcattttttaaatgccatagtggattaatccttgtcccgcctgtatcaaagtacacttagactggcactcagtgacagtttgggaagaagccagagctgccttccgtgaggtcagtctcccaaggtcacacatgtgctcatcagagactcacttcctacaaatacttatgacggttcttccagatccgtgtcaagcaatatattaaatgaaatactgaattttgaagatcaaaatgaacttttcctaaactataacccaatccacacaagtaatttacacatcaaaagaaattagatagtaggcaaacaaaacaatggtaatttttttaaaaaaaactgctcccaaagggtttgtggccaacattaatattgcaggaacatgtttagataactgctgttcagcatagttcctggaaacaggttctcaaagccaggacttacagttatttaccttcttccagcactgccctgagggttttaaggcctaaatgaatagaaagcaaatgggggacaaaatgaaataaaatgttcacatctcagcctttagtgtatataactaatgtttgaagattttatgacaaaatgtgtcttcttaagaacacatgtagggaagattttggccatttctttaacaccctttaaacagtacctaccagagaaaaagcaaacactcccttctaaaagcatcaatattctacttctgagatcaaaactacaaaacaggctcagacagaaacctgggcaaaggaaccttctgctgcacgtatgtactatttcccagagatgtaaatgatttttttctctctgccccagtgaatcacatatgaaagttctcaaagaattagtaaagaaaaatggtgaaaatcttcttggtgttgaaggaacagtggagtgtagctggtatcagaagttctgaagtgactcagagattcagaagggtgacaggcaggggcagtttttactagaggaaagagcgatgtaggatgaacaatttactgtccctgttgattcacataggatgtaagtacaagagaagtcaaggatgtccccaaatttcttgcataggcagcagatgagtgatgtcattcactaagacaggaatcaaagaaaaatgaatgacatgtcatatcacacgtagaatttgtagaagctggagatgtatagcttgtttaaaaggggggtttagtatggagggttgaagataaaaggtcaaatatgtgaatgactaaatgtggaggaggaattagatttaccctgagtggttccaatcttgcaagttctcaggaaggaaatctgagatcaataaaatcaaactggcccacagttcaccacaccagttgaagaaaatgagctgccggcacctgtgtgagtggaggtgctcctcagttaacacttggtgagtgcaaagaatgcagagggcatttgagcaccgggtagggatggaaaggtgacttttagggtctttgttatcattattattctatgggcattcttcatatataatatttagagctt

SEQ ID NO: 34126 - DNA, 1989 bp, Homo sapiens
agcccctccgtggactccccactccgcaaagtttaacaaagccgtgaagtaaggaaaccgaacctcccgtccgcgcccgctgcaaagttggcattgaagtttgtgccgggatgtcccaaatcttgagggggcggggggcgcgagtgtgcagagaggcgggaggatggatgcagatggggagacagtgaggggaagggagtttttccgagtggacggtccgtgaggcggttttcttcacccggaagcctgtttgactcagagaggtccgggaggtgcacgccaggggaggtctcccggggcgggcgctgtcgccgaggaggccggcgagctgtcacctgcggggggctgtggtgggagctgagggcgctctcctaagcgccaaaagaggacggggacattcacagtcaccggctctcggggctctaagtagtgggggaagggatattcacgagtgggcaggaggccaaaagcaacacctttcggatacgcttttcccctccgacctctccaacttcccgcggcgctggtcaaggactccctcccaccccaccccatcccacccaacctcccggccgacaattcggacctgtccacggcagagcgtggggtggagtgcggcgggaaagcagagggcgcgaaggtcgggaccccaaattgcaaaccctcagcccctagcaaagacgaccaaatgcatttacaaccgtgcaagtatctcagccttgtaacagagctccgggtttgcgccgggcacagttccccgactcttctgttgttcctaataaagtcgattacgttgccctcccggagctgattggaagggaaccgagaggaaaagggggggaacgcgggaaaaagcgggggggggggggggcgagcaatcaactttgtaacccagcgcttcctcgcgcgatccgtcgccatgcttaagattcccacccccgccgcccccctcttgcctttcaagtggatactgaaactaggccaaaactttttcccctccttttctcttagccactagactggattgtgccccacggagccccatggagctctgctttcttaagcacaatagccggactaattagatcatagaagcaaggcagtgatactgtaacaagtagcccaagaggcaaagagggaaggggcccgaaaagacagaaagggggaaaagtttgcagctctccgcacttaccaatcaagcctcccaccagaaaggcgatgatttggaacacgagcagaatcccaccaacaatgcacagcttcttggtgctcatgttttctataattgccccagccatttttgcgccccccctttttcttttctccttgaaataaatgttttagggtgagctttttgctccctcctctcacacactccctccttcctcgcctcctttctgggcgctgcaaaacttcagaggtgctggagcgcggcgaggatgggaccgggacggaaggcgcccgcacggattcccccggcgcagccggctcgggttcccccaatgcccggagctgtgattgtggccgctccgccgcctgtggacgcttaaaggagcagggaagcggatcacatgacgccgcctccctccctttcttcctccctccctctcgcgcttcctccctccctccctccctctcttcctctaccccttgcccaccagttcggggctcagagctctggcgggtgctggcgcctggctcccgagtctggcctgcaacctgtctctccaaggtctgatgccatttaggggttgctgttgatgttaagcgggttccccctgcccagcttctcacaggtttccttttctggtttccgaagtgcgagatttaaatcaccggtggaccgccttgcagacctttaacttacgcgttgactttaggaaatggtccccaccccacccccaactgctagaactctctttaggaaagaggaggagaattttttttaaaaggacccaatagatgcctaagtcaaaacacagagatgcg

SEQ ID NO: 34127 - DNA, 630 bp, Homo sapiens
accaagaaatgaaaccaaactgtttatctattactgtataaaaagctaacccaaaaggtagtggtttaaaacagccatatttttgcccataattctccaatttgggcagagcatggtggtggcagcttatccctgctgtgtggtgctggacagggtgactcacctgggctggagagtctatggtgacttcactcacacgtctggggctccaatgggggtggctggaatgtgaggtatggctgggcttgtttctctttatacagcctctctgtgcatcatggtcaatgaactctttatcaaacagcatcctattaaatcatttgattctcacattaatctctaaggttgtatcttaagaactgaaaaagaaacggagcccttttacttagtcttgttttcccactcaacctgtatttttcttggaacttatatgtatttacatatttctgtatgcaatttatttactttagtttattgtaggtattcttataaactgtcctaattctgcagtacagatacaaagataaatatgtggtttgttacataaatatgttactatttatctatcttaaatcaggctcagggaggtttagtgacttgatcaaggttacatgcctaacgcatgacaga

SEQ ID NO: 34128 - DNA, 614 bp, Homo sapiens
cagagaaattaatgtgattgccacatattaaaagcctgtatcccacatttccattagtatctgatgaggcatgaggtgttgtttctgaggcagcatcagatcctccagagggtggcttggtgttgacctgggtcacctgaaggtctctactggagcatggtagatgggctggagtcagctgtcccctggaatcgtagtttattctctgggcttgaggcaaatcaaagagtctccttggcacaatagtgctggggacttggctgctgccaggtggaatgttctgtttgttttggtccagaatcagcctgagggcgaatccttcctggaaaagatgaaggtgcagatggggagtggccaagcacaccatgtggcaatcctgccagctagtggccacatacggaatgggcctaaacccacccaagatgcgacaggccggggacttaaatactcaggttggcttggagtcagagggcacaagcttcctcacctagctctaggcaggaacggggcggggagacctggagagatgaaatgatgtgttcaaggtattgacaaaatcaggattagaatctggtctgttacatcgcaactctttttagtcatttattaagaat

SEQ ID NO: 34129 - DNA, 818 bp, Homo sapiens
tttgagacctgcctgggtgacagcaagaccccattctcaaatatagaaaaataaataaataaataaataaataaataaataaataaataaaagagatagggtctcactatgttgcccagggtggtcttaaactgctagtctcaagtgatcctcttgctttggcctcctaaagtgctgggattacagggtgtgagccaccatgcccagccttgattacattccttaaacacacagatctgttggcaaagagcagaaggcttactggctcaatacgtttatgtgcaacctctgatcaatttttggctgatcattaagctatgctaatccaggagtgactcatgggaagccagatttaaaaattaaacaaaaataaattttaaaaaggaacctgaacagaaacaacaggagctgcacactgttgtgagatagattctacagaatttatccaggcaagtcattcagcaaatcaaaaaagtagcaacagcaactaaccctggagaggagatgaatccagagttactacaatatattatctaaaatgtccagttaaagaaatgacatgcaaaaaaccaggaaagtgtgaccacacacagaaagaaaaacaatggaaactgtttctgatgggacagatgttagatatggtggagcaaagacttcaaaataactagtatagatatgtttaaataaataaagaaaacaatatttaagaactaaaggaaagcataacaataataaataatcaagtagggaatacaaatcaagagatgaagattatttttaaaatggaatagaaattctgaagttgaaaagtacagtaa

SEQ ID NO: 34130 - DNA, 2384 bp, Homo sapiens
cacattggtctaggttttagaataatgactaagcatttcatatgagtagttatattagaatgatgaggagtgtaaaattgttcaagatgtagcaaagcttaacatgaaggctgggctacggtcctcaaaacctagttcatagagtagtcctgggaattaaatgatgtaaggcattaattaaatgatataagtgcttaattcaatgcctggcataaacgaacaactcaataaatgttagttgctattgttgttaattgctatgacttacttgttagtgcccttatggtaacaactattattgcaaaataattacagaaaagaagggctgatattgggagaaagaggagaggatctggaagtcctgaagaggctgaagaaataatagactgggagtaactgaatgagaatgttggaagaaaggttgcagttagtgaatggagtgtttgaatttaatatttaggagatagaataattccaagtaatgatagaagtatagcaaactgggatggacgtggagtatgtgtgatgtgaaatgggagataggagaagaaggtcattaacactaaggaagccaaaggagtctggagaatcaggtagggtatccgtgtggctttggaacactctcaggatgacagcacaacttagactacaggaggcaatggaaaacactaatgtctttaataaaagaaggaagtacctgaatccttgttggtaggatttccaagactgagagtgtctctggatcctgtcgttttagcagaactactctgtgcactatttatacccttgttggagttctctctaccttctaacttcaggaagtgattttattgtgccagttcccagaaagctgatggggcagtgtattcatgcccaagctggctgtttggaatacatctaatgtacccattcttccagcccaggcaaactgcccttaagagctacttgatccaacatcacgaaatctgttctcattctaatttagaatgcaggaacttgtgtggtgactcatatgtttgaaaagctcaaattaagtagtggtgatctcaaccatgattcactgatgagaactggaaagtgattcatctcctttatgtgcttgtccttgggagtctccaggcttaaaggtcttccagaaacacactgcactcaaggaaagacactgggccctcctgtggtggtattttagcaattacacagaggcattcactacatttttttactaggtcatttcctttagttcattttattcccatctacagtccacaagatgctcttgtgctgtaatgattcactgccgataaatgaaaagtcaatgatacttttaggtcaaaggtgggtgtacatttagtaaaccattggtgcagattcacaattatctaatatgtagggataactgtatttttcttagtatgtacttgttatcaaggagtaacttttttcttaccacagtaacagggtttgaatgtattttatatgatactgtcagaggcgtttaaaccagagcaactccatcttgcataggcgctgggtaaaataagactgagacctactgggctgcattcccaggaagttaagtcactcttagtcacaggatgagataggaggttggcacaagatataggacacaaagaccttgctgataaaacattatgtggtcaagaagcctgccaaaacccaccaaaaccaagatggtgatgaaagtgacctctgctctcctcactgctcattatatgccaattataatgcattagcatgttaacagttactcccaccagtgcagtgacagcagtttacaaatgccatgacaatgtcaagaagttaccctgtatggcttcaaaatgggagaatccctcagttctgggaatggcccacccctttcctggaaaactcatgaataatcaacctcttgtttagcatataatcaagaaataactataagtatctccttagtccagcagcccaagctgctgctctgcctatagggtagccattctttattgctttactttcttaaaacttgctttcactttcctctatgagctcaccccaaattctttcttgtgcaagatccaagaaccctgtcttggggtctggatcaggacccctttctggtaacaataccaagagggaatactaattaaaaaactagtttaaagttaagataacttacactaaaataaaccaaagattcttgtatactggtaatagcactgtgtggaattacaaatccatacccaaacaatctacctgacaaagtaagatcatataatttaaccagattaagtatttttgcatctactatgctgagcaaccagaactaggtaggcactattgctatgaattttcctagtatttgtttaaaaaaattcactatagacctg

SEQ ID NO: 34131 - DNA, 695 bp, Homo sapiens
taaaccaagaacgactgtagaaataatgcagagcaaagagattagacagagattaaaaagatagaatacagaagttgaaattggggagctggtgccaaagaatataatttgagtcaccacgaattacaaaagatgatctcaaggtagatgagctcaccctctgtggctttgcagcctgataagagaagcagagcaagggtgaaagtttgagaaacattgacttaaaagaatgtatttaggaagagtagttcataaaaaagaccttcagcgtgggctagtgtgcaatctctgcctatctctgcccttctgaagcctgtgacatttgactgtggatcatgattaagagaaagaaatggggggaatatgtctcacatacactaaaaatgtccttagagtcacgagagttgcactcagctcattttaacttccacttcctcaaaagtaaataggagagcccatcatggccaaattaatgcatagtactatgcagagccaaggcccttgaccccctggaagttgaaaaattactgacatgaggcaaattaatagaaaaaaaaaggcatataaatttatgtgtttatgagggaagcttcagaacgaagacccaatcacccactgagattcagaagcttatttcccatcttgacaaaacaagttctgggaggtgggagaagagggattctgttgagagacag

SEQ ID NO: 34132 - DNA, 4600 bp, Homo sapiens
caaagaacttgtgagttaagactgtgtgtactattttatagaagaagaaaccaaagttcaaagagttgaatttttaatcacatagctagttaacagaaaatcagttaattggtttatttattcattcatgagctcaataaatatattgagtacttaatatgttcaggctgtgctgtgtgttcagaatacaaatttgagaaagacagaatagagtttatactgtgtcttagtccatacaggctgttataacaaaacaccttagactgtgtgacttataaacaataaacatttatttctcagttctggaggctgaaagtccgatatcaaggtgctagcatggttgggttctggtgagggctctcttccaggttgcagactgctgagtttctgctgtgtcttcaaatggcagaagcaactagctagctctctgggtctcttttataaggacactcatttctttcataagggttctaatcttatgacctaatcacctcccaaaggacccacctttggtattaggaaggtattaggaaataccttcatcctggggttaggagtttaacacataagttttggaaggacataaacattcattcagttcattgcattccacccctgacccctcacattcatgtccttctcatatgtaaaacacgtcattccatcccagtagctccaaggccttaactttttctggcatcaaatcaaaagtctaaactccagagtctactctaaatattaactaaatcagatatgggtgacactcacgtagaatttgtcatgaggcaaattgctctccagctgtgaaatcaaatgtgttacatgcttccaaaatacaatggtgggacaggcatgggttagacatttccattacaaaagaaaaaaaataggaaaggagaaaggggtaacagatccctaagtccaaaactcaacagggcaaaaaacattaaagctggagaatgattttctttaactgtatgttctgccttccatacacgctggtgtgagagttgggtgcccaaggctccaggtgccccagtccctaggctttgctgggaatagcccatgccatagctctcctagctaaagtttcacactggtggcttcaccaggcatttccttggtagggattctctgaaatgacatctctctcagggcctgtgtcttaagactcttcatggtttcatccctcaaaatctaggactatgtagctaggccaccatggctggttcactctgtactctagcacagagaacactctgctgggttgctgcttaagggttattccctgtgccttctggaggggtgggtactgtggtactctgaaatcattttgcccctcaagtcctagtattctgggcctgtgattggagaaacagctgcagtgatcttagaaatgccttcagggttgttctttcattgtcttgatgaatagcacctggcttctttgaaactgctgatccacgctaattttcttatcaaatggtatcttggccataccattgttctatcctaaacaggtcttttgatttgttttcaatagaattaggctgagcattttccgaatttttaagttctgctttccttttgattaacaatccatctttaagtcatttctctcttctctaaccttactataagaacttagaagaagccaagccatgcctcaacactttgctgagaaatttccccaggcaaatatccaattttatctctcacaattttgatattaaaaaaaaactggaacatgaacacaattcagcaaaattcaacctgataacagacacagaaacagaaaggggacctctaaaagaaaatgatatttattttgggaatggacattgcaatgggaatgtacatgccatagtgaactatgcatattcaggaaaataagagaagacaggggttttttaaaggaaaaattaggaggattgccaaattgttttcagatacttacgtttggctacaagaatcagtaacaaagatgatgctggtttgaggtcggacaagcatttgctggacagatgccctctcagaaattttattttgtgtaaagttgagatggctgttgtgaaaggttggagtttttgagtcttttatgatcgttcttgttatcaggtattcatgtctgagaaccctccctttatagcttttttaggctccatttgtcagggtttttaacacgagtgaccccattttgagtctgctaactgtcacaactgtaagcactcaagagaagccaagccacaccttcaacgctttgcttagagattctccagccaaatatccaattttattgctcacaaattctatctttcacaaaacactagaaccaagcagaattcagccaagttatttactatcactttataagaaacacagtctttccttcatggcccaataatatgttcctcatttccatctgagaactcatcagaatggcttttctgtctgtatttccaaagcttctttcacatttttagatatgtgttacagcagtacctccatttctctgtaccatttttctatcctaatcaattagggctgctattaataataaaatactataaactggatgacttataaacaacaactatttgtttctcatagttctggaggctaagaagtataagatcaaggtaattttggtgcctggcaaatgcctatttcctcatagatggtcatcttctcattgaagcctcacgtgaaatgactagctagctctctgagacttttttatacaggcattaataccattcatgaaagctccacccacatgaactaatcacggttcaaagtccacacctcctaataccatctccatggggtttaggttattaacaaataaatgttgaagggacccgaatcttacgtccactgtacactgtaacagaccaagagtttatagcaaactgtttgctttaatgcattccaaagaaaactctcagccaacttttctctttggcaagcaattcttattttgagtaatttatctgcacggatcatatttatttagcctttattttgcctggtactgtgatatcaggaagtaaagaaggcatgtttcttgtcttttgagaggtataggaagaatatatatatatatatatatttacatatatatatatatatatatatttacatatatatatatatatatatatatatatgcaactgaccataaataccaagcagaataaaataagtggtaggcatatttcttacattgtatgtaagaaatattctagatttaatattggaaatattgtaatgtgaaggaggagaagaaatgggagagttgatcatgactgggttatcaggaaaggctttgtggagaaggtgagctgagaaccctgatatatggataaaagctcaaaattatgaagacaaactccagaagaagacatgttatgatgtataaacctacacaatcacagcagtcaaccaagtaactagcaaatatctaacaataagtgattattaaattaatataaaaattaatttattggtgtgtatttaacattgaacaagaagaaggatcaaagtcacaaggttatgaatgttcatgtggtatttgggtagtgagtagtctgaagagtctgaatgatgagttatttggcaaggtttatggacaggtacttatggaagaaagaggaaatgatactcataaaaagcaagtaggaatcaaattgtggaaagccttggctgtttaattgaaacttgaagttaatccatcaggaaaaggcaagcctgtgacttttagcacctagcatctatcacagtgtgttaaacaatagtaaacaataagtgtttgccgagtgaataaataaaaatgtgaaataacaaatgagtaagagagtaacactcatcagtttattcaacaaatatttgttgagcactgctctgtactaagcactgtgctacaaaagcaagaaagaaattatctttgtcctcatacacctccctggctgctgtggcatacacacgtcagtgagcaatgataatggtatatgagatgagcactagagaggtgaaaacgaacgttctttggagcagttcagaaagattttctaacctagtttatgtgaattttcaggtttattttattcttattttttcagggaaaagtggttagtgaaggacaaataacataagaaaatgacctctacgttaaggcataaaatatgagcaagagttacgaagaagaaagaacaaagtgtgcaaagatttaaaagatagaaacgttaagtaaaccattcaaagaaagccacaggaagagctatcctggagacatagaaaagaaagagacaaaagataaacttataaaactgagaagctaaatgccaggaggtcagtgaggtaactaacacagtagttcatgggagaagtgactaaggcagtggcaatgggaatggaagagggggacgtctatttaactgtcatgtactcaatgttcaataaatactacatggcaacaaaatctggggactgattgcttatgtagaataaagtagaaaagtcaggcaaaattgaccctgaggtttaaagtttgtggcattaaattgatttttactatgtaattttacattggaaatacagt

SEQ ID NO: 34133 - DNA, 1051 bp, Homo sapiens
ataaaattttgtaacaaatgccacataatctaccaagccataaaaggttcactgttaggaattcagacaacatattgtgttataacatattgtgctacattttctgggcattcatatactcaatgtgaataaaaatagatatttatctttggagtctaagatatctacaagtcatatagcaaatggagcccattcctttacctctgagtagaattaaatctataattttaaaagctagttgttgccccatcttaaaaatctataagaggagttttctgtcaaatttgtttgggtatataatttctacaagataataacttttttaaaaagttcaacattatactaaactaactaaaattagtttaattaatttaaaattagtttaattttaatttagtaacctggaccaatttctctctcctttagtatgtgacaaggtagacagagcagtggactgagattaaactattcctatttctaccattaatgagctttataacttacctcccctgaatctcagttctgtgacattagaatctgaaggactatttattgttatttatgccacatgttttcaaatgtaaatataaataaatttcctctttattaaaattttcagtaaggttttcaataaaatataaatttaatcttaaatgaaaatacagtagttcccctttatccagaccccccggggatgccagaatcttctgagaggactgaatcctatatagtatacaccatattttttcaatctgataacaagatgactactaagtgactaaggatgggcagcatatacagcatagatatgctgacaaagggatgattcatgtcccaggtcatgagacatgacaggtcacagagggcaggtcagagagggatagcataaaattccatgatgctactcagaatgtgcacaatttaaaacttataaattgtttacatctggaattttccgtttaatattttcggactgcacctgatcacaagtaacccaaattgcagaaagtgaaactgtggataagcgggactactatatagaactctaaca

SEQ ID NO: 34134 - DNA, 2224 bp, Homo sapiens
ctccattcccctccctctctctcttacacacacacacacacacacacacacacgacaatcagaagagcatctggccattcattcatggtacccagatttgtgcttcttggtctttaacaggtttctcaggatgtccccacattcaaacactctgtgtggcatctatcctgatcttcaacttagaaaatatactcattattccttgtaagtagaactctgcacagctgcatacagaagagcgtctcggcagggaacagtgcaggttcacaaaggggccgataaaacatataattttagctttggtaattgcccttgaagattacaataagaggaggaaaataagggccaaagaaacaaaagatttgcccgtgatttgatagctggtttcgtcacatattatgttgcttatcccacagaatgtgggaatcccagaaagcgccccgtttaaatttagaccgtatttttagcagggtccctttaacagagattgcgggaacctgggaaggaactgaactgggctaaccaaaccggtcgaaatgagcacagggattagattagagcacagaaattctggctagcagtctgagaaagggggccaaagccagcccagagaaaagggaggttgcctgggccaaaggctttctgacaggagacacaatagggtcgtacctctgggtcttaccttcactgaggtttctacccgacaggtttaactggccgctcttcctcgctgccttcaacagcccttggggtaccgaggtaccgcagtctcttccacctgctttgaaaccagcgcggagatcctgccccgctatccgcttcaggcgcgacatgttcaaagtcctaggtccagaagctgcagccccacccgtgacgcttaaaggtggcgccgttgggatgccccgctcctttcgtgagcgcgcgctctgggcgctgggctcgcggcctcgcgctgggccttcactctctgcggcgcagtccagatgtcgtcagcaccagcgcctgggctggaggacagagaagccttttccgttgccggtgccggcctagcgtcctggaattacttcaatcaagtaagtgcgtttaacgggcttaagaggggctttcgggtttattgtttgcactgttactgcgactccaaccttctcctctgtgcttccaccgtggcgagggtgtggggaaagagaaccctctcttctcccctctcctagtctgaacgtgggccttgactaaaacttgagatctgggcgcggtcggcagcgtttctggaccccagcctgtgtttgtcgcttgtggtggtggcgccagacctctggcgtacggagtaaaagaaattttctgttcttaaggcttgtactctgacaccattctcgttgtattgagggtatatagcttacccagcaaaggaggtaatgtgaaatggaaggactggcaacatagaagacaaaaacaaaaatccttaaaatttaataaatgttctgtgtatcagacagtttagggagacaagtagtggtacatgctttagtgaagctcagacagcttggatttttgagccctaaaaagcaagttcaaatctcagctgcttctttactttagaaactgttaactttaggcagtttactcaaccgcttttaaagctcattcctttttttcattactttggggataattcctaccgcataaggtttttgaaataagtgaagataaaaactagaatcttgagctctcggtgagtccagaataatagcaaatgaaaattttgttcaatgtaagtcggtgtttcctaggaaattaaaattttcatctgaaatgtacaacttcttgattcaacaagtaattattaagattaatcctgcctagtatgtgtactatcctgggtgctagacttttcttttgcctgaaatgattttgttttaaaagcatatgccagggaataccattctaacccccatcaagtctactgaggattggtagaatagttgaaagctaggatgaaggccctttgatcaattcttcatcacgcacttttacctgagtccaggttattgctacctgtaaaattcggtttttaactctaccctttttgttcttatttctgtggagtcctttacactaatatcgaacaagagaaagttaccaatagttgttaccctactaaaaaagcaaagagtggatttttgtcttttttttttttttttttttgagacaaagtctggtctgtcgc

SEQ ID NO: 34135 - DNA, 1605 bp, Homo sapiens
gatttaatgttaccaaaattcatgtacattgaaaatttcgggacattttatactggtggtggtggggtggcatcttagcttgggtttaaatatcattagtaatcggatagctctgtagatgattatcagtatataaagacatcgtgagcagtatttaataagaagagttgctgaagtgacttttgcaggaggatgaatgctttttttaaaaaaaaagtttatacgtgcctcttcgctcttccaaaaaaaaaagagagaagaaaaagaagaataaaacgagagacgaaggtggataacacctttctctagaccccggtgcctctcatttctcgggctgcaggcgacggctgctgggcctgcgcggggtggagccgacgctgacgcgccctgcgccgcaaagcattgtgggagctcgggcccgctagtgtcgtggttggaggcgaggtggggcggccgtttgttttctcgtggtctcgagctcgcgcgctctcatcccctcccccgcggcgtgcggcggggcggagaaacggcggcggcggcggcggcatcggcagcagtagcagaggctgtagcatcggacaccctcctctctcccgcaatccggttcctcttccccctccttctcactgtttgttgtgtgtttgatgtgttaaagcaggagcgagaacccgagcagcgccatgagcaacactaccgtcgtccccagcactgcaggtccgggccccagcggcgggcccggtggcggaggtggtggtggcggcggaggcggcggcaccgaggtaatccaggtgactaatgtctccccgagcgctagctctgagcagatgcggactctcttcggtttcctaggcaagatcgacgaactgcgcctcttcccgccggagtgagtatcgtccaccatcactgttcctgctaacgccgcctcagcctgggcctaacacacacaatttccttaggcccctgtcgctgcttccccgggccaggctgcttgagtggctggtggctggtggatttacttaagacggttgtgttccaggcctacaaaaaaatgcagagaggcagggccagggctttttggaattaggaaacactggctgttattctcgggaaattttttttttccgccttaaattgtgccaacgtggtcgtttggctttggggacttaacgcaagactaaccgcagtctgtacgtcgtatataggttaaatcccttttttaaaaaactgagtatttgttctttgcgttcttggaagaaaggtaacaaaattattcatgcctgtgttaatttggtgttaaactttgtaggttgttcacttattgttattgctgttatgtggttctggcccagcaatataattcaaagatcatattctttttgacagacgcttagtttagtgtgagcctgattacttaatttgtataatgtcaaaaaacgggttataaaccagagattttcctttgtttgaataatatacagatttgtgatatttcacagttgttcttgagaaggatttttataaatgttgaaatttgaattagagtgtatgactttttatcctttttgtctcacttttattttgaaaattatttctatcgcaagaata

SEQ ID NO: 34136 - DNA, 546 bp, Homo sapiens
ccctagcatatgcctttttttttttttaatatttccatgctttatacacattccactctcgcacagtagaatgcctttacccacctttttaacttctaaaaccctttgagacagctttaataaccaaacaccttgctaagaacctgaataacttttccactcatctgtttcccccaggactttgtaaatacttcagaatgccacagaatattcactggtctctctcccttaagtaggatgacttcctcaatatcaaagttaatggcacatcctgactatgtttctgacacatctagtaggtattcagaacacaaatagacaattcctggcctcatacactctgcctaaagggaatgggcagagttctgagacaatatatgagcagagaaaacttccttgtacttgagctgagatctgaagaatcttaaggagctgtgacaaaaagagggggatatataagtatgaggagtatgagaaaccaaaaagccagcagagctgacacatagaaagccagatggaaagaacaagatgaggaaggagacaagg

SEQ ID NO: 34137 - DNA, 466 bp, Homo sapiens
ttcaaaatattgaactaaatttcctaagtttaactaaaagtagtcctaaaaagcaaataaacttggccgggcgcggtggctcacgcctacagtcaccgtactttggaaagctgaagtgaacatctcacttgaggccaggagttcagaacagcctggccaacatggcaaaaccccgtctctactaaaaatagccgggtgtggtagcgcaccctgtaatccagctgcttgggaagccgaagtagaagaatcgcttgagtccgggtggcagaggttgcagtaagccgagatggcggcattgcactccagcctaggaaacaaaatgagaccctatctcaaaaaaaaaaaaaaagcaaacaaacttgtcgacaatttggtgctagagacaaaaggtcaacaccaactatgccaaaaccaaagatttactttgagctatcattccatttttttttttttttttttgagacag

SEQ ID NO: 34138 - DNA, 2248 bp, Homo sapiens
attattttttagaattaaacaaaaaattcagctgacaaggcaaaaagaaatggtcaatattgactaagataaaattaccataaaaatcataatactatttttagtcacagtcatcaagatgagacattactattagcaattatctacttaaaacaagcaaaaaatcaaatctctactcaaacaaaaatcggctgttgagaagtcactttaactgttctacgtatcaaataccaacaaatttctactgtgtggctttcagaaatctaacattctaagtttactgaaagcagacaaaaaagaaacaacctggtggcaggcaaaatcacaaccagttgcagtcaagatgggatctgtatgtgagcaatgaagggaggagggcaatttatgcgttcaaaatttaaaatgccaaggtagggggaagagagagaaataaagatatatagctccataaacaaagggagaaaaccatgttgggtgggaggcaacctaaaatttctgacagtccagaatcagcaaatcgaaggcctgtctcaaacaaaacagcttctcacgacaaactttgaagtgggcaaggaggatacattcctttgcacccacaagaaccaaccccttgaccactggcacgctattactgagtcgatcatgatttaccgaacggcccggatgatgggcaaaaagaagagtctgctggagggggcctaggattccagaagcctggggaggcacaccctaggctcggggaaggagagaggtggagaggggctagcactcctcaccgtgattatctttctgcccgatattgtgcgtgcggatgagagaggagagtctcctcacatcccccttgaagacgcactcgtgcaccgggtagtgtgcggggcaactgcctccatccgcgacgacagcaacggggttggtgccggccagaagggccggggactgggagttggcagtcacggaggaattgtgcagcggcagagccggggcgccggggggattggaggaggccggagctgccttcagctgtagccggtggtgatggttactgaagatcttatgacaagctttgccgcccttgccaatcctgcttctggtaaaggtaccgccgagggcagccgccgcttcctcatccccgggctccagcaggtccccttcttctttgctgggcttgtggtccctccgcagtgagcggatcttctccccggtcatcgccgccgccaggggcaagggggggaatcgggaggctcaccgctggcgacggagctggcgctgcggcggcacaaggcgattagagcggtggccaagagcctccagcgcagcatgaactcccactgagcccccgagcctgggacaaacgcatctcccggggaagagccggctctcgcctaggcacgaagggacgcgcgctcgctgggggaagctagaactcaggtgcccacgacaccaggatctcagtctcgccgtcgcagccgccgtcgctgccttacaccgaaaaacagggcacggccatcttcctcttgctcctctcgcgagagctcccccaggagtgaagagagagaaaacaccgcgataagtgagccacccgctccctccctcgcaccttctattcccagaatcactaggcgccggcgcctccgaggcagtgtgtttccgcccagagctggagtctcccagctgccagccgaccccgaacccgcactcccgccaaccgcgctttttgtgggcggtcggaaaccacagcctccgttggatatgttcggtgcatgttataaacaaccacttaaaccctccggatctgagcctcccgcagaggaatgcagaatgacgccacggcacgcaggatgtgatgtcaccgagatgcagaggatactcagtcaaccaacatttactgagcatctacttcgtgccgtatgtacgaagctagcaaatatgtacagcaccagtactgattgcagggagcactgtagaagaggaatgaaggccaaacaattaaaagcggaggcggggaggtgggttgcacacaaaaaagggagggacgaattttagtgttgagttgtcaggaaagtcatagaagagtttaggtgctgactttggaaaatgatgggctgtccagcaatcggaaagaggggaggccactcaaatatttattagatgaatgaatttcgggcagatgtcagagttaacatatatgagggtggggacactcaaggagggcaaagaatcgtgtaactgaaatataattgtattagtt

SEQ ID NO: 34139 - DNA, 3860 bp, Homo sapiens
ttaaaagaaaaatattaattaaatatgtattaatatacattagtgttttgaagtctatccattttttcccccagccatacaaagtttggtaggattctaaaagcttgtaggccctcaagcaccactcctctagtgcttaatgggttaaatgtccctaaagctaatttgaaaagcaaattgcctcattctttctcttcatatctttctttcaaactgtaaattttaagagctgtttattccttattctccttgttcttaatttgtttaataaagttttagatctttagcgaatattttgcaacaacagaaatatccccaaatttcctggtgctagaaaacagccacaatagtaagtaggtcaagtctgtattgcttagggaacagggagatttttgttttaaagcagtgattcttctgagagtagggctctgggcgcaggtgagtggtaaacaatcctttttcctgcagggatgttgctgttgtgtaaaagcaaaagcattttgtgtaaggatgttaggctccagtaagtatttcaaagccacattatctttctcattagggggagtttctctctgtactttaaaagaagataatgatgcttgaaaaagctcaagattgactaacttttaggaagctgccagagttgtgcatagacgtcctcactacagtagcttcgttatgtcttacgaacaatttaaccttcacttctagtcatcgtttcgtcatcgtaagcactgggtcattacagagttcagtgtacctaaaacgcaagctgtgactgatgagaatccaagctgcaaactgggcggcttgggcaactgttttcttaaccaccctccacgttgtggcttacgtcttttagcaccgccctcagggcaaaggatggtggtcagaggtaactaccacagtaaaagaaggctatttatgtggtctgtttacagttacccggtttcaacactaagccagctttccgccacgtctcgggcgaacctccggcctgaggtcacagagacgcccgggtggctctcaggagccagcatggcagcctcctcaggacgggtactcaggaatttcgcccgcagggactaacaccacttggacccagggactccagcttcactccgctttgtgcactgggtggggcggtcgcggtgacgtttcaggcaacgcctctgctgtcagccaataaggagcgggagacgcgtcgggcctgcgctcaatgggccgcgctggtcccgccccactgtgatcgtgagactgcagacccgctaataaaatccaccccaacaatcgctgtgtgccgctttagtgcgctcgccgtcggctctacctgcgtgctttagctccttctcgcctgatccttctgtctctcccaaccccggacacccggcttcgactggttatatcttcggtgttcttttcctctcttcttctttcgcggttcagcatgcaggaaaaagacgcctcctcacaaggtttcctgccacacttccaacatttcgccacgcaggcgatccatgtgggccaggatccagagcaatggacctccagggctgtagtgccccccatctcactgtccaccacgttcaagcaaggggcgcctggccagcactcggtgagctgggtctgtctggggctgtccacagttgggcggtaaaagagatacggcttatgaatttgaaaggcatgtaagtaatttataatatgacttataaattaggaaggcaaccgaaagatgtttctacactgtaattcttgcagcacagctttgtatcggatggtccagtgatcgtatttcttttgataagcaggactggaaggagccgtttgtccagcttgccatttagatttggcctgaaattcaggtgattttgacaaatttgcaattaaaaatcgaaggtcataacttttttgagttacctttagcagcataaattttaaagatgtagtacggagtcagcttaaaaaatattaagggtctgataacttgactagaattaagattgtttccagtagctgtatgaatagttattgagtacctactatatgccaaatacgtgctcgtatatatcatgtgtattacatgtattgtctcatctaatcctaacaacaaccctagtctgaaccgaattctcattttttcccaataaagaagctgagatttagggagttaagtaactagccttagactagtaagtattggagatggaattcaaactttagaaacttgaggttgctttaggaaccaactcctaggcactcagctacactatgctatctctaataatgctagtaacaatttagcctattgcgtcatttaagcactgtggcttagtgattaagaacacaactcatgaccgggtgcagtggcttacgcctgtaatcccagcactttgggaggctgaggcgggtggatcacctgaggacaggagttcgagcccagcctggccaacatggtgaaaccccatctctactaaaaataaataaattagctgggcatggtggcgggtaatctcagctactcgggaagctgaggcaggagaatcgcttgaacccaggaggcagaggttgcagtgagccaagatctcaccattgtgctccagcctgggtgacaagagtgaaactccaactcaaacaacaacagaaaaagagaacacaaatcttatagtcaaaggctaggtttgcattctgacaccacttcttctgagctgggggaccttgggcaagttagttaacctatcaaaacctctgactgatcctgtataaatggggataataatagtatctaccacataagttgttgagatgtatttaaggctgtatagtacataataattactcgatggtaatttgttttttcatgatgttcacatttacactatttccatttgatcctcacaacaaccaggtcagaaggcaggacaggtattatgtactttttatagaaaaggaactgacacagagtcatacatgaatgatctgtaaagcctacgaaggagccctctttgttaatcacatagcttttttcccccttttggtggcatacttgatggatcttagagaatttaaaagttgctgagatttgtaagaattagttaaagtctgtaagtccaaagccttgattatgctttggaaaccacttcagtgtgttatataagttgaggaaaatccttacagacagtcccttgttttgtgagatacagttctaaggccatttctacaactggtttagaatactctttactgtattttagaatcaaaatatgtacacagcctctctttctttctttcttttttttttttttttatttttcagagagagtcttactctgtcacccaggctggagtgcagtggtgcgatctcggctcactgcaacctccgcctcccgggttcaagcgattctccggcctcagcctcctaagtagctgggattacaggcgcctgccactgcgcctgactcattttttattttttttagtagagacggggtttcaccatgttggccaggctgctcttgaactcctgacctcgtgattcacccgccttggcctcccaaagtgctgggattacaggtgtgagccacggcgcccggctcacagcctctctttcaaacatgcagttcgtttcttgtgtagggtttaatgaaagtgtagctgcccaagctttggaacttagtgcaaaagtttaccattcaggtgtgatattaataattaaatgtttccaggaagccagcagggatggttaaatccacaaaaactctgcttaatatcttttttttttttttttttttgagacagagtcttgctctcttgcccaggctggagtgcagtggtgcgatcttggcccactgcatcctcca

SEQ ID NO: 34140 - DNA, 967 bp, Homo sapiens
ttttagtaggagatggggtttcaccatgttggccaggctggtcttgaactcctaacttcaggtgatctgcccgcttcggcctcccaatgtgctgggattacaggcgtgagccaccgtgccccgcctttttttttttttttttggagagacgggttcttgccatgttgcccaggctggccttgaactcctggcctcaagcaattctccctattggcctctcaaagtgctggggctacaggtgtgagctaccttgaccacctgactctttagagatttatttagactataaattttggctgtttttattattttttctgacacctacagtagttctgtgaagtagttattctcatcatccccatttcagagatatcttaacttacagaatgacttgctcaagtctaaagtcatgtcaacacccggagtggaacccatgatatgtgggctgtgtgactcatatcactaaaagagatggcttttgctgtcactcaggagaccaaagtccattgcagaatggggattatacagatccttggctcccctccaaatggcacaattcagggaaatgaaattaaatgatatttaaatctgtctatttaagcctcttagagaagatgtgattgataccagataaggagtttatttatttttacttaattttactccatgtaggttcatactagatctattgttgagaagaacttgagaaagggacattttatataaacagaagtaaagttctgatcactcacattctccattctttcttctccccagctcagttctggttctcatcgagtgttgctgtcaggctgcctggaagcaggcataagaggtggaaagctgggcggccttccagtgcaagggtcttttctgggtcactttcacacatttttgtaaactgaaatcaggaatttttgtggtcaaaagagaagactggttactgtcttgtcttcctttagcatct

SEQ ID NO: 34141 - DNA, 2058 bp, Homo sapiens
aaaaaaaaattctattccttttttagcagttaaataagtaatagaattttaactaaacccaggtttatttcaaagtttttgctttttacaatcaaaacctatttgtggctaacttaggtacaacaaataaaaggcttttatgtgaacatgagttgtacattaaattattttccatgttatttccgaatagatacacctatttgtgcacccttcaaaaaaaatctgattaactatctagtcgagtactggctttggcaacaatgtcaaaaagcagagccactaacacacgtgcttctctgctgcaggcatcttaagggctgagtaggcaaaaacacaggcctcttccctccttttcggctctaaggaggcgaaaagcccaattcttgtggagaaatgatccacaaagaaaatgtcagaatttcccaaaccgaagagggtagagcttccggaaaaggggaaaatagtatggaggaaaagtttgagtaaaaatacaaaacaaggtgaactataagaggcaaaaggacgagtgcgagaaagcaatattttccgtgaacaagagtaaagttctgcagagaaaagtcacgtgggggagatccaacaccaagctggcctgactggagaggtttcctatcgctaaaacctggccggggcgggggaggggggtgggggcaaaaaggtaggccatctcgcactctaaaaagagaggctaccttgcggaggtaatgtcgaggaaacgctgaagacatatctagaacaaaggctcccggaaagacctctctcgtgaggagattgggagccttcttcccgccagggaactggcggttcgccgcctcaacccgtcttaaggcacagaaaatcataaaaaaggaaaatgccggacggacctcggaaagcttccactaacaaactccgtcccaattcaggacccttcttgaactcactttttgtcagggcaaatccagtccccgtcactgactcggaaattcttggtcgacatcttgaacgccaccagcacagccacccgcagctatgtcttcacaggaggaaaacgggccggggactttcggcaactcggggctgtccccacactgcctgactcgcgcctactactgtgtcagggtttgataatgagggaactagccaggaattcagcttgtacgttgttgtccagactaagatgcctgtgctactgtttgttagatggaaaagttaaaatacaaatatcttttctagaactaaactcacaggcgccataaggacaacccaggcaggaggccttcgtggcactagaagcctcggagagccccctacaggtgggaggacccaagagtaaagtacttccgcttccttaggtggagctggaaaggtggaggcggaagtgactgatcaattcaggggcgtggggttcgtttagggtaagaggcggctcgggctcttcaagtgtttagagaaattattttaataaggcataaaaattctgttatttcatacacatgggatgtcgtttggaaacctatttttatatatacataaataggtgtaacagataagtaagcaacttatacatgggaaccagctggtaattttaaaactgagacattgtcaacactgtttaaattaccagtgtcttttctgataccatcccattactttcttccacagataacactttcccatatttgggatttattcttttgctttttaaaaatttatgtacgttgttagtccaaactgcaccatttttgtaagcccccctgccattttgcagaccttagtcaaagtgaaacattccacggggttcgggcgtgagaaacaggctgcctcttatactctgctgggagaaagtaccacattccactggaacaagggccagagccgcctcgtcctgggaacaccttatcaacatgttcccaggaagcaggccatggccccccagaccactcccacccaggcctataaatcaccccagcctgtaagaagcaacgggcactggcattaagctggtctcccacctctgtaggtcttatgctggacataaatcctgtatttgttgttaag

SEQ ID NO: 34142 - DNA, 979 bp, Homo sapiens
cacatcatactgtcaaaaacaagtgtatgaactgtgagctcaaaagcccaaaagccttgcagtaatcccaaccacatgtcaagtctcagaaagtgggacggtttctcctttggagttggggaacaaaaaaacactccaaggtgtgcaaagccagcaactctccatgagagatggatgagccttcaatggtttctgctttcaaataattgttcaaatggtctgcaaggtatcttcattagctaaataaataactttgagagcaattttttatttgttcagagcagacttaaagtaactattccaggagtctttactaggtcagaggcttcaagggtaaatttatgttaccttgaaaaacacacatagctttttgggtaaaatgctctttttaaatgagagtatggtatgctgtgccaaaaaaaaaaaaatcgagtaagttgaacctgaaaaaatgagttttcttctttgtgttgttatcctgacatttcattcttggtcactcaggccccaatttgctaatatactcaaagcctgactcacttcacatcatttcattgtttgctcagaacagattgtataaccagcaaagttagaaggtcaagtttatcgattaaaacccacagcaatgaaatatctgttaagccggggtaactgattcccatgtggcttaatccacatagaatttttccagatggagtgattttgataaaaatttgcagtactgtgagatttcaacaaaacaaaaatataaatagatgcattattattttaaaattacagtgctcacattcacaagttgaatgaatacctccacctctacattcttccttccatttctacaggatccacagtagttctcagctctcactcaaaggtggactaacacaataattttccagctggattctctttctcaagtgtttacatcataattgtgttttactcaaacaaaatatctattatgctgcttccgtcttcc

SEQ ID NO: 34143 - DNA, 2705 bp, Homo sapiens
gggggaggaggcagggcgagcggcggcggcggcggctgcaatcccagcagcagcagcagcaacagcaacagcagcagcagaagcagcgcggagcgctgcgccggccgccggctcccgggctcgcgcgcgttgccaagcggccgtttccttagcaaccccgccaggggactggggatggagaagggagggggattaaaaaaataataaaaaaagaaagaaaaaagatagcaagaaaaaaaaaagaaaagcaagacaacgaaaaaaaaaataggaggaactgtatcacaattatgcaaactaagggggaaagagaggcaccttagaatgaaggctctccttactgtcgtaagcgctagagggattctttgctagaaaagtctccgtgtcagggctggggtgaagagagctgaggggcgctttgccttccctcaccggtgcgttttacctctcgaggcaccgtaagtttgaagtcctccaagttgtggtcggcgccatcatgacgccggcgactgtgagttgtttttttgtttattttcttctaatcttgcctgggtggctacgctgcagttagcgagcagccaactagttctctctgcgttttctcgggaataggtagggacggtggcggggcgctgcttttttgcggggacacgaggaggtgcaaggccttgcggcagagcagcttgcgtgtttgtggcggtcggcccgtatggattgcaggacgcccctcttttatctgtgggtgttgacactaagttgtgtgtgtgagtaggggattgtttatggtcaacatggagtgtgtgtgtgatagagagcgtgtcgtgcgcgcgggggcctgtgcacgcgcggcacgcaggcgcgctgggagggacggggcgggtcatgctgggatgtagagtcgggaaaagactgcaatcaagtgttttaattgtgtagagcccaggcggtccagttatgtaagaggcagtttaacccatttgagcctatcaggccgaataatcggcgcatccgagtcaaggcagggcagagttaaggggtttaacgagtcgcagggttgtatttcttaacagcctccacaccgcgttaacaggcttgctcctccgcggtgcagagcggtaacctccgcttccccacgcagcagcccctccgcagctcgccgggctgttttcagccctgccctggcccaaggcagaaggagatactaggcgtggggccacccctactcttttttcttctttccttcttgaactcatttccagattcaagatccttaagcttttccgggccatttgcaaatcaatgcgagaaccgaggctgagtcgttagcagttacaccaatcaatcttgttcagcgaggagtttgggaagcagagcggggaagtgaaaatggaaaataagtaattaaaaaataagctccctccccctcacacactttttcccttcctccaccccatccccctttagcagtgtttgaagaagatattctttgccagatcccagttcttcttttggaggaaatgaagcaaaacctcacacgtccgtaactcgttttccataatgctagcagggtcatttggcaaagcgcaccgaagcaagactctctgcaggggtcagcatccggctgcctccgcagactgagctctttacgaggcaggcagggagtcgttttgcttggtggtagcagtgttcagagtgatttttatcgccatgcacggggatatatggggaaagggaagggttcccatcacctgtgaccacccagactggcttacagacgaatccttaactagcaacacctccctgctgaactggcactccaaggctgggcagctaacggagacatttgcgtcaggagtcactgatgttagtattctgccttaactctcaaaaccgactcggaaactgagagtgcaatagtttcaaccgcattttgaaacatcaataaaatgttagtcatttgcggatgaatgaaaacattttctttaccgtctggtatgctagggaaataattgtgaaatgacagactctcactaatatcgatgccaaatacctaagtaacactgtcatcttgttaactgcatttttctatcttgcgtggcacgctgatggataaagcgtaaaattatctagggcaaacgggggattagaagacttgacatgtcacatacatgggcaaagctatgcagtattatttagcatttcagtagaaacgagctagattctattgaagagacacagaaggtatagcttcctgcattgtgactcagtttagtgctattttaagcagggatgggggtgccagtgttttctagtacaagctatgaaaagcatccttttctgactgctgtttcccagagatctgacatcttcagtgtccacgggggtgggttgggggtggtaggaggagggttttctttgaccagggatggagctatgctgcagttttaatatgtacaacaacccttcaggcttgtaaacggaaactggagccacttcttttaaagacagtttcctttccttatttctagttttttatctcaactaccattcacagatcacacttaactcttggagaacccatctaaagaaagcaatgactgaacttagtgtatagatgtctggattatgggggaaagtatttacaggtacgtcactattatttacagcaagtgcaagaatgtcaggtagggcagcctctccagacc

SEQ ID NO: 34144 - DNA, 522 bp, Homo sapiens
gaaaacacagtttggtgacagcctctgtataaacatcttatctgcatacgcacctccagaaatgaagaataaggaaaaagatgaataagacaaggcaagagggagaaaaagtaaaatgaagtgtgtttcctagctggccccaagtctatataattagcatagttcaattcaattcattcaattttaggggagccttcaaagaggctgtgtgcactatttgtccttttaacaggccatcctgggagagtaagaaattgctgtggctttgccagccagattacacaagcaaggtggcaggaaatgagttgcacaatcctggttagaccaatatctggtttctggtttcgtcactaataggtttgcctcctttcatctcttaaccactcctgttcctccctccaaagtataagctgtaacaacatatatgattttatgattgaattttcatctcagataatatataacaaattgcttacatgcatgaattgtgatattttgataacagaaattaattcttatgtg

SEQ ID NO: 34145 - DNA, 807 bp, Homo sapiens
gcctttctgttgaccaccgcagacatgttttgtttgcaccctgcaatttgaaaaaaaaagaaaaagaaaaagaaaaagaaaacctaaatattcagtttacctcatgatattcagtttacctcatcatcctacacgtgtacgtcttgtcccttcaaatcatctggtcccaataaacatgaatcatgccaacaaataacatattacttttctcttaaagctggaacatattaccactgacttggtagcttagaaaacacacatttattttcttataataacagagtcctgaagtcacactgggctaaggtcaaggtgtcagcagaactgtgttttattctggaaatgataagagataatcgattttcccagcttctagaggatgcttgcattcctttgctcctggcctcatttcagtagttacatcattctgacctttgcctccactgtcacacccccttgtctgactcttactctcctgcttcctataaggactcctgcaattattttgagctcacccagattatcgagagtaatcacaagagccttaaattagctacatctgcaaactccctgttgtcatgtagggtaaattattcacaggctccacagggtttgggagccattatctgcctaaccaaaagagacatgtaggaagggttccagatatttttttaaagagttgaataaaagatttttagttttatgcatatatataaatttcctgttttataaattggttgtataatgtaaatttgaaatttgggtttttcctggctcattttctcatttctttatattgctatgcac

SEQ ID NO: 34146 - DNA, 1019 bp, Homo sapiens
ggggtggggtggctcactctctaggaaccacaaacttaaggttcctagaaagagcagagattttaaatattcagactgtgtatgtatcatgacccagggttgggggcagatggcccggggtggcgggggaaaggagagatggcggagatcttctatcaggctatcctggggaactgctccaggctgaaacaaaccaccagttaggacgaaccgcctttgatgtgaaagctgggaagctagaatgtagtttcgccttatccttagcgggtcggttctaacaattttgtcacccaaactgaaccactcaccgggtcaactgggctgcaagcccttatgagttggagacaagtggcccagccccaacacagtcagacaaatcgctgggcggccatctgctcctgagaccgttgctagagaaacaagacaacatccaagttctccacatcatggttttccgggcgccagccaaggcgctccgggggcgtggttacgtgggcgacgcacggagggggcgggtcagaaacaaccgggcggaggcgcaccccagggcgcatgcgtgctgtgcggcgcggtctcagggaaggtggggctatggcagctgctagggaccctccggaagtatcgctgcgagaagccacccagcgaaaattgcggaggttttccgagctaagaggtaccagagaaggcaccggagttctcctgggcaatgcagagggagggtgcttttacgtgccaggaggtttgctggactgtcacttcccgtttacttctcatctgtaggcctatgacgctccccaggagtagctagctaataatccttttgagttttttattcttttcactgtccctgcttgacatgcttgttgcttactttattcttagtagtatagatattaaaaatgagggcggaggaagaagaagaaaatcttactagtgaagttatgcattgattagctcattaataaaagttgctttaaataaatctaaaagatacgaagcacagtattttgaactttatg

SEQ ID NO: 34147 - DNA, 5083 bp, Homo sapiens
aaaaaagaaaaaggtagcccagatgagaattttccatggtggatataagaacatagaggttgtttttgttttgtttttttttttttcaacatgacgttacggaaagagcaggttttggaatatgcagctcgaggtgtgagtcccagctctatcatgtgggagccacatggccttgggcaaggcagtcaacctcttgatgctgtttcctcatctgaaatctgggatcccactcagagttacgtgctagagacgtggcaagcaccaagcacagaacttagcaaacacatgatcttgtatatagtagacatcattattgttttcccctctattcttcttttcaatttctgaatcataaggattgcctgagcctaggagatcaaggccagccttggcaacatggcgaaatgccatctctacaaaaaaaaaaaaaaaaattatctaggtgtggtggcaagcaccagtggtcccagctactcagaaggctgaggtgggaggattgcttgagcccaggagatcaggatgcagtgagccatgatcctgccactgcaccactccagcctgggtgacagagtgagaccctgtctcaaaaaaaaaaaaaaaagcagcagactagagaagtcattaaaatgttatgaaaaaaatatactctatagttctataatcatctttaatataacgatatttacagaactctggttatcaaaacaagctcttattctcaaagaattcggtctagaagatgacttaaacaaaacattaatactaaatattggttgttatgcaatgcgtatttttctgaaccttaactgtacatgaagtggtgtgttaaactcagagaacacaaagagcaagaagaaaatgccccaccctgcccctagcttctgtaagctgggtgctctctctctctctctcacacctacacacatagcctatgagatgcttgctttttccattttcgatatctacctacttcctacatatttctttcactcacatctcatgattaccataaaaaaactgttgtaataataaaagtaaaattactctgaaataggatctgtatctttccccccccacattttggcattggctaagttgggagaaaggaataaaggaagatgactcatcctactggatttggaagactcatctgctttgcccagtactatctgactacattatcctatcaggcttgaaagtgatggggcatggcctgaccacactatctcctactttgcttctgttgatcttatctcccactgagcctttagcattctgattcatcaggctccaacctgcactcattgcctttgaactcacctatccacgggatcatcatatgcttcataacgatgaagcctgtcaaaggagattacacaaagaataaaataacgtggcatactgatggcaaataggataatacttaaaatcctgtaataccggatttcttctaaaaagcataagtcttccacctccattgacttaactgttttcagaacaggtagagaagttatttaaactattattttatgcagaagtaaaaataaaatcgccatccattttatggatgagaaaacatcacaagaggttaagagacttggtcagggtcacacagaagcaaagctagaacccaagtcctgtaattaaatggtgttagctgatttttttctttaccatccttttcatctcaccctttgagatgctggcatataagaccctttacttcgtagaaataaactttacaatagtgatagtgagacagattgagctagaaaatgtgaaatcaaactaacctgcaggtagaatcgcatattttatgactaaggcatctgcttagagtttgaaatttctcaaatgcccactaagtcagggaatgcagcagaaatacaaaggacatgattctatttttaaaaatgtataaaaaaaaattactccctagcatcggatccttgtgaacaggacaggcctttccattgcttgtgctttttaattaaactatacttcaaataggccttcctgtttatcaaatataaacttttaaaaattaagagtcccttggtttaatttttggtttaattttacctctgaaaggttgccaatatgccttacaaatctaggaaatagaaaatctaaaatccctcttccaacagtgatctttttcctggctatgcttgtatccatttgatttaaacgaaaattaaaggaattgggaaaatgttaggagtatattttaacataggatgaacagatcaagtcacaaagccagagcaaaggaacattatgagacaagagcaaaagtaaaattaaataagaattctggcaagaattttaaaaactgaaaacttagaaaaaaaatcaatcattacaaattgttctgctgctaatacacaatgactcatgtaagcatatggtttattattaacccagaaatgtaaaaaaggcaagaattacaagtggtcagagaaagtctcttcctggctgtgtgatcttatcaggtcacttctgttcacttgagataggacggggtaagaagaggggaggagtttaataatttcggactcctccaggttccatgatcgtatggaacagggcagtctgttccctaatgctggaggagtagagcttggagagatttgctgctgaactcgctgcgctaaccagacacgtaatcacagtggcttcagagggactcgcacaacaatttccattagctacggacaagcattccaaactttagcctttaggtttaatcattgacacaccttccctggtcactgagtctcctctagaaactcagtataaacatccaacgatgtgttaacagggtgttttgtaattttcttttgaagattattctaggtggtgggcgtcacagggtcaataaaactatacatttctctcaaagactgcaatcctgatggcaaagctggaggaagctccgggaaacctgtaattgtgggaatccaagacaaaaaatcccccacagctgggctgtgggaaggggccctacctaggagaagaaatcaaatcccctacagctgggctgtgcgaaggggcactacctaggagaagaaatcccctacagctgggctgtgggaaggagccctacctaggagaaatcccctacagctgacaggtgggctgtgggaaggggccctacctaggagaagaaatcaaatcccctacagctgggctgtgcgaaggggcactacctaggagaagaaatcccccacagctgggctgtgggaaggagccctacctaggagaaatcccctacagctgacaggtgggctgtgggaaggggccctacctaggagaagaaatcaaatccctacagctgggctgtgcgaaggggccctacctaggagaagaaatcccctacagctgggctgtgggaaggggccctacctaggacaaatcctctacagctgagagctgggctgtgggaaggggccctggacagaccgctgggcgctgctgcaggaatccccaaacccaggcactggctgcagggaaaaatcaagcgggtgactggcggggggggggggggggggtgcagcgtggggctgggggacagggagtgcggggggcggaggctgggcaggggtagtgccaacggacacctcatggtgtggtagcctaaactcagagcctaaacgcaggaccagggctaggagcccaggaccagaaggcaaaacttcctacctgatttatggatgggaacttgcagcccctggaggggaatggcttcggtctggagctctacgcactagttctctgggaggacagagggcaggaaaggggtgcagccaaaatcaaactcggttccacttggacgagcagtggggagattcgctgtctaaacaactaaggagagtttttaaaaccacttaccagaatctagagtgggaattaaaatctgcgtgggcttcttcagattccacagaaatgaggactgccacaccttctccaacttttgcaggctccacccaggatgtgcgcctcgctccacccaggatgtgcgcctctctccacccctaggcgaaggcactagaatttcccaaattaagaacgaagaggaagtttggaccttttcggccaccgctcgcttcaatatggctgcccccagggagagacgaggctaccatgaaggagccgagcgcagaccctgagtccgtcacccatggatcgcagcgcggagttcaggaaatggaaggcgcaatgtttgagcaaagcggacctcagccggaagggcagtgttgacgaggatgtggtagagcttgtgcagtttctgaacatgcgagatcagtttttcaccaccagctcctgcgctggccgcatcctactccttgaccgggtgaggcccctttgcgcctgtccatcgcctgccttctagtgcgaaacttcaggagccctgttcccatccagtgacgaccggatccagcatgtctgtgtttgctcctctgaggggtggtctctgtttctttatatgtgaaatttaggggattagatcagtgcttctaaaagtttaacgtggctattaatcagctgagcatcttttaaaatacagatcccgattctttaagtgtagggtagggcctgatactgtgcatttctaacaagtgcccaaatgatgttgaaactgctgacctgggaactatcttgtgtggcaaagtttagaaaatttgattttattatatgaatactaagggaatctaaagactttgtagcttgctaaggtattgaatgccggaatccgctcatcaacagctctggcaaatcattgttactgcatgcttgaacatcaccagtgttaaggagtttactgcctcctagtgagcccctccattattacaactctagtagttttacgcagagaaaagtacgatcgtatataatttaggatggttagacttttttttttaactttatgatgggtttacaggggtagtaaatgcattttgacttacattttccacttatgacggatttattgggatgtaaccccatcataaatcaagaagcagctgtacaagccatacctccttatttgcaggttcagttaccccagtcaacagcagtc

SEQ ID NO: 34148 - DNA, 1068 bp, Homo sapiens
tatttttcctgatgttaggagtttgatcaaagtcatttttaagcatagtccgtattggctagacgaaaaatttttttaaaaaccttaatagcttttagggttatatatgtttctgtagtttgtggagccaaacagatgatctggttacccacagtatcaaaatgtaacaagttttattttcttacagcattccatggcaatagattctggtttcaggaactctggcataacggtgggaaagagaggaaaaactatgttggtaagatattttgtcaaagagtaatttttttagtgtaaagtgatccagaaattgaataacctaattagactcctgcctttaatgtctcctttctcaaatcttcttgccattctcttactcataaaccctcagtgacttactccttcctacagggcaaagtccagagtttggatttacagttgaggtcttatttaataatattcttctccacttacttttaacctgattcttaactctgccctcctcatcctaagtaggcaaggccccaaagcactatgacatcatggaaagagtcacagagagagttcaaagtcccctttactgatacctgctggatcacagctgtgtgaatttgggcaagctcctcagtccctcagggtttgaattttctcagcagtatcagtggtccagctaactactgtcgtagggccacattcagcccacatggggcaggatcccactatactcatttgattacttattgtctgaggttgcttttgtgagacaatggcaaactttagtagttgtgacagatactatatgccttgcaaagtcaaaaatgtttactatctatccttttagagaaaagatttgctgacctttcgactagatgatctttaagacttgctttctttttgagtccttctctagccaagctagcccttagatatttctccctattctgatctcctgtgatatttactgtttggcatggcatgtttttgaactatttgagattaccctccttctaccttcctatattctcctattttctatttttaacaataacctatttcccaaataggggt

SEQ ID NO: 34149 - DNA, 2841 bp, Homo sapiens
gctctttatcccttttccgaattttcctggtactttcactttgaatatagcgcttaattaacattctgccttgtacctaggactaacacactataaattcccagaagacaaagtaggggaatacaataacaggatatagaattttaacagctaaattagatgaatttatgggtgacctttattgggcaaaagaaaatgttaagttagtataagatttagtataagctaccatctcaaaactcagggtctcactggaagagaaagtgactccaggtagaattcctcagggagacattcacttccatcattcgctgaaccaggagctttggacagcctcggattgcacccgcatatccaaggacaccacatcagcggacaagtcataaacagccttgggaatacgcggaaaggtcaaatttacctaaacaattaaattctcttttaaattttaaggaaacacaagtatgctttcgctttaggtagggcatttgagagcaaaatgtactaatactttgaatccgccaagcagacacgatctgggtttgaccgttctctccgggtaaaggtgaaggctgaccacgggggccgctctccctccaggccccagccacgccctctaacccaggttcccgtcctgcaccgcgccgcaagtccccccaccgttcagcgcaaccgggccctcccagccccgccgccgtccccctcccccgccctggctctctttccgcgctgcggtcagcctcggcgtcccacagagagggccagaggtggaaacgcagaaaaccaaaccaggactatcagagattgcccggagaggggatgcgacccctccccaggtcgcagcgacggcgcacgcaagggtcacggagcatgcgttggctacccggcgccggggaccgctgccaccccgcctagcgcagcgccccgtccttccgcagcccaaccgcctcttcccgccccgccccatcccgcccacgggctccagtgggcgggaccagaggagtcccgcgttcggggagtatgtcaaggccgtgacccgtgtattattgtccgagtggccggaacgggagccaacatggcagcggggttcgggcgatgctgcagggtgagagggagcccagcggtgcggtggggctggaacatgggtattgtggtgtcggagcagggggccctgggccaaaaataggtgcggccgggaggagtgggaagtcgggctgaggaaggagccagcctaggggcccccaacctgctttcacgcctcctaccaccggacggaacgtagcctagcgtttcattttccgtatcctcccgtcaggcgaccccgttatagccggcatcctctctttagaatatcgtttttctttctctggtaaaccctccaaatatttaccgcgggaatcccacctttttccaaagtgaccccgtctctgtgtcagaaccacgggaaaaagaaaaatggagcagctactccttgaaatacttaatgtttaataagcttttcgttgtaacgtttccacgttgcttacgggaaaaaaaaaagtaaaaaaaaaacctgcagaattttatgtgaacttgtgtgtatattctagtattggatcttaatagattctaaataagtttgtcactagatgaattttggtatcttaaatattcttgatatgttcacaccactgccatttagatgtcacttaaaattaagttaaagttatgtcttggaccaaaaaagctgcggttttagaataatcctaaagaattgctgcccatgttttgctggtgttatgcaagttaatgtgcagtgaaggcagaaattgggagatttcagctatttttaactcctacaccagaaaagcagatttctcaacctccaaggaaggatctaaaaaaaacctgatatagaaaacttacaccctttttctcttctttaacccataaaactgacactcttatattcccaagaaatgcacaaaagtgttcaattctagtggtgctgtttcgatatttggaatttcattgttctagacagagagcccgaagtaataaaaccaatagttatatagcattaggctttcaaaacattatcgtactttaatcgtccgaaaatacgcagtgagattagtcccattttttggttttgaacggaagctataagcagtttgtaaacctgtctacggccacaaatatggttgtggaacctagattcacattcagcaattataactccagatcccgtgctgtttctgttttctatttgcaaaccacctctctaattaactggctaactttgttatgtaattaacaggttgatgggcattgtattctggtaatagcaacctttgcactttgttctatgtaacatattttcctgaacagtcacatgtgaagtgactttttccctatttaaattccctcggttggccaggtgcggcggctcacggttgtgatcctagcaccttgggaggcctcggcgggttgatcacttaaggccaggagttcgagaccagcctggccaaagcagggaaaccctgtctttactaaaaataggaaaaattagctgggcatggtagcatatgcctgtaatcccaggaggctgagtctgcagtgagcggagatctctccaccgcactctagcctgggtgacagagggagactctgtcaaaaaaaaaaaaaagtccctcagtagaccatttaacctggtttgagttctgacttttgtgcatggtatttaaaaacgcatttataatagagtcaggttttttgttctgatttttgtggaatgttttcctttgttatggaacctagtgaccaattaggatactaacagaaagatcagtatagcaaggt

SEQ ID NO: 34150 - DNA, 2044 bp, Homo sapiens
gctgaaccaatttagggaggaattcagtttatggtttgactctgaaacaaaattgataatatccctttcccaaaaagaccgcttttttgcctggggaccagtctgcctttgcagaaccaacagattagctacaagattagaaattacagtttagaggtcatgcagcctctggctccaagtttctgaacctccccaaattgctcctggggataacatcactattgtaaaacctaagataagttcttgagatattttgcagaccctgctctccatggatcagttgaaaccacccagattggtaatttggctcaaccagttctgccatcctacccaggaacagaaaacagcaagaaaaactcacgtctacccactatgagtccatctccaacctgacccatcagcactccctacttcccaagcccctaatcgccgaattatctttaaaaactctgaatactgcttggggagactccattgcaagtcccctgtcttgataaatgggctatcggtcagcagcaggcaaagtgaaccacaatattgggtggttacactcctaggatcaagcaatcctgctgtccggcttcccaaagtgctgggattacaggcgtaagccaccgcgtccagctagaacaaatgatttcttaaaagcaactcagatatttaaatattatttaaaactgtttctagacaaatcggagtgactatgggacaagcatatggtcgcaggactttggacgcaggcagtgaggacacctatgagcgatcagtggggtcctacggcagccgtggaactgctctgccttgcaggcgaaagtgtggtcagctatatcggagcgcgatgggggcctgagaggcgcatctgcgcaggcgcccggctcctaagtctacccaggaactgaccctgctctctcctttccctgttagacatggtaagtgtgagtttagcgctgctgtccggatgggttggtagcagacagggtggagtagggttaagcacactggtcaccttaggattggtttcctggtgctggagaatggttaggacacaggccttggaaggttttttgagtgtgaaatattactcagcgttttctgcagacctcgcgggcaatgccgcttctaattttatccaggccttcttctgtagggagggcctgttaagagttgagcagcccgatttctgaacccctctaaaaagctgtggctgattggtggcttttttttttcttggagagggggtgtcaaagatttctttaaaatcgttagtgatgtggtctcgctttaagatttttaatgggatcagaagaaaattcggtacttaatcacttccggtaatcttcatgacctgttatagtgactgcagtgtactctcaatgaggaagatatagatacgaaaagaactagagccgcatcacatggggacttctgcaaatacagagactcggattaaaggtggagaagatggagctaaaggaactgcttatttaatacatttgaacaacttttggggtacttagaaggtgctttgaaacctgcatttgattaagcaagaattcgcttgcaagttaagggttagatttttttattttttaaaaatatgctttctgccacatgtaaaccgtaagttgtcctgaaatgataagctttgatattctatggtgtttattttttacttatctttttgaatgaaaagtgaacaacaagaaatgctggtggtaattttttgggtcaatgatgagttggcatgtattctgaatctaaagttgattattactactttagctctagaattactctgagacctgaaaattacctgaatcgtgactaagacgaagcctgaatgatttaagttcttttttgttggatacaatttgttgttgttgttgttgttttggttttgtttttgagtcggtctccggtcgcccaggatggagtgcagtgacacaacctcagttcactgcagccttaatttccctggctcaagcgatcttctacctcagcctccctagttagttacaatttttaaatggaacgttttcctatt

SEQ ID NO: 34151 - DNA, 405 bp, Homo sapiens
acctcagcctcccaaaatgttggaattataggcaagagctactgtgcctggtcaatttgctgttatttttgacaaaggaattttcttgggaagtaaaggcacttcagatttagctttcctcctgactaccctaaagtgaaagttaagcttgaactcaatttaaagtggtagttgtgcagtgtttgtttttagatgactcatgtatgatttggtaacacctgccttgatttgatctatttttattgtaggagaaattgacacaagattctctttttgtgcggtggcaactttggctttgttggtaagctttgaatatttgattgaaatgattaaagttcatgaatactctggaattttttttttttttgagtctgatctgctgaatactctggaatttaacaggca

SEQ ID NO: 34152 - DNA, 492 bp, Homo sapiens
ccagatgtcactgctttggatgatatttttgaatgaaaaatatcttaaatacttaacagtttttacttatgaatagcatattttacatagaaaaatgcaatgcagtttaatagaacaggaaatggccactttatatagataattagtatttgtattagtttttttttttctttcttttttgagacagagtctcactctgttatctaagctggagtgcagtggtgtgatcatagtttactttagccttgacctccctggcttgtgcaatcttcctacctcagccgcctgagtagccaagaccacaggcatgcgctaccacacccaactaatttttaagttttttgtagagatggggaattgtctttttgcccaggcttgtcttgaactcctgggctcaagcaatcctcctatcttggcctcctgaagtgctgagtttatgggtgtgagtcactgtgcctggcctgtattagttttctaaggctgtgtaacaaa

SEQ ID NO: 34153 - DNA, 1307 bp, Homo sapiens
aaaaaacaaaaacaaaaaacaaaaaaacaccagaagctgtcttgcccttaagtgaaatgtagcacacaggaagaggtccacccagggctgcgatccagagcttgctggagagggcatgatcatggctcactggatggtagagaagttactgtggtgctctgtggtgggactttctggaaatccaccctctggaacttccataaatccgctctctaagacaccaactgtttatgggagtatgttgccagatgcatgctgctacaaaacctcctgagagggtgcaggggagggaagcttctggctatcaggtgctgctgactgggagcctcccaagaggaacacactggaatcaggaagaaaagccctgtcccactgcgcccagtgcccactattgacaaagtgaaacatcaggccatctggcaaagaaaaagatattcagagggctcattgaggatggactttgaaagagcaaataatgaaggatagggcatgtaacagtccaactgataatagtcacagggaatttagtctgttcacaacgttaatagtttttattttatgctacaattactaaactcataaatagaataataagacttgaagttcaacttaaaggcttaaagaaaactgaattttaaaattatgactgatttacataaactaattttaatttaaaacctaggtaactataaacaaaaccaagttctttctacactcaaaatctatccttggttattaatagttcatattgacactggggtcttacttattctgaaaaattctgtaagtgtatagagtaagaaaaaaatgaagtgaatatataaagaataagaatgtagcaaggaagagaaaacagaaaagcaattatgagagtggtaaggagactctggcagagttttgagcaaaaaggcttaggaagcagccaagggtgtgaaaaaactggagaagaacaaggaggatttataaataagtgcttctgtattttgaattggattccttttactgtctcttaggagatgcaagtaaaaattggaagtgcagtactttttagtcattttttgttgctgaattgtgttttggtacatgagacattatggtgaaaccaagtgatgtgaaaaactggagcttatttggatctcacctaaacaatgaagtctgacaaataatctatttgaaatcaaaaatgctgccaaagcccttccaagatgatgacatcaccagcctggctgaaaagatggctgcaccagagggccacatcatctacagtctgcgtccaaggtgtggcctctggcccctcacatgtacac

SEQ ID NO: 34154 - DNA, 996 bp, Homo sapiens
ggagtgaaggcagttgtgtctgggcagtctgcctaagagtttccattacataaacagtaggtgcttaataacttgcattgtgcacataaaagggaaaaagaagaaaatgtgatttttcactgctacagagtaaaccattctgtggccccagaggatgcatcatgtttagcaagattaaagcaggtggcaaagtccctccccagtgggtacatcacagctaatgtccatcaatgattagcaaatgagtagacggtgcctttgtcaataatcctgtttctaccctcatgctttatttatttagctaatggctgcctagctggtagctcatcaagatggtgtttactgagcttggcaaagtgaaaaattatgattttgtttactcatgtgtttccagctggggtgctgagttgttatccaggcagctgatgaccgttcttccactctcagagcccctaacacaggcagttcagtaaacaaaccatcagcttgagaaccagagcatcaacactgccacaatctggttatttgctactttgcagtcgtcagtgtccagaacctcaaatgatgactcattctggaacctcccttatacttagataataaaacaaatagaagtcaggttaagtgtaattggtttagtttgagctattcagttgtttatgagaaaaatgagtatttgctccaaattaaatatttgatttgggatagttttgtctcttgctctatactcaagcatgtaaaaatagaatggaaacccaaacagaaaacctgggagagactatcactctggaatggttctcacacatgcactaactaatttagttatttgtacagcaaatatatagtgagtacctactgtgtattaggtcctggggatattgtggtgacttaaacccaacacaaacatgaacctagttcttcagaaccttgcaactttgtaggaaagagagacattgaatcagtgattgtcaatatgatgagaattataaagggaga

SEQ ID NO: 34155 - DNA, 1057 bp, Homo sapiens
agtgtataacagtcaaatgcagctgttacataaaccaggtagtttattggttcatccatgctataaaaatattactgacatttcatctggtcaaccatcttaaaggttaattcttgtttcctctttcagattttattctaggtgaactgttctgggcagattctatttaccaattctgagcaaaccacaaactgtttcatcgctcactcttactgttaagaacatattgacttgctgcctgctctgctgtttaattcatttatgctgagagtcaggcatgaagacagaattttaaatgtgacattcgcagactgttaggtcatttaagctctgacaacactagggaattcctgacatataaactggacctgattaccaagcacagacgagcttcccaaaggtgtaaatttctgatcattttttgtaatttctcacagaattgcaatattaaattttaatgtcaatgaaaaatatatatagccaacattttaaagtaaaagcctctgtttcttttaataaagttctaactggcacttctaatcaatacatatcagctaaataaaaattattttgatggaaaaaggcatatggaaaaactcacaataacaatcaacattcataacaattctgagaaactctgccatttaagggctttaaatatttactataatatgtaagtttctgaaatctctgctaggtctaaaggctataactctagtcaacagaacatttaaaattattagattctggcacagcagggcagaggttatatgctgtcaaattatagtacaaagtctaagcttacatgcttacaacactgccttctcaatgattacagttatgtagaacggatgataaaatcattataattggaaatgaacaaattgcccacatgacatgcagaattatactttgcaagggttgatgattgggcagggtaaaggatgcagggcaagattgttttctctttttagtgactccaaaaaattactctcaatgatatttttgcagctctttttccttgtcactaagtactatacacaatgggtcaaaatga

SEQ ID NO: 34156 - DNA, 797 bp, Homo sapiens
gtgacttttctatgcaactaatcacctcaatcattatagtatgaaagcagccatgatgatatgtaaatcagtgaataaggctgttttccaataaaactttattttaaaaaataggcaacaagaagatttggcccatgggccatagtctgctgacttctgcttttgctgcacccggaaaaagcaagtgtacccaagagaaaaaagtggctagaaactgtcagcattagttcaccacaatctccagagctgtcacctcttacctggtacattcttaaggggctctcatcctgaagatgtttatctcctcagtaatacaagactagtaaattcatagctctggttatcagatgttttttgcttagtaatttagtttccctttagttttagaatttggcaagtattttgaaaggaaaattggtaatatgattgaggcaaatatcttgaaaaggaaagttattttgagtgaatgacaattatgtcactctagcctaacacagtcaccaaaaatgttgctggtgaaatttctctatactctagcagtggcccactgccaagcccagattctcaacctttggtctactcccagaattggcgaatgattacagagaaaaattggctacagattctcagctcatctctgagaagtttccccaaatctagatttttagattctcagtcctcattgcttctacatctgatatttttaaaaatacgatttaatctgcctttcctaattgttcttggtgagctcataagcctactgcaaattattccatcctgttcagaagtagaaattg

SEQ ID NO: 34157 - DNA, 1133 bp, Homo sapiens
agtaaaagcattatagagcaccagaacatcctgtgtccacgtttaaaaatgggaagctggaggagcccaggataaaactaagcaccccttttctcttccatttcttaacccagacgtgttgcccctaagccagaaacttgagagttttaataaacacttatatttatcccatgttctaattatcactaaattctattatctggattcttaaaattgccctcatctctccagttccgtctgactcctatcaaaacagagggctgcagttgagtagtaggaaagcagttgctgcacactgacatttcacgagcctcttgctcgtatttcacctaagaactgcacacatgtaggagcaaaggatcaggtcctcctctgtctccgagggtttgattatttcaattcatcgttttaaaacgctgaaacagaccaacagtgtcctaacccgtgcccagtgataccctcctcaaacccagcctgggtcaggggctgattgactccaggaggcgtccctcagctactgtgtatcggacatctgctggagggctcacagccggcctcccggctgtggtcaaatgagcctgactcctacctcgatatgactagcggccacgctgccgaaggacaagagcaacacagttgccaagacagtcgcagcccggctgaggctgtcggtgacggccatgtttaccggcttcagacttcccgcacctgaaggggcggaggcagtgccgtaaagtagcgctgcgggtttttgcgacaccatccgcgcctcttcgaggtggccctctggtccggctttagaactctgcggttttgtggagctcgagagtccgggacaaggtagacgcaggatattgacctttttatttttaactgcattttcagtttggaggttgtaaaataggtataacatttaagaaaaaaaattgaaaggtgagtggagggaaaacccgtaactccttaaactttaaaaacttatttctctgttcccttatttattttatttatttatttatttatttatttatttattttgccgagtgctgccaattctttgaaaatatgaagctggatgtggtgggaagaacaagcgttttggcacaaaaagatgattaattggataaactataaat

SEQ ID NO: 34158 - DNA, 1615 bp, Homo sapiens
acactgtgggaagtcaaggcgggtgtattgcttgagcccaggagttcaagaccagcctaagcaacatagtgagacccctgcctctgcaaaaaattagctgggtatggtggcacatgcctataatcccagctactcaagaggctgacgtgggaggattgcttgagccccagaggtggaggctgtagtgagctgagattgtgccactacactccagcctgggcaacagagcaagaccctgtctcaaagaaaacaacaacaagaatttggaccaaattatgaatcccttactcttcacttctatttcaatcaaaattaaatatctgtcgtcatatagaccataaaaaggtggtcatataattttcacagatccccttatagttgctgaaaacaactcctttttcccaaaaaagagagagagggagagaggaagggaagaaggcagggagggagggaggcatagatgagacgtaggctctgccactgactctggactgtgagattattcactagagctaagattcaatgactttgaatttctataattttacatcgttcacaattggctcttggctcctttgcctcaatttcttgtgataaccaacatttttagaagaagctgcatatggggccaggagagcaggtaattaagtaaaacaatgaagatagtgtgaggaaatgagtgtatcaacctagtgatcatgagctctctgctgagtcaccatcagttttatgaatttgggaaaactgcccagtcctcatccttccactcatcccataactatgtatcaggaacccatagtccatcaattgcactagtggtttggatgcaaataaataagattcttgaatccttgcaaagcttagggtttcagtaggagagagagacaaacgtgtgatcacacaatgagatcaaagcaagcacagaatgtgtggcaagggccctttcctccagtgtaaggggaaaggaaaggatccaggaaggtggcctgaggaggactcggctgagtctctgaagcgggggtgcacgccacaccagagaagccccaagtggagaaggtcaggaaaaccaagtaactccacgaggctgtgacataaagtgccaaggaaaagagggttaagagatggagatggagaggcaagcaaggactagatcaagatggatcatatgtaggagcaaataattgtcctctgagtgatgggaactaccaaaggggcaggaataatcaggatttcaatctagaaagctcaatccatcatccttatggggaatggatgcaagaaggtaaggctaggagaccactgagaggctagaacagtatccaggaacaaatccataaggatgacagagtgagcttttgtccaggaacaaaatcctgagtactcgaactggagaagggagagtgggatctcttgctgttcacaggataagagacatcatcaataaataacaaacttgtctctgaggaagctacattactgattccttgggggaaaaccattgataatgaattcttatcttctaactctgttaatggtccgctttccagaatcctaagaaacactgggtatagaagtctgaaagatgcctctgcatttaactgagtgtcaaatatgt

SEQ ID NO: 34159 - DNA, 1757 bp, Homo sapiens
taaaaaaaaaaattaaaaaaaagaaaggtatttcttccacttttaagatttgtaaaggtgggaaaattcctaagtaattcaggatttaaccacttttagagttggaaaatccctcttagctctctgttgtattattccaacctgaattctacaaactcacaaatgactgctcgtgagtacagggttgagttctcagacaaatctgatttctggaatcttccttagagctttctaagttagtggtgtccaaaagaccagattacaacacatttaaagatcttcattggcttttattcatgattctagaattgggcagacctcaggaccagaaaaatgtttgaagaataagccacatggtcaagcaatatttatgtttagaaaacagaagtgaggaactgaggttaattagttacagccttatgtgaatcagctggctacctactattgacttaagctcagctgctggaactaccaaaactcagccatctgttacagtgtgtacatccaagttgtttgtttcatttagcacggatgactccacgttggttcggcctgttgggcccagaacgggagcctagtccaaaccaatggcctcctacaaattttatttaatggtggaaaagaggtttgcagtcccctggctcatctcttcaacttcccctgcattttggagatgctggctgctgggtgcgtggtgaggtaacattatgatccactgcacaaatatgtaaaacctctccagcccggactgcagagcagcgtgagcttcagccttcaggactcccagagagtctcagggaggctgcttcatcccactgcccctgcccagggccatcccctacccacacagctgcaaagatgaacagtcctccctacacacctagcatagaaacagtgtgtgctgggcccaggaagctgagatttgtctgcaggtacccgtggggtttgccagtagctagggtgacaagagcggggactgcaggagaagcaggggaggggacaggattgtttgccgctggagagggagaaagccactggcccactctgttgtctggcctctgggtttttgcccagtcctcctgcatcagcttaatctcccttggttcctaagtaacagcttgtggcctgctcctgtgatgctgtttggattgtttgcccctcctccctgttgttttactggacccaagacagggctgctcacccaagaggacctctgggtcacttaaggagctttcttaaaactaggtggggctggtgaatgcacttcaagaaagcaagtgagatgaatcagcagttctgtgagatttatttaggaattaaagccacagggggggccaacccatgcagcccacaaataggccacaagcaccgccctcaggcctctacccagcaatgctgacattgaacccatcatctgacaccctccatcccccactccatgacaagtcagccctttggccaccagctagctaaggaaagtgcagcaaaatttcaaacaaagataatttttaaagcaaagcagaatttatacagccactcccttattctttatgtcatcataatgccatccttgtacaataaagttagaacttcttgtaacgtgcacaccagagatggaagtacatgtgatacaggtgtatccctttctgcctgtttttctccctctcataaagcagaggtttgccctgcatctgagaaagaattagaacagaactttcctccatttcattccccacctcactacacttgggccaggc

SEQ ID NO: 34160 - DNA, 2960 bp, Homo sapiens
tgatgccaaaatttatgagtttgctctttactaaaaagttgacctgaggccgggcgcggtggctcacgcctgtacagtgctgaaatcccagcactttgagaggccaaggcaggtggatcacttgaggtcaggagtttgagaccagcctggccaacatggtgaaaccccgtctctactaaaaacacaaaaattagccgggcgtggtgaagcgcgactgtaatcccagctactcgatactcgagaggctgaggcaggagaatcgcttgaacccgggaggcggaggttgcaatgagccgagatcgccccactacactccagcctaggcgacaagagcgagactccgtctcaaaaaaaaaaaaaaaaaaatcacatgaaacagtctgttaccttaaatatataacctaaaacaaccatccctaaacttcaaagatggcaacctcagtaacacagtagtaattaaaaccctaccgataactgagttaataggcacgtacaaaatgatgaaaagcaggattttattctgaccacaggtgttgtcagagacataatgggccctccaaatactgccaaaagttactgaaaatacgaagtcagggtgatgagtaaatgacacccagagaaaatagatgggaggagttctgtttcaggagactggagtcaggtactgcagcagaaaacgcgacacaatagttaaccggtctggaatactttagaaaatggcaagaagggaaaaactgacaagaacatcttaaagtaagaggaacggtatccaatggaatcatcaggtctgcgcgagcacggctcccggacttccagtgagtgggacagggtggaactatcactgcgtggggagaaggacctggctgaggggtgcatatgcttttgcaggtggtggagcgcccgcagggggatggggagggcagtgttgcctcaatggggttactgtattcccttcaagactatgggaagctgatgcagcacgtatcccggcaccaagaggcactcgccccgggcccctccctaacgacttgccttgtagaaagagttgcaggtcccaggcccccggaacccaaggctccgccatccaggacaactgctctgccaacgaggtcccgcgagaatcgagagatctcgcgatacaaacccactcgcatctcgcgagcttccactagacccaacatggcggtacagaaaaaaatcagtatttcggaacttaaaaagcacttcactaacggagtagtgaacatttaaaacactgagacagtaggaagtctttccgctttatacgtctcctcctttccccttgtacagaaaagcagaaatcttaaaaacctccgattaccacgattatactacataaacagagcgcagtgcgctgccccaggcagcctccctgtcacgtggaaacattttcggcgtgcccgtcacgtgggccgctactgagcgagcgcgctcccgacgccctcccaaaagccctccccgccccccctttcgcccgcgcacacgtgcgcgcgcacccccgccccacgtgggggcttcgccgtcgcagccgtcgcagccgtcgcagtcgtcgcctccagcccaccccctcccggtacttggctccaaatccgggtcccaagccgatcgtttcccacccccattccctcccccttcattctccctcccccgtgtctggccctcaccacgtgtcccgagctcttgctcacctttcacgcggggtcggacgcaacgggccacttggggaggcgccgccgccgtggccgctctccgcccccgccacggcacttgctcgggtggccaccgctgcaggaagctcgatagcggcgccgcggcgcttccaggtgggtccccgcctcccgctcctgccacttcccgcagcaccagcggctccttccggtcccctcctttctcctcgttgggactggcgggcggcggcggcggcggcgaccgctgctgctgctgttgctgctgctgcaggcgcgctcactacaccgcctgctggtaaccgcggcccgtgcagcgcccgcgggtcgggcgccgccgaggccctccccggccagtccctgcccctgggcgaagtttggtcttccgagggcgggttgcagtccatcccttgcaaccgtccaacctggccctagcagaggaaaggcgtcctcgtagctccgccattggaaatcggcttcatcctgccctttgtggcctcctgagagatttgtaaaccccacctcccttagcactgtggtctcaagccaggagaacatccatacatgtatttatgatcgtgcttctgcctcgcctcgttcacctctggcttgtaccacagcacgcaggctcgaaccacttcgggcctttgtgcttgccgatttctctggcagaacatttcctccagattttttttaactcctcgatgttcgatgcatatttcaggtcccttctcagagggctgcccagaccactgtatccaaaaaaagtacacctgcaccattgctttaactcttcacctgcttttatttcttcataacagttacaacttccagaccttatttgtcagtatcctcaccaccagaaatgtaaaatttttaaaagcagggacttagtaaactgttttgctcattgctgtatccccagaattgtgtctggcacaaagcagtgctcagtaatatcaaaacagatctaccaactatattgagcatgtaggaaaataaagcccaacacacattaatgaagataaataacttcatcatttatgagctgtggaaaaacagctaaacctccttccgtggctataaagattatgttccaaaaatataaaatccagtggtagaagccgttaactggggctcttctttgacaattgtccagtgctgtttcattacttttgttttcctttgcaacactattttttttttcgggcaagtggatacgtgttgtgccttcttttatgttgctaataaaag

SEQ ID NO: 34161 - DNA, 895 bp, Homo sapiens
tctttgaaggcagaaaccacgtttcattctttttgttttccaaagggccttgtcctggtagactcaaaatattgacctaacttaaccttctgaacatttgacagcatgatttattttgatatacatattgtttcttaaagactagttctcagtatacaatatagcacataattcatgtgcctttttatagatagttaaaagcaactgtactcatctcacactctttggagttttcccacttatcaaaatgttcctgcagacacatgtacacttttaaagtttaaaaactacactaaatagagctgttacttattcccttcctttttagaaatggttacatttcacatttctcaccaaaaatctttcagcattttatgtacttcattttcttgtgaagagtccacagtcttgtcatatgttatagttcacagtgctccaatcttaatctatctgaattcccaatctgtatcaaaagctgctttggcaacattatttcaggctttacgaaattctgatccttacacaatcttgaaatgtttctgtcatggggaaagactttatttcttggcattcggagctcagaggactggcatgaggatcaagtaagactgtgtaagtgaaaggtcacagaaaattctaatactactacataaatgtaagaattatcatctcaattctgaatttcaaatatttaaaatcacctatttactacaatctaatgtcattaaactgcagttatataaaaagacttgcttactgttaagttataaaaagttcagaaaagacagaaaaaaagtgaaactggccataaaccagatcataaataggaagcaatcttaagtagactatccctcttgcacatatcaggtcaaatattttattccaataatatttt

SEQ ID NO: 34162 - DNA, 1528 bp, Homo sapiens
aaagtaatgaaataatacaaagctcctagcattgtgtaactatttctattattttttcataaaactagcattgtctttaagattcctattttctctcttatttataatagtatgaattcactaacaatatttgtattatgctcaaatcaaatagcctatgacgataatgtgacttggtcagacctttccaaataagacagtaggaaaaacggaactaggacggccttgttactttttgtaacacgtttttcttaaaggaaaaataatctgattaaacttaaaaattctctacatccacatagttattaagcaaaaggcctagagatcgttacggtaaaattcaccttcaatttaagtctatgctcctgccagaatttcaccctctggctcaattttccaggcctaatactgattctatgagaatgtaaactccaacggtacttgagtgcaaaacacccaggaaaatctcatcgtccaagagctcaacgtaaaaccctgtaaatattcaaatgaagagcgttttgtatacgagaaatataagtaaaggtctgggaaaccacacactatggatctttcatccaaacaaaggctgcagatggacagaaggtaaggggtaacctctcagtcaagatcaaacattggtcgaagaaaaattccagggacgatgacacctcggtttttccgttcacaacaacaaacaacggggccggccccctcaacagcgccgaaaagcgaaaccagaacccaggagccggcgcgctgcagggctttcagtcacccactgagagggactggcaagcctgagtggggagaccgaggaagggagcagagcccccgcttctcgggctcacctgcacctcccgcttccagggaagaacccctgaggacccttcctcaaatcaacgaccggttcccatcctccaccgaccgttgacagggcgaccactagattatctctgcaacgcagagcaccgaggggccaaggccttcttcccgcccgcgaacccgccgccacccaggaccaagaaaaagaggctgctgcagcggccgcaaccccagcgcgcggaagcgagaacagagaccggaccccggacgcgagcgaaacgcccttgggccccgcgcccctcccagcagcgccgcgctcacctccacggcctggcccgcgggacccgccagctcgaccaacaacggcctgcagccgcacctccgcaagctcctcttttccttctcagctctcggagaggggcagtgtcgcgtcaggagggccggaaaacggccccgcagcgctgccctcggggggtccgcctcctgaactggccacttcccgcagcagccgcggctccttccggtgtctccggggccgccgcaggcgtctccggcgataggggaggtgggggcggagcctcgatgggagcccgccccaggggcggggccacgggagccaggcccaggtgcggggacccaggccggctccctactctgactgcaaactaactgtacagggtatgtgcagcagtttgaggctgtg

SEQ ID NO: 34163 - DNA, 523 bp, Homo sapiens
caagtgaagtccttgcagtggacaagttctcacaaaacaaactcactctgatagaatataatgtaatacctctcccacttttaacttccgtgaattcctgcctcccacccttgggtgtttatcctttcatcccacagtccagattgcttatcttttacttttcttcaaacaatatctcctgatggcttataatggcttataaggaagaacactatcattaggaaataaatcaatcaacttccccttgagagaatagattatacattccaaagtgtggacacccagctgagtcactgattctggagtagaattctagagggtgtgtggacacccagctgagtcatactgattctggaacagaattctagaggtgccgttcatggagaatataatgtaaatagtatgacttagagttgtgcatcaggccaggtactgaagtctcttctaatgaaagggagaaaaaagaagaaatgaagagtaggaagaaaaagaagaaaagaagtctcttctaatgaaagggaga

SEQ ID NO: 34164 - DNA, 387 bp, Homo sapiens
cgagacagacagaaggaaaagaaacaaagaaagaaaagatatatatttgctctctgtccccagtcctgacacagagctcctaaatctcttggaatttcccggttgataggagtgtctttttttctaatattcttgttgggctcctggatagcttcaggataggggctggtcaccagcaaattcaagctatgattagaagcttaaaaatgttggccccatacctaccctatcctctgtggaggagagagtagttgaagattgagttaataatcaattatggttacattgtcagagggttcaaaccagagcgactccgttttgagtgcgggctaggaaaatgaggctgggacttgctgggctgcattcccagaaagttaggcatttcta

SEQ ID NO: 34165 - DNA, 1412 bp, Homo sapiens
acagtaccttgggttttgttgttgttattttttcctaacccggccccctattagtttactatgtattagaacctgagagaggtgactactctgccaataaattgccacattcaatattcttcggttgcctaattcagtgggaaacacagaaaaaaaggtaaagaggacatgaaatcaataataaatgcatcatctataccggattggaatgcctcttaacactcattcatctgagggctgagggcctgtggtagaagttcttaatcttgttttcagggttttgaaattgtgtaacttttttttctttaatgtaatgagcatgtgtatacacatttttttttttccaggggaaaccctccataatttttaccagattgacaaccgttctagatcccccgacaggttacgaactacaatactagttttttttttttttttttaccggtttgtaaaaggatgcaattcttcgaatatagtttttgcatccacttgacgaggaaggagcctctaccctaaacaaaaatggcgggagctgcttcacacgtagtccctcacgcagaaagcctggaaggccccctccactttctctccaccttcgcactcctgaccccggaaggactccgccttctccatgtcagactgctgctcagcgccaggcatcagctgggaagctggcgtgggcaggccagctgtacctggcctggagctccaggtacagggccaggggcggggtggggtggagaggcgggcgggaggaagcggagagttgagcggccacgcagttggggcagaggcctcggggcaggggtggcgcggactccatcgctggcgttagctctcggagtgccaggtggagcggcggaaagccagagggtctacggccgtgccaccctgaacacccccgacctcgtctcatctcagaagctaagcagggtcgggcctggttagtacttgcataggaaagcaggagggtccccacgccagagggaggcctgcaaaggaagcgcggaattgggatgggctcgccactgctctgagccagaggaagggtctggacggccgagctggagggacccccttttctggtgttcttggcaaagaaaaaggaagacagcagaggagagctccgcgaggggctgctgtggggtcgggggagagcgcgctggaggtagggcagctggtgaggtctcaggttcggcttggatgcgggtggttttgagcagggagtggcttttggatgtgaaagattactctgctttgcaggtgctttaagagaataatttagcacgggagtattgtggtgtcaggtccttctgtaaagttgttaaattatctattttccagagggaagactcagcttgtttttgcacaggactttgaaacctttattattgttgttttattgttgttgt

SEQ ID NO: 34166 - DNA, 855 bp, Homo sapiens
tttgttgtctaggctggacaaaatttttaaaaagttctttaaagaatcacttagtttcaaagctggtgggcctgttgaattctaaactctgtttctctgttgccacataggtcgtgacacctcagctggtaaccagaaatattaactatcctttgtgaatagcctataaaccatactgttgtttatacgcatgggaacttctgcaagtgatttggttgtgttgttgtttttactttggttaaattttaaatctattttctattccgtaacattgccatccaagaagccattaaatatgataaatactgaaaagaagatctgacatttctgttaatttagcagcaaacatgctggaaatattagaactaatgctgagaaaataaaagagcagtattaaaataggaggacttttatttttaaaatgaaaaacttctgacaacctggctctaaaattgcaaacattcaaatgcattcctaagctgtgctgtcatctgtgttaaaatagaaaacaggctgggtgtggtagctcatgcctgtctgtaatcccagcacttgggaggctgaggcaggagggttgcttgagaccaggagttcaagacccagtctggacaacatagcgagatccccgtctctataaaaaaatttaagccaggaatggtggtgtgtgcatgtagttctagctagtcaggaggctgaggcaggagaatcccttgagcctaggcattcgaggcttcagtgagttacgattgggccattgtacttcagcctgagaaacagtgagactcagtctctaaaaataattaaaataggaaatatttttgatattttggaaggaggtgatactgatacaaaatg

SEQ ID NO: 34167 - DNA, 1354 bp, Homo sapiens
agcaatagacagatgaagtgttcccggattgctgccccacgctctttgtaataaaggaaaacttggccaaaggtcaatgcttagggtagtagaagatatgtagtggcttggcttcttgactggaaactaggacgggtagagtagctgagagaagtgggccccagagcaaactggttgcgggtagggggagccagcttcagcccggtaatgaagcccatttcagcctcattcctttcccatggcggaggcagccttccttccccaggcctggctggaggtggaggcaggcccaaagttagggggtcagctcgcgcacctagggccgggagacagacaaattctggcggaaagttggcagccacggtccccctcccctgcttttctcctcaactctccacccccactccgggtgataacggcggaggtggggggttgggggaactggccttgtgttttggaacagctgcagccggcgctgggcccgcctggaatgcgggaacaggctgcacaccaggacttttatggaaacttgctgctggagacggcggcggcggcggcggcagcggcagccagaggactcccagcggctggagcagaagtgttagcggccagagctcccagacccctacccacagccaggcgggacgcgcacagtccctccacgcggaaagaagtaccttcgccggtcaccggctcctgcagggtgagaagagttgggggaacgtgggctggggggagtggagacggaggtgtcgggtcccctggtgggggcgggggcgggaacggcggctgcagagaggcgctcggggtctgcggcttctggccgtgctccgctgcagctccggagggcgccgggcgccatacagctgtggtccgcgctggccccggcccgggcgaaccctgccttggagccgcatcctgcgggctcggcggggtgcctaccaggggctgccccagggtctgaaagtgtcggccggccttgggcttctggttgcaatgtctttgccctgctcccctgcgccttgtcggctgagtttcgggtgcgttccctactgtagggagggagccctctgtgagcggagtgggtgccgatccctcggctgaacccttggggtccttagggaagttcagtgccgtcccccaccacttgccccagccgcggtctccgtctctgccagcagtgccagttaagaaatcctttctgatcggtctctgtggaagatggggagaaatatgatttaacagcctattactccccccccacacccccgcatatccccccactcctgtctccaacccttttttttttttttttcgtgattctgcccgaggtgggatgctgggggttgagcaa

SEQ ID NO: 34168 - DNA, 540 bp, Homo sapiens
ttaatgggtgcagcacaccaacatggcacatgtatacatatgtaacaaacttgcacattgtgcacattaaaacttaaaatataataataataaaataaaaaaataaaaaataaaaaaacaaaaaacaaacaaaaaaatttaatcaagacagggactttgactttttgttccctttcatctccccaagcttaggatagcgcctgacacaaagtaggagcgtaagaaatatttgttaaataaataatgagtcaccatgtcctgtcaattccacttccaaaatgtctcttccagcttttcattcctaatgctaatgtcctaattcaggcccttatcttctcttaccaaggtcattgtacttgtcctccttccactagtctttccccattaaactccattctctacattgctatgagtttctttttcttttctttctaggatacatctttcagtcatgctcgtttgctggctctctattgcctatagtattattaggtaatatctgaactttttattaatatggtgcacagtattcattctagt

SEQ ID NO: 34169 - DNA, 2341 bp, Homo sapiens
cccagcacctagtacaatatgcatagtgtcacagagaataggattcttttgcttacatgcaaatctataccaacaccatacattttgaaatgttaaatatattaggggactatctaagaatgtaaagttcaaattaaggtatcttttattttcctggaatacacgcactattttaacagctttcgtctgggaaagtggtgccttcagggcaaatgcacgcactacgtaatacaaagaggtctggtcagtttacgactctgaactgagaggcagattcaaattgaaacctctggtataatgggcctgaggccattttgagaaataaggggggcggactggtggaacagactgacacgtaaatcccgcccagaaaaaggctgctttcaagtcccttccttgtagaggtgtgacggtgaatggtactgaaagcggttttaattgcgagagagaacggaaatgagctgtaaaggctactttaatgataaatcccttcccttgctatggctccaggacagaccctagttctttcccaaactcattaccagaaccttccattaaattgtgtgaaactaactgcgctttatcccctggaagaggatctttatctaaactagctcactggagacacgcgagtgccgcagaagcgggagaaagacttcaggccttctttgcgtagcacgcgtcggggttctaagtggattaggcaccaagaacacaaaactgggttctggtctctaatcgttattaccaacatggggaaacgtgtctcttcacatttcagcccggaagaacacctctttcctcttcctcatgcgcttaagggtagcggcctactcagtcagcggccaattaccgtgagctttcgggattccgccgcgcggtccacacttacctgccgggctctctgcagtgcatctttgaaagcgtcgttaactcctccaccaccaccgccgccaccaccgccaccagctgagccagaagaggggggaggcactgttgaatagtctgccatggttgcactataagagccgctgccgcctgttcagagacttcctctcagctaacagctaagaaagaaagaaaatggcggccgtcgaagctctattacattcttgcgcgaccatcgtgccgtaaaggggcggagactgaaggaacaaaatctcgcgatgtttccgaggcaacgcgctggtgtgggttagggctgagaaagaacgacaggaacagagacgtcgcgaggattaagtttaagacttcgcgagaacagaatttcttttggcacctcctctccgcgcgttcttggggtgaggctgggtaattgttcctgcagggtggtgggtgatagtggccagttgactgcgactgtgtttgggtggtgggaagcctgaagaaaaggttgtttcttaccggtcgctgcctcagggaggtagtgcggtagaattttccgctatgggtcattctcggtgtccgcggggaagggcgtgacaacgacgggcgtgacggcgaagcaacagtgtctcgagagcgctgccgcccggagggcgccaggagaagtgcgtccgagacgccgcgcggtgatgctcctgaaaacgtctgcccggcgtagcgggaacccagcatgattttcagggtagtaaagtgtccctgtattttacttacagactgtccgattttttagttttatcacgagggtgggtgttgaattcaggctggaagcctgttagttctcgaccatattttaagttttttgtttaaaataatgtggatgaggctctaaaagtatgactgcccttttctttatccaaaaacgtgattgttcttaaagttcagtgttagccagatttaataacctagtatatgtatgtgtccatggccatttttattaagggtttttttttgtttgtttgtttgttttgagagtctcgctctgttacccaggctggagtgcagtggcgcggtctcggctcactgcatcctccgcctcctgggttcaagcgattctcctgcctcagcctcccgagtagctgggacaacaggcgcctgccaccacgtctgggctaattttttgcgtttgtagtagagacggggtttcaccgtgttagccaggatggtctcgatctcgtgacctcgtgatccacccgcctcggcctcccagaatgctaggattataggcgcgaggcactgcgcccggcctgttaaggtctcttaagttaagaacagcattgtttcttgaccaaaatagattttgtagcttcttaggcgtagtttctcccaccccatcctgtgggtactcaaatgtaagatcatattctgaattgtcatcacaggactaggtatatatata

SEQ ID NO: 34170 - DNA, 2728 bp, Homo sapiens
aaaaaattataaaactacagcaaataaccatgaagatttatagaaaacagaattagaagtaaatacagtaatatttaacagggattacctaaaatgatattatagggagatttttaaaaacttttttctgcgttttccaaaatctccaacaatgaatatatatttataattagggaaatgtgtttttgaaagaaaaaatatttctcatattactgccccttaagtggcatatccaaattttacattgatgcagttgcagttaagtcttgtaaggaacatgagtatgtactgtctgtaacctgatactttgttctagctttcctgcagcaccacagttctttaaatagggatcctgtggggcggctgcaggggacgggggttgaggggtggcagggacctcattcagttttagtttagttgaagtaactaagttcagatactaaaatttcaaaaataagtatttgtttgccagaactatgaactcatgtatactagaaataactagttagctaaaatcatgtttaagtcctttacttattttaaaataacgcatttgaattttattatagatactcccttaacaatgtgaaactagtacacaaactttctggcgtttctgattgatagaccccaggaattttgaagacgacataaattacttggaaatcctaatttaaacaacctgcgttttggtattatatacttaacagacaaatagcttaaaattaaaaaatccctaaagtagaattgtcgttccttttatctgtatattaactttaacttcttttaacatagggtgtttaatgactgtgatgattttcacctagtatggagtacataaatatatagttgtgacattctgtgttgaaatattggcatgttaacccatttgtcctgtttaattaggaaataaagacggtagagctagtcggaaaatgaatagttaatcgtggaggaggagaaaacatagctcagtactttgactagaggcagctgggaaagtgacgtcctgtagcatttgctgttctagaaagtacagagacacgtagtgaaaatgggaggatctagaaggaggctgtctcctgtgtagtgtatatttatctgtaagtgagccgttggggaaggattgaatacagagacgctgtctgcttgctgccttaagacagctagctgaattgctgattaacttttaaaatacccagcttggtttatttttcttagaatctgttgctaagactggggacgctgttttcttttacaaagggaaatctaagttaatttcaaggcattcgaaatggggaaagactattattgcattttgggaattgagaaaggagcttcagatgaagatattaaaaaggcttaccgaaaacaagccctcaaatttcatccggacaagaacaaatctcctcaggcagaggaaaaatttaaagaggtcgcagaagcttatgaagtattgagtgatcctaaaaagagagaaatatatgatcagtttggggaggaaggtaagtattctctgtatatctttctgtctcttcagctctgtctcttttttttttttctctctctctgccagcctttttcccctctctctcagcttgttaaggttatccttaaattggattctcagtcatatcaaaagtagaaggacaaatgtataataacaaggtttcatctctgatcatatgaatgagtattgcagagccatgaatgaaatgtccttgtttgccttttttattttagcattttgtattatacatattttatcattagacttacaatgttaacaatgtatattttaaaataaaccttgaattcccatacctattagtaaattgtgtcaaaagtcttatgaaacctgtttcgttttctaatgaattttctgccagaaccaataaagagtctttagtcatttaaaaccttaagattggcatttcagattctgagtagtttatagcttattcacaaaaacaaaaagtagttttttgcctttcttatagcaaggctagtttagactgaacaagacagagttgtgactctcagaagcagaaggcgcaggcatttagcttctagttgtttttggcattctgcctggagaggaaagaattttcctgatgtcataaaataccagaacaagtttttagcttaattgtaaacaataattttgtgccaagaaaatgaaatctcagaaatacaatttttgacctaaaatggccacctagttagaataattactgatttacttttagataacattatttatttagaaattttactatctaggtatagagaaaaacatgacaacttccctttcctctccctgccatacttttgttttttgcattgtgagatcaaaaactagtgagcacagtaaaggaggataatttcagattatccttttctcattctgcattttaaatcaggtttgtccatcacttccatataaacggggctatgaagtaagactattttaaattgctaattgataacacaaaaaactttaacttgtactgttttggggattttcaacttttaacatcaggactaagttattttattattagtttttctcccaaaatactggctttcaaatcactgtagctatgaaaacttgttatccctttgattcctttattacatttaacatcaaattttcctaattagaaatatatccttaaaatatagtcaagcagtgactgcttattttgaatgaaacaaattaaatgta

SEQ ID NO: 34171 - DNA, 3198 bp, Homo sapiens
ttgggtttcctacagtacattccctttctggtagaataagctggagttggagacatttggtagacaacaacgtctgtgaaaccgagaatgttgatgtgaccatacaggaagaacatgcaaagctaagtaagaagggaagtttgtcgaggaaaaactgtcggtgaatgcaactcctggagactagcagttagcaaggagcagggtggggacggggagaggagaggtaaggaagccaaaagaggacaaaatttaagaagaatgaaatgggcaacgcagaccaagtaagataaaaacctaaaagaattacttgtatttggtaattaagatatgatagtgatttcactccactgaaattgcatagtaagtgaaatttcagtagtgtgggggcaaagtctgatcacagtgcttctaagagcagagaagtgaggaaatttcgtagctaataattcaagactgttttgctttgttgtaaaaagcgtagttggaggggactggacttgaaaacaatgcaataaacgcgaggtagggaattgagggaactcacacttcacaccgaatggcctcaattttctttgtactatatgaggcaaggtcctctgtagagactaagaagggcagagctggggcaaatggctttggaggcgtgctgaatgttgggagaggaagcagcccaggaaataggcaaaagggaaactcagaggtgccaaggacccggctgagggggtttatgaatacaacgtagcaccaagctcaaggttatgtgactttctcttccaattctgccctgcagagcgtaagacgcagaaaatgcagacgaaggttgacttctacttaaatccctatccccgaaagtccagacgtacggacccgaaggcctgtggccaaatcatgcgtgggtgcctactacagatttatgaaaagcagagaagggccagcgtgtttgccttctaaggcgtattgttctgtagcgtcggcatcctcaggcgttcacgtaaatagagccattttttacaaggagtagggataaacctggtgataggatgagggactacgtaactttctttctctccagatccatcccgggggaggctgggcgggcgggcggctgctccggtccaggggtggaggtcggggccctgacccgacgcagccaggcggaagcgcggctgccattggaggctgcttttacctgcgcggggcccggggcgcaaagtccgaggcgccggggggaggaggcggcggacggcagcgcaggtgggcccgcgctctcggccctgcaagatgcccctgaagctgcgggggaagaagaaggccaagtccaaggagaccgccgggctggtggagggcgagccgacgggcgcgggcggcgggagcctctcagcgtcccgggctcccgcacgcaggctggtcttccacgcgcagctggcgcacggtagtgccacgggccgagtggagggcttctccagcatccaggagctctacgcccagatcgcgggcgcgtttgaaatctcgccgtcggaggtaaggcgccaggtgctcaggctctcccgcctctccgccgcgccgcgccgcgccgcgcgtatttctgtgggcccaggagggttgagcggcgtttcccggagcgcgaaatccgatgccgtgttgagtccgccgggggcgtcccgggggaaagtgagtgtgccttccctggaagggaaaatttaacttggcaggaccgcagaaagtcacagtcccccttgctccgagatctggcctttgggaagcgggttgagggaggcaacctttcttccgcttgcaaatgtgtttgctccagatgtcccggattccgccggccgttcaaggcgtgagcaccttcccagactcgagatctggcggggcagattaataccctccacttcatctggactttactctcctgtttcctccgcaggcgtgagagtcacgcaggtcatctccctagattaacgggggaaaaaaaaaatagaagtgccttgcaggtgatacccagattaagtgggggggaaaacattgaagagccttccaggtaataccaaacggaggcccactttcccccaatctgtcatttctaacatcagcaccagaaaccctttggtggtatttccaagaagtttaaaaagctgggctgttattccaagagtggataacctagagattcatacttaatcacgtgggactagttaacaaaattttcatgaggaagatcagctcttttacatcgtatccttaaaaagggactgaaatttgctttaattagatttcatgggggcctggaactaagtttgacacaggcatgacctaaagcactagtttatgtgaacgtttatgtgaccactttatttgtgctaacccaagtgaactgcaaaggtaggtgtgaaaagttagctcaacaaaatattttgtccacatttctaggaaaagcatataattttgttgccctggactcagaggagtgcagagagctgtctttgaggcctacagcggcacctggagttctttaattagttgtttatcaggtctgttcaagggaaattgaggtcaaggcaaaattccaagaggagacgaaagagagcttaaagtgtaaccctttgttctttcgaagttcccaggcactaaggggcaaatcgcaaacccatctgtgaattatttgtattgatataggatactaataatacttcacatttatataggattttttttttttcaaaaaacactttcacaggacactttcctttgatctctaggggaggcaggtggcaggttaaatacgataacttggacatggagccaggttctaccctttactagctgtgtggacttgaatgagtttaacttctctcagttttcgccatctgtaaaatagagattagaatatttgtcttgaagagtattgtgaagagtggagtccgtatgtaaacgtatcagattgcatagtttatggttagggcttaatacatggtaactaatatgattaatacctaacagttaaatgaaggactgaagtacaaagtgattggcccttagccaaggtcacatacctagcaaaaaaaaacttgactgtaatttaaacttggatcttctgattcctaagctagtgagcttgttagcatacttaactgacaactttaaatgtctttgctgtaaccagggacttcagttttagttacagatggtcctggg

SEQ ID NO: 34172 - DNA, 889 bp, Homo sapiens
agaaaaatatgatgtgagaaagtttatcatataattattaattgccaacaatatataagccattttcctggggaataaggaaggttttgcattataggcattttttggaaggctagggagagggagtatgtgtgctcataaaaatagaagcaggtagcaagggctcagtgtcagcacccagactggagccaggagactggtactcctcatcctggctctggcttggtgacacattcctgggagttgaggatggagtcctgtggtagcctgtcagcttcttcagctcctgcccctgcttggtcttctccctctcttttctaagtgctctgcctcccctagcaccgggagtcttgcaggcaggaatggcggtaatgttggcaagcagagagttggaagaaactgcttggtgagagtagggaacaggttgctgataatcaacaactccgagcaaaggtcagtcagccagggcagtgcctgggtatctccaagtctgtgacagaattctgttcttggctgctcttcaccctttcccattctcagtttcctgggcttattctatccctggggcaggagatggttcaaaattgaaaagcctgaacctagaagaatcctcacatacactccagattgagggctaacctcacttgtggattcagtcctgtcaggcccacccataggtgaattttcttatgctctcaaacttcctgatgaaacatataagtgtgtgaggtggtcagtgaatttgccttcacccttttctcccagatcatttggctccctcatctagggaaccctgtagtacttttttttttttttttttttgagacagagtctctatctcccaggctggagtgcagtggtacaatcttggcttactgcaacctctgcc

SEQ ID NO: 34173 - DNA, 2081 bp, Homo sapiens
atttttatgatgacttttaggtgttttagtttagaagaaacatctttctctctcaagatgtttgatattttctcaggtggcccatattttccccatagagtgctcatctctttctgtcagaattcctgttgtagggtgtagtaaggaatagactgtcttcccccatcactccctctgacacctgaatggctcaccatgcttactttccaattttccatgattcatttgggtggtttttaaatatcacactctcttcagacatttcattgtaggggttagaattcagcctcgtgggccaaaaggaacacagtgctctacgaacttctgccaaacaaattttaaagttttgtttaaggatccttttgaggtctaatggcaatcttttacaagttatatttgtatatttggtaatttggaacgtttaatccacaaatctctttactaataattataatgtataattatgatgttttataaaccatcctattccagcatataaaatgtcccctgttatagtctctctttgcctgtttagaatctcttccatctttaatgttaaacaagaggaggcttttaagaagataagtggttcagaaagcatggaaaatttaacagcacctgacgggggaaatagcagtgatttatgatgtctttcaaattggcatgcaatgttgcagcattattagactaggataagctcaggtatctcctctgagtgtaaaaagattgtgggagaggatgatatatatatatatatatggctatatgcatttgatttattttattcgttggtttagtatttgtgtaatgtccacaaaggcaagacttacacctattccaattctttatccttttcttatgtctcaaggattgctttgggattttgattttcttggatacacagttccctttattatatttcattagtaaagaaagtgttcttttggttatgctgggaagtcatttggtagattcaaaatatgaatctgactgtttttctttttttggatagaattcttatttgtcatattattttactcattagtaatactgaaaaaagtagttctactggagaagagcacaaagagtgatgattcaccttttatttaaggcttgccactgctgacccagggcagctaatttagaagtgaatcatttatagaaagttctacacagttcaggacagagctttatacaatatactcatgaaggtctaaatagagcatacggtatcaggtttctaaatatctgtcttgtcgccaattttatgtcttttccagcctgtgaaacttgtttctagatgactgtagctattgacaagatgaagtcaaaggcactgtatatatataatgatgcatattttaaaactaatcctagaaatttagtacatgcattatactgggaaaataataggctgagattttaaattactgtgtttataatacaaagaaacaaatgtaactagtcatttttaaaactagttggaataaattttaaaatcatttataataatttaaattaaataatgttattgctattttgatatttatgtttggcttttaaagtctaattataaatagttatattatgcaaactgtcttactccttttagaaagtgaggggtttattaaatgaacacaatatatttggttccatacagagtataaaactgtatagtctcttctagaaggtttttttttttgctcctcctcctcttcttcctcttcctctccttctttctcctcctcctccttccttctccttcttcttcttcttttttcttcttcttctttcttcttcttttgtttcttcttcttctttttttttttctttaagaaaagaagaggtcccactgagttgcccaggctgtctcgaactcctgagcgcaagtgatcctcctaccttggctgggactataggtgtgtgctgtcacgcctgtcttctaaaagttttaaattcaaagctgtgtttatatttacatcacagctacagtatcatgggttagaaaaagcccgaattctagttctgactttgtcattcgctagctgtgtgaccctacacaaatcacttaacatgtctga

SEQ ID NO: 34174 - DNA, 1138 bp, Homo sapiens
agagtcagaaaagctgttttctacacatactcccttctccctcaacccattcacagtgatttttgtcagcaaactaatatgccattgattttacagttaggatcagaaatatgcaccattcttgacttaaccgatttttttccccctgagaacaatatcatttttacactagagaatatgtgcaaaaacttattatctacaaagctgaatgtattttgcccttgccgggaacataaagggttaaattgaaggctcaacaaagactgggatgaaaagaggacaagttggggggccatagttgtttcctgtaggcattcactgttttgtagccagtggcatttttttttgtcctcatcactagctcctttaacacacctctgggatttgctctgagcttggctgaacactcttgacctttgattgtatagcagggacagctttattttatgaagctcttctgattcagacacattttgacatggcctaaaaagccattcagtaagtagtaaatgcaccctatttctgagtgggatgcaggttatggatgtgttaaggctcaatcaaggttctgttaggaattaggactggtgtgaaactccaggatactgggagagggttgagagtgaggcctgaggtaaggatccgggatggaggaagaggcttgcaatgcctgtggtggacattatctgataaatttcatttagtgatttcggcatgaaacagccatattaaaatgccctttctggcttattaaatagaagctactcagtacatgtttgttgaacttagcttcttaaccgatgataccttttcaaccctgcttctcttcttctataatttgggccccacaagttacccagattatggttgacaaacttgagtagcactgcacattttagtcaagtgagtcatatttttgaaggaaaatgaggtcaaataaagacttggtaaacataaaaagcccctttgaaatctccacacaacttttcaccatttggtttcttttttgctctctttttactgtcacatgaattggtacaagttgttttaaaatctccagaccccaattccatggcccccctcccccctttttaaattgggttaatagtctttaaagtccattttagttctaaaacat

SEQ ID NO: 34175 - DNA, 661 bp, Homo sapiens
ttttattaatttctgttttatccttcctgtgtttctttttgccaagataagcaaaatggaatgtttcatgagtttgcatatcaccatgtgcagagaccatgctgtgtgattataattttaatgtatgtgctgctgaagtgagcacttggtatgtttttaacttggctggaaataagagtaggttaaagtcacagtaggacagtgtggtaggtgttcaaatgagggtgagcattccacggtgagagaggcattacagtgcggtgcataggggcatggactttagaatcagataggcctgctttcagtcttagccagatcacttatttactggctgtgtaacattggccaaggcattaaacttttctgagccttctctcaagtgggaatgttagcacctactttatagtattatttgggggtataaatataatgacacgcttaaaatgtctgcagtactcacaattaatagctaatattttaatattagttctaacaataaactattacataattaggagagatcaatggcagaaaaatgcattttatagttttgtatggttcacacagatgaaactggtttttttgtttgtttgtttttgtagagacaaggttttgccatgctgctcagttgagcagggctcaagtgatccctctctctagg

SEQ ID NO: 34176 - DNA, 1588 bp, Homo sapiens
tgggaggtgggggttgcagtgagctgagatcacgccactgcactccagcctgggcaacagagtgagaccctgtcaaaaaaaaaaaaatacacacacacacacacacacacacacacacacacacacacatacacacgaggtagatgagcattgataattggggcctagagaatgagatttatgagtaattttctttgattggtcgcagaagctatggaaatagattcaatcactgagagtgataaaaggaccaaaaacagagcagtgaggggaacatcagcatttaaggggcagaaagagaaggaggagccagcactgaggaatggccagacatggaggacctggccttctgggtagcctttatccaagtactcaagatcaagtcacttgtcccacgagcagatgttccattgcactttcccaagttggctgtggggctctgagggaggaataaaggccattagaaaatgtaccctcagaatcttctgtgctggtcagaatttaaattactgtttttcaaccagtaggtttcaaccagtgtgtttagaacacaaagtagaatagagttgaaaatattgtgctttgtacattgcaaatattgtttcagttacaaataaatatgtgtatttcagttttattatctttgtgtatatttatgggtcatgatataacgtatgtattttttactgtgggtcacagaaaaaaacatttgaaagccactggcttaaatgactcccttgttgaaagtttgtagttgaatgggaaatctttcccatacttaacatggttccccctggtcagctggttactgattcaaattttccttgttctagccatgagctgatggcagcattcccagtccttatcaagtatcggctggaatgtctgtagtggtattttttagggcatggctcacttcctttctccttttgccaatgaaaaggagcatggctttacaatgagctcaaccttgcagagtttgccctgtaaacctagattttcccaaggccatgaaaatccctcttccatttaaatgactctaagaccagacaagaccaactcatttgttttcctataaggtcttttaaatgcagaaaaagaacaaatccataaagctttgatttggttttacttaaatgagtctcgacttcatttatcctgcaaatttccaatttgtgattcttgcgtgccctttatggaaagaggtttgaggaaggaggcctgaaatatttctgtaagagttttcaaaagcaggaagaaaattggaagaagaaacttacctcctaaagcatttatggtctttattttagggttggattttgtaacagatcattgggttatatcttcttttagaagattcatttctgtgcggtgtatccatcagaataggatgttaagtatgtgaagtgcatcttagtcttttgagtcattcacagctggaaaactcggacctcatcttcgtgattcagcttaactgatgtactcacttcaaaggctaagcctatttgatattaagagataaactgtggcttttaagttttatatgactttttggatagacatttcaaacatttaaaaattacttttt

SEQ ID NO: 34177 - DNA, 3678 bp, Homo sapiens
cttctcggtttcactgtcacatcttcacatctctgggctgctgctccttcttcagctcctgccctcctccattttggactgtgaaaatgctatggcaggacatgagggtgaagctttttttttccctaagtgagaatgtaaatgtctcatttctttcttctctggaagggcttgatattaagcccctctgtctctgagggaagagacacttgtttttggatgattcatcttctgccactgtagggcccacagagtctactgtgagaaagctggaaggacagaggaggcaaaaggaagaactttcacaggtgtagactaaaggctataaagaatgtgtgtgtgtgtgtgtgtgtgtgtgtgtgtgtgtgtgtgtgtgtgtgtgtttaggatggggagagtgatgcctttagacattcaaatagaagaagactggtccttgatttttcatacgcatattgtggccacatggagcgtttagacaggaacaaaagtcttcaaaagatcctgatctttcagcatggcacagatcaggaggagttttttttatagtgaccacagcgaggtgtggggtgggaacactggaagggttcttggaaacagaaacaataggatggagatatacatacagctccaaacagaaacagtaggatggagatacacacacacacacacacacacacacacacacacacacacacgtatatatatatagatgtacatatagatatacacacacatctccacatatatacctacacaaagacaaatatatagatatgaacattataggaattggttcacatggttatagaggctaagtcctcgaaagtctgttatcgacagccccgagaaccaggaaagctggtggtgtaattcaatgtgagtcctaaagcctgagaacaaaggtgaggattttgcttgtcagcagccttgcctgttactgtccagctggagtgtcaccccatcagcctagacttttttggcttatatctgtggatgccccactcccagcctctttatttgcgatgacatgacctaacacatgtaagacttagaaaaagagaggtggttccctggacacctggtggaatggtggggaagcctttgtgcctgcacttgggaggctgacctaaaactagcatgagaaccctgtctaggatatgagagaatgatcctttctgctacacattaatgggatcacatccctcctcttcaggcttctttagtggcctctacggccctgtccaccccattgccatgctccccctagctctatgccctggtcacattgaacttcctttcactttcaatatcttacctttctcagagcttttttacttgctgttttctctgccgtgaacacccttcctctttttgcatggccaggtccttgtcttcctttggctattagcttaaatgccacttctttggagaaggctttcttggtcttcttccttcccttgttctctgtgttctcgatttcagcccttgtttgtttccatcataacacatcgctgtttgtaattattgtattagtaggctttctatgctattctctacttgaatatcattcaggatgagatcgtttctgtctttctcactgttgtagctgcagcaattagcatggagcctggtgtatattgaaaattaaaaaaaaattgttgatgaggaacttcaaatatttgttgaatgcttactgagtgcccagcacaggaaacggatcacctcacctcatctttaccaatccttgaagtaggtaatgattacccccactttaaaaatgaaaaaacaggcccagagaaattaaattatttgctctagggcacatatttggttagtggcaaagacaggatttgaacctggttttaagtcctggattctctccaaagttgattctgttaatattttaccagaacaatgtaaattgtactagtcacttgactaagaaagttgagtaggggattaaagcctggagaccaaagttatagattcaattaactgctctctacagcctgagtaagggaatagcttcacagcggtcaggccaacacgaagtagatttaaatggttatgtgatggattttaggttggaaatcatatgctcaaggactttagtgattctttaggtttgaaaatattaatattagtaattattgtctggaactttttaaaatcctgtgatcactggcataataaattcttactagtatgacttaaggaaaaagattaagacaagaaaggttctgaccatttcttggagaatgaggatgagggctggccttagaatccttccaagcttcttctggttaaggtgatttcatggtttaattgatttgacttggacagtgggtattttgctttctggagtcattattgtttatgtttcagaaaaggatgatttctctgttctttaggcttttttatgacagtatgaaagaaaattttaagaagtagcagcttgttatcaaatactttgtgtgccatttaccatttgaaaatggaattagcatttgaggtttcatggaccatggaaagttattaacttcttataaaattctgaggatatttaagttctgagaaatgaattgggaagttatattgcttcagaagcccacttctggactaaaactctaatttgtatgccgaaggagtgagtttgtagagatgattctaaattcccttaatatatttgctactcaatgctttcctatacataaagtcagtcaatttcaacatattaacttgtgcgttaatgaataaggaatactcatgaggcttccctcaatattgaactcagactgtaactgtgttgatttaaaaaatgaaatcaatcatgttcctttccagagaatcaaatattcatttgtaatggggacatccttattgaattccaatttgaatgaggtccagggaaattctgaaataggaagatagactgaaatagagacagtggcattttaaagagggctcattctgaaatcctatggaatgtgtctgtggttctccttttcgacttttttgataaacataatcactttggtttattcttttaaaattaagtagctatattccagaaaggttattgcagatgatctgatgtttatttcactaattagaaggagattttgcactgtgtcacaacaccaaatggcctagtatggctgaagttaattcactaggctatttcttttttctaccttggctgaccagtaggtggcattgcctgccctggctgccacttcaagtcttctgtccgcttgggaacctgaatagccagtcaagcatttgttatcttcttgtatccattctgatttgtccaatctgatttttgaattcatttgtgatcctgctaaggatcgccccttgacaactaaagtgtctttgacacccagatagcttctttttcaaatcttggggattataatcatgtagtcccagagggtattcagagtgaatgactaattctacctaaccaaccaaggttcctctagacctgagaggtgaagaaatgactgagtgctgcagtgcttcagaggtgattatggttaatattctgtgaaagttacagatgacttcataccaagcataaaattaaataggtacattaataactttaaaaccttattcatgactttaaaacttttaaatgagattcaagcaaacagttgtgaattaaat

SEQ ID NO: 34178 - DNA, 2545 bp, Homo sapiens
aggcaaagaagagggtgcagtaggagagcatagtgtgggagatgggcttgacattagtggtcaagtaaggcctctccaagaagtaacactcttaggctgggaccggctggatgaggagacagctgagcaggggatgtgctggggagactgaggcagatggagtgaagggttcaacctgagaaaaaactggcacatttgaggaaccaaaataaggtcactgcagctggaatgttggagtgagtggacttttttcttttttcttttcttttctttttttttttttttagtggcttgcaataaatcaaggtagtcaggtggttggggaggggagttggggagaagaggcaagtcataggtagctcgaagctagattaagaagcacagatttatatattaaaaatccgactctttctcgaacataattttccccctcatgtaaattttgtttgtgttactatctgtcatttgatcaaggaaaataaatactttctgtaggtaagtattcaaagattatctgaagtcaaaatgctttctctgattaatcttgttctgttatctgattgtagcagaacattttgtgttgcacagttatttgcatgctagtcacctttggactgggttatttaatattcacagaaacgaatgcaggacagtttgtgtgcttgaagaaagtaagtgggaaaaaatgttacaattttataattaactcttggttgttgtgtagcattcttgaatgaactatagaaatgatccctgaaagtatagtctttgtgtaggattctctttgattaaatagtattatacataatttaaaaatattccagagatttttatttatgaaggctgtctgatgttcctaattattttgaatttatgattcattaaaagcttacaccatcattcaaccagagttacaacattttgcgttgctatgtctatcttaactgtcatcaaattcctttggtcaaaggattttttcccctcattttccaaggcttacctttttcttagttttgctgtcttgtattttgaagatatgtttttcattctttcaagtgtgttcgttaggtatatgtggtagagcctaatttgaggaccatgtggtatggttaatggtatagtggaaacagcattggcattggagttaggcagacctgggtatgaattccaactcctctatttacttagctatatcatatttgtttagttatttatattttgaatcttaatttttttgtctgtaaaatggagacagtaatctctttctcctagggttggcaggaccaagagagacaatgtgcataaaacacagcacagtgcctaccacttggcaggtgctagactgtgtatgtagtctttggcagatcagatagcatttcttagaattatatttctaatagaagaaatagatctgcactgattcttctgtgttcttttacctttacctttatgtccaaggacacatacttatttctcacttgggaaaaaggagagggttactgcatggaatacaaggctggctgtggccaggagggacaacagaatgtcacactaccttatttcagaagactttacagctggggtgggctgctacgggaagcccaggccagtgtttaagcaaaagtgtgccccaatcttaggagaagaaagtgtggttggaagccgacttaaaaagcaaaatccagggctatagccaagaagccaggttattcattaaaaaaacattgattgggaaacttccatgtgtcaggcactatgctaaacactgggtttactaagtggggcacagtgtgccaaagagtttatgatgtagagaggagtccagtaattacaacacagggtggtaagtgctaccatagttatgcgaagcagggaaatggcagggatctgagaatttgaaggtgagatggccattttatattgctaggagggggctgagagaaacggctcaagaaagccacacctaggccaagaataaaatgaaaagttgaacaataagaagataaattgtgggtcacttggtgaagaatgggttctgagccactgtggtttctggtccttaaagggggcaaggagtaaagcaagcaaggtaatgagattgattccgatagcacctatgggatgctctctggagggccagacattactcaaagaacagagagatgctgcctgggccataggaaaccgaaaccttgaccttgctttcattgacttgaagtagagattatttaaacagtgccagtgacctgaaatagtttgtatgtaagttctgttggatgtagctgaaaaacaggataatatttacttacagggtaataaaagttgatattgattttacaggatgggaaaaatggcagtgaactacttcttattctggaaattatagtgcaccagtgtatttgggaacatttttgaatcttggttaagtattctaaatcctaactggaatctcctcattaaggatttttttcatggttgtgggagactaagagatggattaaattagtttatttctgttcaccttgcctggcaatgtctggctgca

SEQ ID NO: 34179 - DNA, 773 bp, Homo sapiens
aagtctgccgaccccactgttggacccttgaagttatagtttttctgctagcttttatatctcccttggctctggggcatgggaatttcagacattgtgctgtgccactcagggacttggaggaaactcagggctctatacactcctgttctgtagtctacctttcttgtctgtagctgacagaactgcagggctgaaggccctctcactaaggtccatctcatatcctcaggcttacaggagaaccacctccttttaatcccacaagtctgtgggtggggtgggcaaagaataggactcatcttttgctttatctccaaactcttgctacctcctctaattcataaaggttttatttactcttcccactgggggatggggagagacagaaggcatggctagttaaatagtctttgaaatgtattgcttatgccaagtcttcatgtctgaaagcttaaaagctaaaaattaacttcttttgcctcaatttgcatttcaactatggtctagcttttctgggggcagcagaggccaggattagtttaaagtgggggtgggagctacagggtaaacaaagggattgcaaggctatctcatgtctctctctcccctgttgtttgtgggttaatacttcataaacaacctgtcacaatagtttcgaaaacagtctaggttttctaaatcattttgagaactggattagttccatgtaaatatttatgcctcatctactatattctttatctatgaacattttttccctttctcagagc

SEQ ID NO: 34180 - DNA, 784 bp, Homo sapiens
gtatttgattagatcaacaatcagcccgtatctccttgtattataatgaactgatttttttgtctttcctatttgattgggatatctttgagggcaagaattatatcttctgcattttcaattaatttttaactgcaactagaaatgctttattgcagttgagagtctgttgctgggtagcagtgtgatgcaatgggtatgggttgacctagttagagattctgggctctggccgagagcagcctttcccctggtttttatgtccaggcaaattaggcctgacctagtcccttatcacacactgcatttattgtcattgtaacctctctctccctgactgagtcttaatccactgtgggtgctgaatacatgctttatgagtgaataaatgagtgtgtgtgtgaatacctaaaatacctcttgtgttggttttcaaattttctgccactgtagtctcctttgaaatctaagcattatctaacaagacccaaatgaaaatccgttatgtgggagagacatcactgtctttcattagcaggtcagcagaaggtacgtcttgtaaagaatgatgcaacttagaacaggtacaatttgttatgagaggcgaggatgggagactagaaaggcccaaactgggggtccttcctcaggatgccaggctggagtgggctgctggtagggttggtgaccagggaaaaatatgagaatcctgagtactggagaagtttagggtattactgaaagagagagagtgaagaggacaggaggggttgctaaagactaa

SEQ ID NO: 34181 - DNA, 582 bp, Homo sapiens
tttaagatactaggtttccttgcctattgtttggcatggttctgctgggaaatacggtttctctactggccttagctttcttgtatcctgatatcatctctgatcacccagttttgacctacaatccgtttttccaactttttgtctgcttttccagtttgagccctagctcagttaaattcttttggctcttggatctcctgcatcacttcccagtcaatgatttcctcactcctggcacagaattttccttggatgactgttctgttagtgtgaatcattcccccaccccagccaccaccagtctttggcacaaccatgaggaaatgtagctgtatgcctggagggatctacagccagaccaggtaaatgcctatagcctctttcttccaaaaggagtttggtacttacttttatattgttcatgctcttattttgcaatactacttataaaaagctttgggttatgtatctattagatttatccaagtcctcacaactaggctctgaagagtgcagaatggaacgtcaactcattatccacaatatcatagtttattttggtcagtttagctctaccac

SEQ ID NO: 34182 - DNA, 2829 bp, Homo sapiens
cttcccttgcatggatattttcctagcttacttgggctccaacactgcgtgttaggcatttcctctctgtggaagtcctgctttatctttccatgggctacagtaaccgatgtcatgctatacgtgcaatccccccatggatgccctctccacctggctcaagctctgacttcccacactgggacaccctgcatagacaccctccttatcctccttggccccaacatctctgccagtctgcctttttttattgatgccctgctcgccttgcttgagctttgaaatctcattctaggtctccctctagtctagatgccttcctcatcccacctccccatcacgtggtcttcctccctaccctactcaggttctgatactcacagaaacctcctcctctaggtgcatcccctcctcacactgggtgagctctgatagtctgctcaaggtcaccatggctgccttctactttcagcaaatactgtatggctatgctcccacaaatggctttagaactgaattgtttgggaagggaaagaaactgaaagggaagttgacaattggaatttgtcattggaattcatccctaattccagtttttgcctccagttctgaccattcctagcccatcttgtcagctcattgagtcatttgtcttgccgggtcatcttggtttcttactaactcttgtttgcagtatgcttgaccttgatgtgtgtccattaagacatgcaaaggcttagcctcccagggctgcatcacctcctcagctccaggctgctagatgacagttcaggttcaggctgactcaagctgcttctgcagcaaccacaaccattctcaggagaaagagctagagcaagggataccaaagaaagggtcatctctgaggggtggttgttgaaactataggtgtggtagaagttgtccaaaagaaaagtgaagaaaaggaagaggaaattaaagaatatcttgtaaggaatgtttatgtgtttatatttaagataaataaggagaaaaggaaaaaaggagttagaacagagatattatggagtaacctacaacctggaaaaactgaagaagttgctgtaggtgactatgttctttttgaggagaatttgactcaatgctgtgtcctcaaacaattaaaatgggaaaaatagcattattattataaagcctgagtaaactaagaaatatgacattatagaatgccttattacagtaaaaatgactcagtaggctgagtcaaagtaagtgattcatctatgcagcctgtcagatcatctgacaattattttgcctgactttggagttcagggtcagttaaaagaggcttgcctcttctgttttagtcaacttttggggtggatagtttgttcagataatagcacccatgaatttattattaaaaaccttgtgggagaaacccttcaaaaagcatagagctgtcacttggatagcttgggtgaagttacttacctaggtgaccttgttcagatgggcagattctctggaaatataagtagtatgtatgtctatcttattcaccgctatatcctcagctcctaatacagtgcctggcacattgtgcatgctcagtcagtagctgtaaagtgaatgaataaaggaagatttgtctatacttttttgagaagtcataatctgatggtggagaggactcatctcagaaattttttttggataacagtgggaagatggtcatgccctaaacatttttcaagatagtcatcaagggccaggcacagtgactcacgcctgtaatcccagcactttgggaggctgagacaagcagatagtgaggtcaggagttcgagaccagtctggccaacatggtgaaacccagtctctactaaagatacaaaaaattagccaggcttggtggcgggcacctgtaatcccagctacttgggaggctgaggcaggagaatcacttgaacctgggaggtggatgttgtagtgagctgagattgcaccattgcactccagcctgggcaacagggtgagactttgtcaaaaaacaaaacaaaacaaaaaacaaaacaaaacaaaacaacaacaaaaaacgatgatcatcaaggaacatcattatttggtagattaaagttgttctctgcaacaaggctttatttactgtgaatttccttcatagaaattgatgctattctttggtgctaataatgtaaaactttcccagaaggtcaaacagtaaatcacctaagaaatgggtgtctagattgtagatgacaatgtaacatttggaggttcttttagaagcgagtagctatctgggttgaaataactgaggaataatgtgtaataagcttattgggcctgaagcacccagaaaggcagttgtgctaattgggtcttttcctcatgtagcaaaatttcctgtaattgtggtgacaaaaccatgaccatttatgagaaagttattgcagtgattaagtaatatgtctttgagatggcttaataaaaattattataaagtggtctcctccatcacaattattttttgtttttatgtttactagaccactgcaatttatttatgtatttattttttaagagatagaatcttactattatgcccggactggacttgaactcctggcctcaagtgatcctcctgcctcaacttctcaagtagctggaactacaggcatgtgccaccgtgcctggtaaaagatagtaaaatttaattagcatataatctatgcctagcatatttaatatttaaagatttatttagctctttagtaaaacatagataatgattaatagcatatgcttcacttagagaaatca

SEQ ID NO: 34183 - DNA, 3615 bp, Homo sapiens
aaataaataaataaataaataaataaataaactttggtaaagcaggttgccctccatcgtgtgggtgggccttatccaatcagctcggggtctgaatggaacaaaagggccagcatcccacagcaaggagaattctccagaagactgactttccattggaactggaacacgacctgggtgtctacctgctggtcattggactggaattgcaccattggctcttctccagcctgctgggtcacacttgcagattttggacttgctacattccaaaacttcaggagccaattacttataacaaactcctctctctctctctctctatatatatatatatgtgtgtgtgtgtgtgtgtgtgtgtgtgtgtgtgtgtgtgcatgtatgtatgtataccactcacacacatcctattggttctatttctctggagaaccctaacagacaatcttgaagatcattttaaggcctatgtatgtcttctctttttctttcctctctttgctgctctccagtgtgtggatgacatctgaaacccaggggaaggggggccaagtgacttgtctaatttaatcagctaattggtgactgagttgctatgttgagatattgatggggtggggaaaaacggaggcatcagtgatgactaatgcatcgatctgcttgatgcctgggaattgctgatgaaatgtcaggagaattaatctattttgaggtgaagttttacccctgccaattgcattttaaccatcaactgtggcagagatatgcagaaggtattagatatacaagtgaggtgttctgaaaagggagacatttctgtctgatgattatcctgttgagaataaaaatttgattatatgaaagatcaaacttccacatgtgttttaaagacacaatgttctgacaacacttttgttccccctggttggtgatatttggctctgactggcattttcagaagatgagatccttctactgccagagaagtgactcagagagccaagattttttttttgaatatttaaaaacatttgtgacaatacagtgcttttaatttttaatttaatatctttaaaaattctataatagaagaaacaatatcattcatgttagagttagttatcactggcttttagaaaataagatgtgatgcttcagctatgtctagacatgatatatgtggagaatgacacaatttgggctgaaaatgacttttttttctgtcccactggataatttgagagtatgtttctgttttaatttattcagtctatactttttattttccatttcatattatctagagagatacagtttctgagacaagggaaagcagaaacacacatagttattcaacatacattaacaccaacaaaataattgtgttaagttttatggaagatggaaatataaaaaggacacagcctctttgtcaatttggcaggcagaacactgttagtgccataagggaaggaaaaaatgccatgggagcttattcattcactaaccaaatatttattgattatatgttgccccgcaggcactatgataggagatatgtgatgtctaagacccagtcactgctgtgaaagatgagagaaatgcaaaaaacagaaaaaaaagtgctgttaaagtatgaaaattcacagctgtttattttgtggtctctctcttgactagtcatgatgatttttatttgctattaacttattaaataaagttaaattgttaaattgttagcatgaattttattgtttatctttatattgtgcaatgccaatttaaatgcaaacatcaggacatttcatttgtgtgcagaatctccaaaattacacaatttgtatttcattgcttatgctgggagggtgcctctagctggttggaagagacaaactcaagcaagatctggaagattggaaggaagacgaaaggatctccaaggtatccattggctgagggggcacttggggtataggaatacttgtggggctagtacagactcttacaggcatccaagggccctgctctgtgatttggggtacatttgtgcttgcttgggcccaatggctactgagttcctcctcccaccagccaaggaatctttgtgttgccccctcccggacagagggcttgggtgggaattgagtcaggtgccttccatttccttgggccaccacctcacagtagatgggtgccctctaaatatctttaaacctctgtgccaggatgtgctcaatgcctggatgagggtgagtgagaaagttgtccctccctccctagacacttctcacttggagtgagaacggcagccaccatgtcccatcctgagctgccacaaggtgtctgtgctggatcacaagcatatccaaatttgagaccagggcccttccctggtgaagggtggcagcaatcactgggcagggcatgtgaaagaggatgggggaagacacaggggttggcacgtgggtaagggtgcttgagaacccattacacagaggcccttcccacagagacaggtctatgcttgggcaggtagttccaagatcctggcacatgctccattgttctactggatttcatttacaaaacacaaattcaaagatacagtaattaagaattccaaacccctgcattttgtgaccctgaggcaggtggatcacttgagcccaggagttagagagcagcatgggcaacagggtaaaacccagtctctccaaaaaaaaacaaacaaacaaacaaaaaaacaattagctgggcacctgcctgtggtcccagctacatgaggggctgaggtcagaggatcacttgagcaagagagttcaaaggctgcagtgagccatgtttacacctctgcactctggcctgagtgatagattgagatcctgtgtcaaataaaataaaataagataaaataaaataaaataaatttaaaaatttcagggtggcagctgcagagcattgaccctaagtgtgaagtctaagttccatgccttgtgggattgcattggttgcaagcccaaggggtcagctctactctcaagatcagcttttttgatgttattgtttccattgtttccacagctgtgatggctgcatctcccaaagaaaactgttttctctttgtgctaagttagaagtacagctagcctatcaatattttccccttcaggctctctttacttgaattacagttcaagagcctaatttttaatggtttttaaagaggtaattttctttacttttctaaggaagatctcatcatcttttacggtggtcccagatttgctttggatgtagacgatggtattttgaaacctcactaaagtgaaattcatgtgaaaattgcaggcaagtattgattgcatgcagtcaaggactcaagatgactctcgataatcagctacaaaagaagatgccatgatagttgcagatatgcagacaaccctctgtttccagatacagtgtgcaggggagttttggctgcttatcattttcagtgaggcagtgtgggccagaggttaaggtcatggggcttgggaactcagcaggtctaagagtgaattcttcctctactgttatatgatttaaccccttaatctttctgtgcctcatttg

SEQ ID NO: 34184 - DNA, 1320 bp, Homo sapiens
accatcttaggctttcctcggctctccagactgctgtcttgcatccccagagatggcttggggataaaaatgagtttaaaaccaaactttctttagctggtccagcggctaagtgcagctctgatgcatccgagcacggtgccctcttctctcccagtactgctctgtgcccatggaaaagggggcggaggcgagagagaagaggaagaggcggaggtcactcgcgcgccccatccctcccaggctgccagcgcagctaggtgcagagggatcccaggagccgcgcgcgccccgcagtttccgcgctaagggaacgagtgcgcggaggggacgagcggctggaccacagccggcgcccgatcaggatctccgcgctgggatcggtggaacttgaggcagcggcggcgcggggcgccatggcacaccgagcggctccgtcttctgctcctcagagagcccggctggcggcctgggatgacaaggtaccatccctccagaggctgatcccaatgcatcggcttcgcttatctagacccagatttaatcaactcaccccctgagacacccagccacagcttctgctggctgagcctgacactgagtttggaccagattccccaagctagggagacgcatagagaaagaagggtactcgagctaacccatccccattctgagctgctctgcgggggattgggtagaaagggtctcagaagagggaaatcggcacagattccgcttctcgccgttgcggggttccctgcgggcggcactgcgagttcctcacccgggcacgtcctcactccccgtgcccgggatgagggagaaaacagccctttggcgtttgagcaattgcagaaagtttcagcgagttcgttagtttggagggaatgttgcgaggccaggccgaagggcgggggggatagtaacgggcgaaagtcgaactgtgagtaagacctggagaaggcgaccgtcctgggggtagcctaggcagttccactcgggctgggcgcaggaaaggctggctccggaattcccagcctccgggaaagctagctgctcgggaaacgccaatcgaattagctcagagaagagtggccgtggccttgtgtatccagtgtctgtgcctcaggcttcaaccccctagggaaagagtgacaagcaaatacttcgccttgaatgttgctactctgaagctgtaactggacaggatcttggccgaggtgcacagtgagcgtggcccgcccccttcctcatcgcgaatcagaatttctacacaggggcagctagaccagaaaaccttcccagagactcaccact

SEQ ID NO: 34185 - DNA, 932 bp, Homo sapiens
tgcattttccttaaataaaaagattttttaaaagttagtgagctgttatgttttcttccctctgacttcaattccttgattctttcaatttttttaatataaatttactgtctaaaagctggatcagcttatgctcctttgttgagagaagttggcatgctgtcaagtgggctgggcacactgagtttcagtttcctttctctgagtctttgaagcttcaaggctgctgaataatttccttctcccattttgtgcctgcctagctatccagacagagcagctaccctcagctctagctgatactacagacagtacaacaggtaaatgtctttctgcttttcatttttcctagctagcattagtctctctctgtctctctcaggtgacagtgtcacttgccaatctcagtttttgttttaatttaaaaaacaataatttatagtaaaaaattagctaatgatttttttgctttctgttcatcctttgttttgtcattttttgtattatgtagagtatataagaggcataaatgcaaattttataactacatattatctgttttttaatatttaatggaaaatatatatgatttgccactagatcaagaagtatggcagtgacaactcgtttgacatggttgcacgaaaagatcctgcaaaatcattttggagggaagcggcttagccttctctataagggtagtgtccatggattccgtaatggagttttgcttgacagatgttgtaatcaagggcctactctaacagtgatttatagtgaagatcatattattggagcatatgcagaagagagttaccaggaaggaaagtatgcttccatcatcctttttgcacttcaagatactaaaatttcagaatggaaactaggactatgtacaccagaaacactgttttgttgtgatgttacaaaat

SEQ ID NO: 34186 - DNA, 631 bp, Homo sapiens
aaacttggatagaaggagtaacattttaactgaatcaaaaaggatagatacaagtttgccagttaggcaaggttctaggaatatttaactataggcggaatacctctcttctttctctctctctctctttttctgtctctctacctctctctctctcacacacacacacgcacacacacacacacacacatacacacaaaaagaggctcagtgactctgattagggtaagagaatgagagagaaataagaggtgagttataaacgaattatgcagatacttgaatgcagtgtctggactttattctgtgagtactggttatccattaacaaatttcttgtgcagggactgttgtgatcaaaagtattttagaaaggtcatgttagaaaggtacagacctagctttgagaatgatggatttaagacagaaaaatggccatctttttcactatttccatcagagtgaatggcatgattttccatgtactatctcaaacctggtagacattttgtctctactctcttatttaatccatcaccaagtgctgtcttatctgtgccctgaagtccaaattctctgtaactgtattgagaagatgagtatttctaacctgtgttacatgaacaatcat

SEQ ID NO: 34187 - DNA, 2251 bp, Homo sapiens
tgagacacaaaattaagcaacttctctgagatccttgcatagcaggaaattaaacccagctcttttgtactagaatgttagtgttcctagcaaacacgctaatctgtctccaattatttggatctaaaatcaggtatatatatgtttagctagcatctgcccttcacagagttcattatctcttgggatttatgattaacttctttctgggattgagaaactagtgactagcagctagatgctggcaactcagctgaagtggtttgaagaagcttaccaggaactagccagtgccctagtggccatctctgaaatatccctagaacacctgccaggcaacagactggagggtttattcgtgtgctgtttgtacagttgagaaaaaagatactgccaaaagcccagcctgaaacagcctaaggattaaaaaagaaggagcaaacttgaaagatgtagattgagtaaatatgtaggactgatttggcactcagtccaatgtgtacaataaaagaaaaagcatgagtcagtaatttgcatgaggtttctctcttaggattttactgagtagaatagaaaggatgattagaagggaatatgaaaagaggtagtatttttgtgtcaacagaaataggtcaataaaatatataatatgtagtttggttatatggggtgatggttctggccatattgatgctaattgaataaaaatcattgttatcaatttctagtataattgaagagctttccaaaaaattattcatctatcatattttatttttaatcattaaatttacgttttttttaatctgaaggctaaagtttgtcttttattctcttgacaaaacattgacaagctgagaaaaacacacacggagtgcttttgatgggcaaatatgagtcatgctgcgttggatgagtaacctatgagtgaattttggccattttgttttgagctgtcagataaatttctcttgggcatctttcctattgctgtgcatctgagcaaaataatattttattgttggtcataattaataattcattgaaacataccaaatgaatgcactcaaaatatagatgtaaatcttattagatctctgaatatagcagttccagtcacagtatgatttttgcaatatgaattgcagttgtatgttagatccttttctctcagaacaagttgagaattataatattaaaaaattgacaaattactttctgcttataaatgagaaaacagatttgtaaaatgtgaaatgagccattctagcaaagtagactttgagcttcaagtgtaaacagttcagttaatggctggggtttctcaatctcagaagctctggtgcatggggagggtgaagcagaggttatgggagctcttcagcattttactgagaacatccttataggatttaattaggcagattacctgttatgcatggtgtagtgtgctgaacagttttaaactggtatatcctcgaggcaaatggaaggcaaagtcataaggaattacattctacacaaataactcagagtattttattagtgggcctcatagaaataaaatcttccttgccaatgcaccatttaatgtttaactcaattgagtaccaaagaattggttaaatgttcaacggccatctagatttatggatccaacctgaccaccctttcagtattttttttttctagtaacagcgttggagctttgaaataaaacaaaatacctttagtttataacagcatgtgctttattctacattaccagataatagcaccagtataattgtttacaagaaagataaatctggtttttgaaaaacagtaatattttataattagaacttcaaaaagtaaaattgcttaaaataccccaatgaacagtactgtttactaatcacttcaggatgcaaatgttaacttgctacgtatatgctaaattcctgaatctacttaatcactttattcacctaaccacctacagggaagggtcactgtgtcaagcaatcctgaatggtattttgtgtgaattgggaacaaagcttttaaaggccagaggtttaggaacataaaccagatgtgctcattttaaaaagtctacttagtttgtggaggagaaaggtcagcctcttagatcttttaaaaatcttactgtcaaacacattccatggaaactaagcattttaatattcttagagggctgcttcactgactttttttttgataaaatgtttgctctgatctgtgttgt

SEQ ID NO: 34188 - DNA, 1065 bp, Homo sapiens
gtcaagaagaattaatgttaatatatccatattacatggattttgtgagaaaggtttttgatccaagtgttaagtcaattataaaattaaatgatcaaaatgagaattgctgagaacatgtattcctcccttccctgggtgtaaaaagaaacttctcattaggaaactactcactttctttatttcccagaaaatctctaaaaggggtggtaaaagaagaataaaagaggataaaatcaactccttaaaactctgcataagaaatgtataagttccttttaactagtcatcaattattctgaagagtgcagttctgttaatatttacttatgtcattacaaataaagtaatcgaccgcccatgacctattgccctgcttatgtttttaagaaaagctttgtccagatagtgatagattccttccttgtgactcatacattacccagatgcttcaggcttcctggaatttctgttcaaaatttcaaaacgtttggcaataattcattttttgtaaggtaagccttaattttaaaggaaaataaatattacaagaaattgatcaataacttatcactaattcttggcttcaaacattatccatgccaaaaataaaaaataaaaattgccagcttttgatatacaaggatgagccttaattttgagtatgtgtgtcacctgtaacacgatgtattgaacccgttgtcagtaggtgccacctttcttaccaaatctcatcctctctgctatacttggttacattttaaaatattacattagcaatatatagttgcataaaaatattaggttggtacagacataactgtggttttgtcattacttttaacggcaataactgcaattacttttgcaccaatctaatacaaaccgtacacagacataatctcaatcttaccattctgaggtcatgaaaagtatgagagtttgttaggtgtctttctaaaccttgtttatcacaaagatcacaacgttctatatcaacaactctgcagcttactctttgcacttcatgatatatcatggacattcctttgggtcaatacatat

SEQ ID NO: 34189 - DNA, 998 bp, Homo sapiens
atttccattgtataaactcaaggaggttaaaatattagctttctgccctcaaaaaaaaattaattaaagaaatgtaatctagtttaataaaaaaaaatgtcaagaaggcattgcagaatgttagaggaaagattgctcatgaacttcagcttagcaattggtctgttgaatctatttgaaagaaaaatgtgaacagagaattgcccaggctaacaggcctgagtggggatggctacaaatccttatttttctctgacacacacacacacaaaaaatggaacttgatgttcagaaagcattgcccttccatgaaaaaaataattaataaaaatcattttattatatgcagcatgctttaggggctacaatctaggtgaagttaaaagtgaacctttttttgttttgttttggtttttttaattgtagaggacactaagaagcaaagtttatcccattctttagtcaggaggtgaggcagaactctggaatgtaagattgctcaaaaacatctgcacttgccaacagttaacttatgggaataaaaccttttctgtataagtgattagattctctgagcttcaaagagagttgcggcatcttaattacatggaatataactactccagttaaaaacaaaatattcaaggtgaaaacacagtagaattaagcagtattatttcaaccttgaaactgaagctatatcttatcactctattgccccataatggaaaactgaacttgagttaatcagtattcctgattacaaataggaaaattgtggggatttttcagaaccttcttttcattgtaaaggaaatgtcatgaccgtgatttagatagaaatattttgcagaggataaaaggtttttaaaattctgataaatacaggctaacttctgagatttataacttattgaactttttatgcataaaacatttagattaattcatttaaataaatgattggattgttctcctgtcactgcctcagatgtacc

SEQ ID NO: 34190 - DNA, 2200 bp, Homo sapiens
agtttgtgaaagtagtgatggcagtataggttattaggtttctggtggcaagggatttagggaccctccttttcttgtcttcccaacattgaggagtcttatctgagagaatcactctagatgttgggtccgacatgtcccaccagcagctgcagcagttctgggatccagggcacaagtgctcagagcagttgtggagtcatggtcccgggctcagagtcttgcaaaactactatagcacctgggacttgaggttcatgtttactcttcatggcataattggattcatttatcccacaaacctctgttgctcaacagctcaggcccagggagcagggatttagctgtggctctgactctgtgggccaggacactggcatggctccaagaaggggtgctctgaaagctcagggcctggggagcatggcacatgtcttagttcattttgtgttgctataacctaaaaccacagacagtacaaaaatttattctctcacagttctggaagctgggaagtttaagatcaagacactagcatctgatgtggaccttcttactatgtcctctcgtggcaaaagacagaaagggaagaaaggatgaagctgagtcctcaggtgtcagaagggcagaaaagagagaacccactcccacaagttctttttatatctgtatgaataatctaattataacctaaacaccttccattagaccctgacctctaaacactgttgtatcaggatttaagtttctaccacatgaatttagaggggatgcatttaaaccgtaacagtgcagctgcaatgtaggacccagaatcaacagggtatagcatcagttcaggccccggcagataaattatcatgcaactgtgactctggccctgggatgatggggcagggcagtagcccaggatttgtgaggcctgaacagcagcaacaagaactcaggaatggcaagctgcatgtgtggcttgcaccttgggggacagggagccacacagagatgactctacttcccaggaatgtgaagcacctcatcagctcagactctgtgcagggctggtccagttccaggaaggtgagtaactttgactgatcagcctggagggcagaatggctcagctcagccaaggctttcattccctttgacatcaggtgccacatctgctcagccccagaaagcacggctacacaggtcagttgaggctccaattccacaggaggtagtgtgccatgatgacttgagcaccaggagtgtgactattctggtgtaccaggggtgtgaggtaatagaggatgagacaccatgttggctgtgataacaaggggatgactgttcccatgttccaaggtctagagtctcccaagggacagagtgctgggtcaactcaagcactagagggcatgactgctctggtgtgccagaagcctgaagtccctggggggtgtgacactgtgttggtttcagcacccgggacacaactgttccaatgttgtcaaggctcaggaccccaaggaggcaggttgccaattcagcttgaaccccagggggcagggcacatcagcaaggaataggaagatggaacgctttgcagtgcttggacccagagagtagggcatagcctcagcatggctcagggatggcacactaccaggggggcatggtgccatggtgacaaagcctcaggggtgcacccttagaggtgtaaaatctactttaccccagagcaggacatgctctagcaatggttccagctccaggacagcatctcaggccataggttgatggggtatagcgtaagctacttctctggggatagcacaatgtgtggactctcgggaagtccttcagctgggctcagagcctgtgaggactgcagaagtctcctatagtgaagtatagtgaggtgaagatagcaagtgtccacagtagtgatggaggctgctgggttcctcttatttatcttttcccatagggagaaatttctcctagttccaagctgatcccaactgggggaaggggtggcagaggcaaagtggatttttcccctttcctatacagccatcctggatttctgtgctcggcaggctttctgctactcctttgctgttcccctgtgctctcctttagttattttggacaaaatgttgttctctatttgttgtttggggatttgtgtgtgtgtgtgtgacagggaaga

SEQ ID NO: 34191 - DNA, 724 bp, Homo sapiens
tgaggactgccagcacgctgtcacctctcactatgggaaatgaggattcttgatataatagagtgtatattttggggaaaagcagaagtgagatggaaaatataaggatttcagataaaggcatacctcagagataatgtgggtttggtttcaaaccactgcaataaactgaatatcacagtaaagtgagtaacacaattgttttggtttcccagtgcatattgaagttgtgtttacactacaccatagtctattacatgtgtagtaatagcactttgcctatgaggtaaacatgtacaaaggtcagggtggaggcatgactaacacaagatgttaagaatgatatgaacgtgtctttgctatttctgcctaatgactcagtctgatataaaaccctttcttctggtaaatggtggcatagagtatgggatagtgtgatagcaaatttgaccttttattaatcacaaaataaaaaacctctagcttaagtttggagatttctcaaagaacttaaacagaactgtcatttgatgcaacaaacccattactgcttatatacccaagggaatataaattattctgctgtagaaactcatgcacgtgtaagtttgtcacagcccttttcacaataaccaaatcatggattcaacctagatgcccatcaacagcaaggacttaaatgaggcaagagggtgctaaacattgaatacacatggatacaaac

SEQ ID NO: 34192 - DNA, 587 bp, Homo sapiens
aatttaataataagtaaaaagactcccccttaaaagaaaaagtgctcgttagtgattgtaattccatgttgtgtggcatgttccttacatgttttgaaaaggttatggattcactcactgtagcatcaaaagtataaaggtgagaggtgagattctttgttgcaagtgctgagaaataatcatttaaaggtcaattgcactcaaaaaaaaaaagaacatctgtttaataagtaactcattttgggatatgctgcaattttaaaggttacagaatagaccaatttgccaatgatgtcagcaagtactattaaagtcattggtcctataaaaacaatccttcgtaaaattcagattgcatgccttctcacataccccaccacacatcaaaaaagtgcctaaactatttatagtgtgctttcaaagacacattgcctcgtgcactttaccttaagtactcagctcctcttaaaagcaacagtggagtgttagatgggaaaataccttggcaaccacacagccacccccaacacacaacacacaacccactctctcccacatctgattcatcctattttgcttcattcttt

SEQ ID NO: 34193 - DNA, 4328 bp, Homo sapiens
aaaatccatgtttgaattttgtggcatgcacaggacacttaactggcttttaaacgtttttccagcgtgattcgccctgtcctgctctgttcctttcagcttaggtccatcgtaggctctgcctggctgtttgctgacattgccaaccgagaggggcaaggaagtgtgttcagaggacaagagcaaaggcagtttcaatgtaaggaaatgagggaaacagacctaacagctctgtgactatacttgagagtaaagagccttgtagtctcctttccttcctttgcttatcctggtgagtttaatcaaaaacaaacaaaacgctcttgtgaaatatagtcaataaagtcaaagtttagctggctctacgtaactacaaagaaaaaaatcatcgcaatttaaaaaaatgtaactttcattaacgagcgcgccggaaatctcaggtatcaaagacgcattaaccctggagcgtcccccgcgcgccgcagccggacggaggcagccgcggcgaacagacgttctttctcctccatgcagttacacaaaaggagggctacggaaactaaaagtttcggggcctctggctcggtgcgtggagaaaagagaaaacctggagacggggtgggtgaaagacgcatcccgggcgcctctccgaagtccaggccgggagcaagctcctgggcctagaggggagggggccccgagccgctggtcatccccctgcgctcagcctcggagcgccgcgcttcgcggcgctctcccaaatactcttcacccactccagaaataaaataaatgtttttaaagtgcatgtgtgtggacaggatggagagcgcgcgccggcggagcgcgcggaggacccagcgcgcagtgagtggagtttgggggtgggctaggggttagcggttgaatgggtgtgttaatggggggagctggaggcagagctcggggacctgggggtagggggagcgcgaaccgactgggaggggagagaaggggaggggcgcgagctggcgcaggccgcctccggggcgcgttccacggccgtgcgcgcgcgtccctcgccgccaccgccgcccggacagccctgcggccgccccgccggcggagccggggccggcctggtcctcgggcggctgcttggccaccgccaccgccgtccgaagggctcgagcccgtaagtatcccctttcgctcctcctccccgccgcttgggcgcacagccgcagcagctgctcaaatggagtggaaaacggccattgggcgacaatgagttatagattatctgctccacgttttgtacttagctgcctgtaatcttcttttgagtttgcccgagccccttgctggaaaactcaggagggagagatttgtcctttgacgctgtacacgctagtatgtttatatgattagcccaactggcggggagggcggatttgggggaaggaggaggaggaggctggaggtgactccagttcagacctcgcggagagtctgtgtcaggacttcgcattcccccgtctctctctctctccctctcgctccctctcactctctctccgctcacacacacgcagaggtgctggggcgaaatcgggagcttaccagagaattccttgggattgttggggggcatctcccctccgctgctgtgtgtggcgtggctcttcccggctactccttgcttccccgagcccgagtctgcgccgccagccttccttggggcagcggccaccgctcagccccggccgggagatccgaaatgtgaggaggggtcgccgccgcctcccgccccaggccgcagggtcggcgcgagggatgctattccggccgggcgctcggggggctgaggggcttcgcctgacaaactgagttggcctcgcgcccccggcgccctcccgcccgtcgcttcgaagggactcccaagtctgcgcacctctgtcaggcttttgcttccaccacccctttcgctctgattcccgatttttttttcctaagggagcgtgcggtctgggggtgtgtgcgtgtgtgtgaaagacctctctcgaagagcggcgtgtgggaaactgcgggaaaatgttgacttaaccccaggagccgcccggcgctggctgctcggctggaggcggcggcggccgagcaggaggacgcgccgagctgcggcgccgtgtccggccggggagctgcggcgctgcctcccgcgcggactcggcggccgaggacccgctcgcggccggcctcggccctctccggccggggtagccgctgccctccgcgcctgtccccgcgcggcccccacgccagacggccctccctcggggcgcgctcgcagacggaggtaagagccgcaggagcgaacaatgtgcctctgtgcccagcttcggagacctgtttgctttgcgcctccagtccgggggtggatgctggaggcgcagggagccgcgggttaatggggctcggctgttgctgttcggctggcccagggggagacccgcgctcgctcgggctgctcgctccctccccccaatctcctcttggaaatcgatccgcagaactctcagtccggtccagccggcttctccttttctcgtggagccattgtaacgctctccaggcatcagtctagttgccgggggcgctggcaagggggttaggatgaggctcccgtagccatgcattttttaatttcataaaagcttggggtcgcaaggttccgcccgtcctttcactgggggcctggggaggaggagtgtgaagcgcgtcctcggcggagcttatttgctccgggcgctggggcccggggccaccccagcgtcccgcccgctttgccctccggtcccgcactgtaagtggagcggggaggctgagcggctggagcgagttcgggggaagtggacggtgggggagggcttggacgagtttttgagggttgctgttccttctcgtcagtggttaggtggtgtggggaggcgaggatgacagtaaagcgcagccagatgtggtcgggccgccgccgggactggctacgattgggagcggcggggctgctgctgccagggcggcctcgtgggtcgggagggtgcaggggccggggacccggcgggccacggggagggcagagagcctcccggagccgcagtgagagggcagcagcgggccgcgttgggcctgcgggagaagttacggagtgtatgctgctggagtggctgtggggcagggagcctcgggagcttggtttgtgggatgggggtgccactggggagtggcgacgagagaaaggcgtgggaggagcgcgagggaaggggagacccccgcgctgcccgagcgtgggctccttgattggctggggcgaccctcaggcagagggggcgagggcgagccaaaccatggaagcgccccagcagtgtggaggtgcgcctgcgagacttctgcgcttgggacccgtaaagtttgttcctttcgccagactgcggggtgggggtgaggggagaatactggaagctttacttaatgctaaagtgtcgctgagtggaggctttttttccccccctccaatcctctgttcactctgtgctctcaaagaatagttgggagggacaagtcctgcggtatctatcatagcctttctctttttagggactcctcctcctcatcttttctccctctccccgccctccattccgttcttcccgatacaaactgttgtctcagattccgaccgagggaatgttttcctcctgtttcttgaaaggtgtcaggctgcttagcagcttctcccaagcagcctgggagcgtctgagctgcagctaccaaccatatggttcccgttacaaaggccaggttctaaggcactctcttccccaccccgccctcaattctttgattttattctgcattctttcagtacgtgcacttctcttcccctttccagaggcatagatttaacggacgtagttgattcattcatttctctgtcactatttatgtgtggaacgggtcccaccgagtttgctctttgctcaacgaagttgcacaatgaagaaagtcacatcctttggtaaataattacctgttaggttgtctcttgctaagtcaggtttgatcttgggcaaaccttagaaaataggcactaaagaggcaatatgcatccagagcagaaaaatagaatagttttggtactcatctgtggcaacattccaacttgtgatgggactgttttgacctaactaagggtactttgtaactttaaattttgtatcttcgtaatacttgagaaaccctttaaaagaaaatttacttctgtccaggtgtgttatggaacgttttgttgt

SEQ ID NO: 34194 - DNA, 1301 bp, Homo sapiens
taattacaacgaaaatgcagttttatgaagtaatatagtttgtcttcacagataattttatgcattgtctggtagtaagtaaaatcccatcacacttatataagtttgttcaattaccagaatgactaaaagaaaaaaaatcaatttaggttgaaaaacaacagaaattagattaccttggtttgtaggaactcgccagcagtgtctacattgcttaataatatcaaaagttaccatgttcacagtgtaaggatattggcgccagttttgatatgcatacatttgttttcttggtgacttttgttagatgcagagttttttctttctgcttttcatttttgttttgtttttatgaaagctattgcatgacatacgagaaactacttccactggcatattctcatttattttagaggtttgtttttaagtagttgcttttccatattccttggatttattatcagttgatattttagattagtgaaatatcaggtgtaatcttaagaatcaaaagaaacctactccattataagatataaataggttattatcagcgaccaaaatacattttggcaattcttactactgattctagaattacattgaattctaaatcccaaattcctgtggcaataaagtagcatgggattcatcgtagcagatagctgggcacctgttttattaccaccttgattaattctggcacccagatttacggaagtgcaggaacaagcacaaccgctactcaaagccaccggctgtttttaggtcatgaagtcaacttcctggaatttctagggaaaatagttgaaaggggaggacaaatgtcactttaaatagagatgtttaaatcagatttctgcctgagggtaaagtttaggtctgttttagcccagatgtaatgtctccctctacagagcacagcattaatcacgacctgacaagaaaacgtatgctgagcaaaacgtggcccctgttggttttgtcattgatttttccaatctgtgaggagtacattataatcattaaaattcagacacagggattacaccttaatctttgaatttcagtgttgaaattagttatcttaaaagaagcctatttaaggctaaaaagtctttggaggactttttttgcggtagatttagtactttaataaaaacagaaatatattgttaaaaattgggtaggttaggcagatgttaacttcctgaaatatgtgaccaagtcttaattctgttttaaaatgcattaagtaacatttatatatatttttaaatctgataaaaaaagagatggag

SEQ ID NO: 34195 - DNA, 824 bp, Homo sapiens
agagaaagcaactcctggctccccaagttacccctcttggaaacacatgctctgaaggatctcagaggccttttcatgttgtcctcacctcctcccctgccacttccaaatggctctcacttggctttctcttttgccacttccagttcacaagaaacattcctgtatgtatttaggatagcagttcaaagtttgagccctagaatcacatttcttgtgtataaatactagattcattattaatgtgatcttgggcaaattaatcaatgtctcaaaagttaaatttttctgcctgtaaaatagagtcaaccagagtacatcgccttctgattactaagaggcttgtttgaggtaactgatgtaacacacttagcatgccatctggcactgtattagacccttgatatcagttatttgttttggctattttttttaagttacataatagacaaatgcaaatacataatggaggtagagttttgaatgaatcacatggtggactgcagaggacaggatgtgaagcatcaaggttagtggatttcttttgcagtagatctgacatgatgtttatgtggtcagatatcgtaggtggaaagtaatgatgcaaaagaagggacaaattaaataaagggctaacggaaaaggcttgctgatgatcagatgagagtatcaaaaggaagagtcattcctgtatggttgaaggtgaggaagtcaggaaggagataagatgcagggataacaggcaggcatattattttgtgtaggagaggcattcacatagaaatgtccagccaagaggtggaaagcttgggaagtgctgagct

SEQ ID NO: 34196 - DNA, 546 bp, Homo sapiens
tttattcatttttttggagagaaggggtctcattatgttgcccaagctggtcttgacctcatggcctcaagcaaccttcccatttaggcctcccaaagtgttggtaccacagcgggagctgccacatccagcccagagcaggtctttatttccggaaaatgtacttaggttttaaccctatgcttgacctctccatttggcaaagtcaacatccatgttcaaatgtccaataccatgattcattagtctggatccctgggaattcaatcaggaatttcctgggattgcaactcatattcaagtcaggcatggacaaatccagatttattgaggttattgtattttttaagtgaaggggctggcatgtacccagagcaagtctagaccagaactgccctgttgatatttgttacagctcaaagttcatatgttcacctgcaagaatctgtcttgatattccatcttctatgaaataataagcactcaaaatttgtctgactcattatagccttaccttagtttataatctatgtttccctgtaagaa

SEQ ID NO: 34197 - DNA, 1075 bp, Homo sapiens
atacatctaaaaatgatagtaatattgttatactactgtctagaacaaacattccactagctcaaagcttagtattcaggagtctagagctggaaagcaagactggtatttttttttctcttttgtcctaaaagtgatttcacacaatttgtttggacatttctgcattccaaataccaagcatagtaagggagacatttggtgatatcagatgtcattctttatttacatgtattgtctaatctcaagttggataagaatacatcaatttttgtggatcttttcattggcaaagttgaatgtactaaacagaacagtgaagctttaaataagccctgtgacatacttacaatctccgtacttaaaagattatgcattgtaaatcttttgataggggccaaaattaaataaccatgaattattcagtgacaagctgaaggattcaagtgcagattggttcacggtactatttgttaaagctaagcaaataagaagggtttggcagtgtgcctcctcccttggtttgtgggttttgacttttcaagcactctgacccttgccctcctcctctgcggccatcagtggaaagttgtagggtagctcaggaagaaaaacagcatactcttagaaactttgggtttttggactggacccagggaaatccctgggaaataagaaagcagtattgtttatgtacaaaaaagagacttatttataaaagatttaaagcacttaatccattttgcaaagcataattaagtaaaataaacaccaaattgtagaacagaacaataaataaacaaaaaacagatttagtactagccgagtagcatgcttgtaacctaatgaggtaaacttgctattacccagtatttatcaaaaaaacacagtaagtggaatcgcacagacttgggttgaatcctatttggctgctctctagttgtatcggcctgagcaatttgcttaacttctctgaatctcagagagtactctacccagttgttattattgtcaataaaaaaagatactgccagccaggtgtaatggctcataactgtaatcccagcattttgca

SEQ ID NO: 34198 - DNA, 923 bp, Homo sapiens
catcaaaatattgcattaaaatttgtgcaatttgtcgtgtataaatgatgctttaataaaactttaaaaagaacacactgtcataaaatttttcagaagaaaatatcaaatatgtttatccagagtattctctgctttgctctacaaaaataatacaaccagcttaaccaaagttgacagcagcactgtgggtcttggctattcaaaagtttagagctggctattgaatcagttcctggaggttgcttatgtaaagctcattgcaacagcagcccatgaactttacacctcattgtgcaaaagcctatttggaaatgttaagcctttggcaaggacataggatctataaatcaaccttgcatggtttagaaattattgtacatgaacagaaccaataacaacactgtgtgccatattttcaacattaagactgtattccattaaagggaattgccatgtccagatcctgcagggaccaatatttaagtttctatcaaataaaacagaatgtcaacagtgtcaacaattttactgtgaaaatatctgggatgaagaatgagcaattaacattatcaaaattagaaaagagattttgacctaatagtattttcctcttttatcactgtgatcaacagaattggcttttcaatgtttataaatgtctatgttacatgttgtgacaaatatctacctttcatatattaccatctggacggctgaaaaaaaaccatggactttggcacatatactgatgttttgatcatgactttatgtcaccatttattcaggacagacttgctgagcccttactattagtcaggcactgttccagctatcaaaattacaaggatgagcactgaaacactgtttagtggggaagatagacattaaacaacataatcccacaaataatttataattga

SEQ ID NO: 34199 - DNA, 983 bp, Homo sapiens
gtgtgagcagaggctcagggctgccaattagcatggccgaaaatcgcaggcctctgcccgtttctgcaggctccaagcctgtgattcctatcttacagtctcctctccagatactgaataccactcactatttcttaaaatcacttctcacccccacttcttcctttgcacatgttatttcttctgcaggtaattccttcatagcttgaagagctcctattgggctcaaagtccaaatccagcttctgtgaagccttctgtgatggccttctgcatagtcatgctgccacaatatcttgtacataaccccataattagaacttatacattgttattttaattaaagtttatatttcttcttcccactacagtaagagttccttaagagtggaaatgtgttattgcagccgtactatataataccagtcataaagaaggtgctcaataattgtttgtggcctgaatgactacttggctaagtaaatgactggccaattaatcattaataaagagtatgatgaaactcaaaagataaaatgttacagaggaaataaagtgacacaggggcagcagtcgacatttgctatttattatcactcagtatccatttctcccttctcttactgctggaaacattttttaatattaatagtatctacattttcccatggcttctatgggtttccaaggccatctcaaacttccttggctgtgaaagagaaagcctgcggtccagccagtcactggcagccatttttgtagagaaatcctgggacagtagagccaagcaatgcagagacggattcatctacattgttagggtagccagataaagcctctctgaaaccagtatttcctctgaactttgtaaatcacatgcaccaattcttaattgctgaaggtatttggtattgagtcttctattatctagagcccaaacatcctagttgaatcagaatcatggagataacccagtcatctcc

SEQ ID NO: 34200 - DNA, 953 bp, Homo sapiens
attgaaggagaaaatggtttgtacaaaattattttaagaagataaatgggagaaagggtctcccatatttacagaaaacaatcacaatcatttcccagcactcttatgagatgttaacagatagtctgtttctgtttcgagcttttgtgccctcagcagccctgcttcaatttgtgtgttctcagccatctgcctcctgtctttctcccattactacagaaaagggctagaaaatttctattttgaaaaagaaacatttcttttatctcatgtttatatgtcatatttatatagcatatttaatatctcacatttgtagaatcatatttatcagtgcaaacttagcactatttgattatccctgaaaacaataattaagtttagtcaataatctttttaagggccagtgtgttaactgtcaagactgcctaacagaatttgaaagaaggtaccctaagtggcctttagcagtaattaccttgtcttaggctgtgtcctgagagcataggcacaaggtgttttcccattactcattacttacattcccctatcgcataaccatatctcagtcccctttcaccttctgttgtttgtctttctctttgacccttttcatcagtgccaaaggctgagctgtattggcagagaagtttgtgacagtcacaaaatagctctccaaaggttaaataaagtaacatggcataagaacagaagaggaagaaagagttatgtcattgatctttctgttttgccatttgttaggtaccatgtcatattttaaggctggatagagtgtttgatgaggactttgatttttacttagagtgaaatgagataccactgagtagagaagcaacactattgctggcagagaatagtgccagagacaagactgtaagcaagaagaacagcagcactgcaataattcagagaggggatgctggcttcaccca

SEQ ID NO: 34201 - DNA, 1136 bp, Homo sapiens
ctctttttaaactctgagatttcgtgcaagtctggagtctggctctgaccacaaggcaggaaatagctcatatgcagcatccagagaagaaagttacaagacaaaaaaaaaagaaagcccacacatgcacacacacatttcttttttatctgatactttacaaagtttatttggaagaaaggttgaattgcgctttttgtttgttttgttttaaaactgcctgttcccaaatggctgatgagcattgagttgagatgaggacaagttggctgttagcctgaaggctcttccttgttgcacccaaagggaattgtagaaagatttggaattcttcagatctttagcttagagaccatgggtggagcctacttgcacagcattcagctgatggttgctaattaaatgcttgcccagtaacttcaactggccagactatttcacaggagaggaaaaacaccccatgaggtaactgccagggaaagagggatgtctggcaaagcttgctagaaaccagaggtgctagcttggagtgtatttctctctgaagaataagtggtagccaacctggaatctgggtcaaataaagcatactttaagtccacccataggaaaaggacagaattgagaggaaaaaagctaaaatagttctattaaattaacgaacgacaattaagtaaataaagtcaaacagttgtgatttctaacttcatagttaacagaagttttcaaaccgataaatttaactccattctagtttagattgaggtatgcataaacaccacttctaatccttccacagtctgggaccttggctgggtcagtttctatttacactggagtaattattaatagcaccctcttctactcccaaaagagtccaagtttggatgataaattttatgttcatgctttccatgaccaatgccttgcaagacttcagatggtttctagtgatatattataatgtgataattagggagtcactgacaagcctagtaaggctaattgtatcaaaacttcttaaaaacacaaccagagtgaagaatccaacagtgcttcagcaattagttgtagttaagtacaaacccaaaacaaattaactctgtcatgagatgccaaaacaagttaataagtta

SEQ ID NO: 34202 - DNA, 2345 bp, Homo sapiens
cactcggcaccatctccaacatgagctgccacttgggctcattccctgtcatggtttgcctctcatccctgcactctttcaggcaggttctccacagccccagctcccagaacatttcccaaacaacccagtagcctgccagtaatcatagggtccaaacataaatgttaccctaacccaaatggccacggatctttccatcaccattagtcaacctaatggatctgctgacttcagtcccacagagaacggccactgacttcacagcaggcagacccatggagagcaagggtcagccagctactgagcatttaaaacagtggggaaggaaaaggggagggaaatgcctctcagataaatcaccggagctgtctggggtgagcagtgcccgtggtaagtgagctcctgcaagttcctgtcacagacctgtcccttccacctcctacccttaaggcagttcctgcagctctcacagctgtgcccacactttcactcctgcaaagaacgtctcattggcttcaattgctttagcggctcagcgtggtccctgtcgggagcacttgtcacctccttcccaagcagcccgcttgacacccaacctaattcctacttggtgaaccaagcccccaaggttcctttcacccccacccctgccccccattttgtgaagagccaaattcagcagctccaatctcagctttattttcatgcaaagtgaaagagctcagccacccggcactggctgaagggtagataaaagccccagctgtgcctgctctgggagtcactttcacctccagcaggaaagcaaactgtttttgtgcctgagggaaattatggagcctcacactttcatccagagacggacaaaggggaggtcaggtgctgcatctgccagaaatggggacgtgtgaaatgtgattaacccaaggagaagccacacagagcccggctggggcctctcctgtccctgtgtgtttcccagtgtcagaagcaggcagaagagtaaacaaaagcattaaataaatatttttccgtttaacccatgtgttaatacagatttttacaacctcgacagcactgactgaatcaatagttgcaagtattagcctgaataatgaaggaagtagtgtacatctgttgatttctctgcatttgtgaaaagaaggggggtgggggggtgaggaggggaagagattccagaatgagcgtgtaatcacattgtaccctgcctgtccgcagcacagctaagcctatcgggcccatcagatgaactcgctaatgctatttctcaggctaaatacaaaccgctggtgcctgtagaattaaactcatcaatagctaagctctcctgcatttacaggaagacacaaataaaattcctactgatatgcccatcagagtgggaagttatctgtctctttcgaacagactttctgtaagagctctgtgtggtaaatgaagctaccagtacatttgtctctttgtcaaaataaataatgccaatttcatttttgaacagtgtgcttgggctgtattcattattgtgttagggttttgtttccgccaaaacagccctccccagccctgctgcttggacaacttgtctctgattagggatgtgtgctgaaaacggaaactgtttgaaattaactagagacgtattaaataatcacaaaagaaattccggtaaaaaatagagtcagttatcaaaagattaacacggttctttgttccgtttttttttttttttttagacagggaggggaagcaattttcaagacagacaccaatgctttaaaaggatttttcagaggtgaattacttaatccttcgtgactaaggaaatctttgtgtgcactacagaggatgggagcaaagcaggaaaaaatgtacaatattgaaaagtgaaaatataatatttggcacactgcaaacatataagttagaaggcctgtgaggtgtttgatacctgcatcaaatcttgattcctctcctataggaagaagaggcagatattttctcgaatattcctaaaggattaacataatcagctattgagtgccactgcagctacttcacaaaaatgtagttaaggcggcacttatctggcagtgggaaactcagctctgagagaaggcacttcatatattaaggctttaaatggtattttttagggcactcttcactaagcaagagctgctctggaggttgagaggggtgtagcatccacagggctattcagctcagtggagccaggcataggagaatctccctgtgcctgcacagggctaccagagaaggctgagaagcagttcacctccaaggaagttcccatctgattc

SEQ ID NO: 34203 - DNA, 1101 bp, Homo sapiens
gccaaaatgtattagtcctttctcacactgctgtaaagaacttccctgagactaggtaatttataaacaaaggaggtttaattgactcacagttctgcatggctggagaggcctcaggaaacttataatcatggcagaaggcaaaggggaagcagacaccttcttcacaaggcgacaggagagagaagagccaaggaggaacatctaaacacttataaagccatcatatctcatggaaactcactcactattaagagaacagcatgcggaaactgatccaatcacccccctcccttgacatcccttgacaagggattacaggtccctcccttgactcatggggattacaaattgagatgagatttgggtaagtacataagtacacagagccaaaccatatcaccaaataagccccctttctttataattgaccagcctcaggtattcctatatagcaacacaaacagactgacagaaaattagtaccaaggagtggggcactgctataaagatacttgaaaatgtggaagcagcttcagaactggataatgggcagaggttagaagagtctggagggcacaaaagaagaaaaataagcaaggaaaaatctggaacttcttagagattagttgcgtggttgtgaccaaaatgctgatagaaatatagacagcaaagtccaaactgatgaaatctcaagtggaaatgaggaacttactcggaactggagcaaaggtcacccttgttgccatagcaaaggacttagctgcattgtgttcatgccctagggccaaacttaagagtgatgacctagagtatctaagggaagaaatctctaagcagcaaagcttcaagaaggggcatggctgcttttaacagctatggtcatatacagcagcaaaggaatgacctaaagtggaacttataattaaaaaggaagcagagcataaacatttggaaaatatgtagcctggccatgtggtagagaaggaaggagcatttcaagaataattcaagggcactacagagcaaccactcactagagggatttgtaccactaaaaggtagccaggtgctaatagtcaagacaacgggaaagaggaa

SEQ ID NO: 34204 - DNA, 1115 bp, Homo sapiens
ttaaatagaaattacatgccacaaagaaagaaagcctgaaagaaacaaccttagcctgcatattaaacgcacagataattgcctgttttacactaaatgaactttttaacaacaatgaaaaaaatttttggacaactttcctgacctctatcctttattcctcatgtaaaataggtcaaaaagtctgaacgatcctttctcagacatgtctcctgaatctggatcatcaccatgccacccggggtaggctctggtcctaaccggcctggactctgagcaacggtgtcctgactgctctcctgacaactgtcactcccaggcccggccactcgccgtctcagcgccccctcgcggcccttctctacccacctcgggacttcccaggcctcctggctgcgccgcagaccctccccgtcccagatcccgccagggcccactcgggctccagccgctgcctgggacagccaaaggccggcccgggcggttcttccccaggtggtccggggcgtcccgggccgcactggcctggcccatgggccccgaagaaggcgctcacccaaggaccactgtccgagcggcttcccccggcccggcctggtgccgcgtccccaccagcccggggtggcaggttctactcgggaagcctgttttatgtcttctttcacgcccatatcacaccgacaagggtgaagctgtggaacttatacctcggctgggccccgccgccaactcctagggcacgggaactgcgcacaggccggggttccgcgaggggcggagcttcccgctctgccctcgggcaggtgagccggagcctggcacgtgggcctgggtgtcctgacagccctggcccccgccgcctctgtaccagggagagcgcctggaaggcgccgctgcctctctctccctacgtgcccacctgcctctaggaactggtgagttacttcagttctatgtgagtctccagtgccacaatttagtgtgtacaccaaacggtgttattgaatagatgaagatgattaccacctggtaatgagtttccttagtcccgttcttatagaacctgaaactcaacgctaaccaccccccccccccgacttagaatcacaaactag

SEQ ID NO: 34205 - DNA, 2270 bp, Homo sapiens
tatcactgtgatgaatgcttatgtacaaaaatcttttacacgttcaggcaattattctgtaggatggaatgctggaagtggttttgctgactcataacattatgaacatgtcattttaatagatactacaaattacttttctaaagacttgtaccaatgtactatctttctgtctaatagcatagcaaaggcccttttacccatactatttccatcactggatattatgtgtcttactaatttttgctcatatgatgttttttacttgttttttcctcttcattagtaaggtcaaggatctatttacatgttaaatggctatctgaaatccataagttgtcttttcatggtctttctatatgctttgccattttatttgtcaacatttataggcaagtttcttttgttgattgatttgcagaaggtattggttcactagtgttacttgtcattttatgtgctacacttatctgtcttcctcaaactcctcctctatcccccacccaattgccctctcaacttctgccttttaagatatcttttacctttcataagattttatgtaatcaaatctgctgatcttttcctaagattataaacttatccttctgtattttcttttaaatttttaatattttcttttttacatagaaagctgcaattatatgaagtttgtttttatatagtgagaattaaggctccaacttagttttcttacaaatagataattgcttcagtaccacttagtggaaaaatcatcttttctctattggtttgaaataccacatttatcctgtattattaatatcgtactctctacttttttaaattagcaacttacctacacttctctctcttctagattacaaaaattatatggacttaaggaaattcagggttccaattctaataaaaattccatatttccattaatcgaagccaaagtcagcgacttgaaaacatattcagggcttctcatgtgttttgcaatctgcctctgtcaccagctttactacaccctcctcaacagtgtactctacgtggcacatggcaggacactaagcaaatatttgctgaatgagttaatgtgcaacagtgagttcagcttactcagataaaagtatataatttaagagtcatcatgtaatcagcatcaagtttcagcttattcatgacaattcctagaaagggcaagtgatagtttgtattactgaaggaattcgacaacttcactccactactaaaatagtctatctcccagaaaacaatgttacagtgcagttgatgggcccttcatggtgctggccactccactcttccactctccaagacaaccattatgtaccttatactctctccccaaatctccagaagccctccccaccagaagaaaactttcccatcttcccaccacattcccatgcacctgccttcccccctgttagaataaatgctcttgattaggaaaaccctccccctctcacagcttacttactcaagaactttttaacacctctctttcctgggccattcctctcttctaaatcattctcatcatcatacaaactgaaaacatcttcatcttaaaaaaaaacaaaaaccttcttgttggcccacatttctctccatctaccaccaccacatttccctttcccctctatagcaaaattccttgaaaaagtgcctgtagtaactgtggtgttttgctttccacttttcttcttcttgtacatattccaagttttactccccaccacccctctaaatttatgattggggtcatcgctaacatccacattgccaaaaattacagtcagttcttagtgctcagcttacaacctctgtcagcaatatgtgacacaattgattactctgtccttaaaataatttcttttcttggcttcaaggacacccagttctcatggttttttcacattttactggctgctccttctcagtcccctttgatagattctccccatctctctgatttctacatgtaggagtggctcaggcctcagtccttgaaactcgaggtagtttcatctagttgacaccttaaatatcttagagactcctaaatttttgttcaccatacacaatcttagccctaaactcaaaactcttatacaactacacactcaacattttcacttggatgtccaatcaatatatcaacatcaacatggtcaaaataaaaataaaatgaaacaacagaaacagcaaaaccctccccctctttctccagcatccatccattcagttaccac

SEQ ID NO: 34206 - DNA, 932 bp, Homo sapiens
ggagagagggagggggacgtgggctgaaaaactactgattgggtactatgctcactaaatgggttatgggactatccatattccaaacctcagcatcatgcaatatacccaggtaacaaaactgcatatgtaccccttgtatccaaaataaaataaaataaaataaagtcttctaaaagaatgtataaaattgataaacatctagcaaaactgacaaggattttgtattagtcatggttctccagaggaacagaactagtaggatatatgactacatatataagggagtttattagggagaattggctcacaggattacaagacaaagtcccacaataggccgcctgtaagctggggaagacagaagctggtagtggctcagtctgagtccgaaagcttcaaaccagggaagccgacagtatagccttcagtctgtggccagaggcccaaaaacccctggcaattccctggtgcaagtcccagagtccaaaggccaaagaacctgcagtttgaggtccaaagggcaggagaagcagaaggaagcatccaaggctggagaaagaaggcagccagaaggctcagcaagcaaagcttatcccaccttcttctggctgctttgttctagccacactggcacaatgagggtgggtcttcctctaccagtccactgactcaaatgtcaatctcctctggcagtaccctcacagacacccctagaaataatactttaccagctatctaggcatccttcaatccaaccaagttgacacctaatattaaccatcacagattttttaaaagataagactcaagtcaccaacatcaaaaatgaaacaaagacgggggacgattgcttgagcccaggagttcgagaccaacctgggcaacatagcaaggcctgtctcttaaaaataaataaataaataaataaa

SEQ ID NO: 34207 - DNA, 1221 bp, Homo sapiens
aagggcattttgataccctttcaagaatgccccgcatactcgcggaggcttataccacgatgtgggaaaacgacggaattacagaataaaccagcagggagcctcctcgttcacccaacccgaccccgcccgcccgagtctcccatctggagcctaaaaactgagctgagatcacagcaactgaccccgtcccctccgccctctccctcccccattctgcccaaacctctcagggcacgaatggtgctgaatcatttgcacgaacgcagcagctccccgttccgcggctcccagcggggacggtgtccccagagcagtgacagtccggggatgggggcccggaaagagggccagggcggagcctttggggacgtggggacatggaagggggtcgggggaggatggcggcagcaggtactcacccgggtgaggaaagcccagcccgggtcctcgcgtccccgctgcaagcggtcccccaggtgctcccgcgcctcgcagcttccccgtgggcggccgccccgactcggcagcctgcactggtggtccggtgctctcctccgcccgcccaccgcccgtggcagccacggctcgggactccggtgctcgacgcggagtgcctggaacagctgtcgctgcccaagcgggtggcggctaccgacgggccagaccattcgcctgctgcggccgggggtgcacgacgtgccgagaggcgcgggcgccgggggcggcgacggttgggaggaacaaaggactcggggaatcctctgccccctcggagtcaggaggtcctggggacaggagggatcaacggaggggccgctgcctcttctgggggtttactgaagacactgctcgagctttcccgggccacacacaccccccccccgtttgccttggtcccgctcggggctcctttagaacgcggcaaacagaggacttagcaacgcgagcgcctgggcggcgcccctcctcagagatgcgagaggcgctggcctgagcgcctccggccacctccttctacctccgggccctaggcgcccgatccacctgcctatctgaccacagacatcttcccacaaaacagtggagctttttgaatctttgaagagagtcttcagatcttttatctaagcatctttgtgaagcaaagaataaacgggtatctgaggccagctcgaaagttaggaaataaaatcaggtggggccccatcccgtagatgc

SEQ ID NO: 34208 - DNA, 1873 bp, Homo sapiens
cttgtatagaagttgtaatgcagtatacattactaatagaattggcaataataggaagtgtactaagaatctttttatcgctccatcttttgtcagtaatgaaaaattttttaaaagtctgagaaatttcaagtcaacaggtattcataaaacacctactatgcctggtgccttgggaacatagaataaattgggaagttacagtctattttgaatttggaataaatggaaaacacagagcaaagttcaatggaacatgcaacaacaaaaatgctagagtgccacataatttacctaagtaaagctaacagcaaaatcaagtactctaagatttatattaataaaaacgcaactaacaattggtaatgtatttattttcagatctacacagaagttgctaaatacaatgctgtacatcaacagaagttctgcagaaatagtaaaattttcctttatctccacctgggaagtctgaaaacatcatagggcttgtgactggggcctaataaccccgaggacaacgtggtgggctgagcgaatacctcaatgtgcgagagaacgaaaagctcgaaccacgaccgtgcctagggaccaggcttttcctgtggccgatgcggggcagatgcagacccagaggccacccttgcgcgcgatctccaacccgacggtgcggctcctctcggacctggagctgtggggagaaggcagccttttagtgaggagccgccgcgtggcgggacgcaaggaaaaccacccgagccgctgaacagtattccgcgactgcactccagggcaccgggaccgccagggtgaggagggactctgcgttctgcaaagctagcggttcccactccacctcccactatctcagcgatgggcacgcgagcgccagcccgggcgaccgcgggggaagaagcggtccacgccacctcaggcccccgccccaggctctgccagctgggggtccaccgcccgcccccggggtcccgggcctgcgcgtcacttccggcgcgcgcgcccgcctgcgaagatacagtcgggccagggcctggcctgggcgcgcggctgcccgggggcgcgcagagagggcggaccgcgcgaagggggagtgtctgcccgccgccgccactgctgctgccaccgccgtcgccgccgccgccgccgccgccgctgctgctgccggtgctaaggagttcgctggagccctttcctcagacccggcccggtcttcgcgcccggactcctggcgccagcgctaggcgcactcaccgctctgacgggtgcagacgcgggagttgtcccagactgtggagtggcgggcacggccccagccccccttcccttccctgaccccttcttgccatcgccccagacatggggaacgcggcgaccgccaagaaaggcagcgaggtggagagcggtgagttgaaggccgggtctgggtatccgctgggcgggccggcgcggggcaccgagcgccctccgggtcgcagcttctgaggccgcgggcacgggccaggcctagcagcggccgccgggagtcgttctggggggccgggagaccagctgcctttctcctccattccgaccccccagctccgcgttgagagctgaacgcgaagggccggatgtggggatcctgggaagagcgttccctgggattccctttctcactctagcgaggaggacttgcacacgttctggaacacttccccaaatatggtccgaggaaagaagtccctagtgccatcccacccctgctttcccccctcgccgactctttgggagctacaggtagtgctgtgggtaaggttggctcttctccctccatcacttgggtccgacccaaccttatcacaaggcgggggctgct

SEQ ID NO: 34209 - DNA, 2249 bp, Homo sapiens
atggggagattggtctcaggcaggtaggaagaagacactggactaggaaaaactagagtattatgctcccaaccttttgaaaaatttgttattcaaggcatgtatcattcaactgtgccactgtgtttctcatccttgttgctgtcatttaccagtctcttgcttacttcttattcatcaaatattttggcatctggcccacaatgtttctctatactctaagctctgcattcatcctggatggtttcaaattctatgttaatgactcatctatcatcactgcacctctgttctttgaccatgttatctcctattccccttttgttcattcagatgtctagtcttgccaaagaccttgtaatattcattaactgctcaagaatcaccaatgtgtgtgattctttgatcacaatttcctctcctttttgcttgctttttaaatattcccattatgatcattcttcatcagaacctctcatccatttatccatcagtcctctcactttcattttttcttcttaaccattctagattacttggtcccaaaattcctttgcacatctgcctctttatcaaatctctctaacaaaaatgtaactcatgataaactcagctatgtgctttctcagtgctttcagtcaagagctaagcactgctagagaaagctgcacagaagaacactagaaatttactatcatcaacctcaaatgagctgtcaacatgactttacagttttaccacatttctctgatcaactctgtctctcattcttcacaagttctatttcatttctctctctttatacctctgacttctccattatctctctcattctaagtcatgatattatgtcatattttacaaggaaaataaaagctatcagacaggaacccctttaacttcttcctattaaatgttcacacctactgtattttaacttgaccatcttattctgttataatagaggagttgtctgttatatttatctattgttccatcatgcaggactcctaaatttagcagcttaaagagtgacaacatttattttacttatgaaagtaagtaatttgggcagagctcagctatgcactctatatgacatcagctatcttagctctgctaataaatcactgctatggtttatggggactagaaacacatgaagccttgctcatttacatgtttccctgttgatgctggctgtacaggtaatttgaaccttacctgggactgtcagctgaagcacctacacatgacctctacatgtggcttgggccccatatcatgtggctaagttccaagaaggagggagagagccaggtataagctgtatcaccttttatgacctagcctccaaagtcaagcagtgtcacttcagctgcattctgtttgttaagtgagtcacttaaatgagtctgtatcaagggaagttgaattagattctgcactttgatggaaggagttagaaaaatttggggacatgtagaaatcacattgtacatctttctctgcaagcccaatcactccactattactttggatcccaacccctcctgctttcccaggagtctttgtattcttatcttttatatgtataataatatgtcttctcatttatttaaaaaacgtgtaccccttttcccttcactttcagttttctctttgaccctactttctctttccctttctcatcgctcacctactaaagtgaactggcctgtgatttacagtatgtgtgatcaaatcagttgactttggtgcccaggcaggtaattttaatgtgtcttgggtaaaacctgagacgagaagaaagaagaaagagaaaaatgttctttttctgctcttgctgtattatagttacttacaatcaggttacagagaacttaatcagcttttagaatataacatgtttgaatgttgtggtctgcatattaatatttaagtattaacttgaagttatatgaagtatgtaacaacataaaaaatgtcaaactgggttacatgcacaacctggtttaatatataagaacctaatttctaaatacctttagaatctttgacctaacaatttcttggttctttatgattagatttaactttcttgtttttttggtttttgttgttgttgttgttttgagacagggtcttgctgtgttgcccaggctggagtgcagtggtgtgatcatgagtccctgcaactgctgcctcctgatctcaggtgatccctcccgccttagcctcctgagtag

SEQ ID NO: 34210 - DNA, 1854 bp, Homo sapiens
ctcttggaatatattagaatttgataatatgagaaacccacagagttttaaaagaaattgtattaatgttgattgaaagggtcagagataattaataaggaaaaaagtgtacgggccctcacctactgtggaaaggaagcaggctgaaaagctactcacctcttcacataggccatttcatgtgaaagaatgattgagagagggcagccaagaagccagagagtacagctaagagacaaggagaactactctcaggactaatcaaggaatgagtgacatgtgcccaactggactttagaattgctattgatgagggagtgtttatacctcttgttttccctctttttgaatgggagtatccattgcaatttctattcctatctcaccatcgtgtattgggcagataacttgtctctttagttcacaagtctttagattaagagaaactaagtatgaggagttgcactcaggaaactggatctgagaggcctcatctatacctgcatttgatttagattacatcctggaccttaggataaggcttcttggggtcttggaaggagtaaagtatattttgaaaatggaggagtattctgtgacaaagtgaagatggctacaaattcttaaccacccttttcatctagaagcatagcatatttcttcattccactgaatctgggctgggtttctcattgctttaaccagtataatatggtggatgtgatgctagatccgttacagggttgaggctctgtcctcttttaagcgaactgctatgcaagaagtctgactattctgagaccaacatgctgttcaaagcccaactagccacttagagagaaagagacagagagatggggtgtgggggtggggggtagagaaagaaagagagagattggtagcactagataaggtgaattatttcatgggccttttagtcagcccagccttcagctgaagacagatgagagagtgactcagcaaacagtgtgaagtgagccagcagacctatgacctcatttgggctgttccagcttctcgcagctgttgagccacccagcttagaccccagacattgtggtatagagatgaacagttcctactgtgtgttgcccaaattcttgacccagaaaattgtgagcaaaatatggtgattgtttgaaaactaagtttgttacataacacagataactgaaacacaagtagaaaaattctatcacctgcccaacctcacagagccagtaagaactagtgttctccccttcccttttatttttagttgacacataataattgtacatatttataggatacagagtaatattttgatacatatgtaatgtgtaatgatcaaatcagggtaattagtatttccttaccataaacatttatcatttctttgtgttaggaacatttaaatcctctcttgtacttgaaaatgtacagtaaattattgtaaattatagtcaccatacagtgctatggagcactagaccttacttttcctatctagctgtgattttttatcagttaacctctctctaatctgtagtaacccacaattatctaattctcttcccaacttttaataaccacaattctcctatctacttgtatgagctccacttttaaaagctccctcatatgggtgagaacatatggtatttttctttctgtacctgactgatttcacttaacataacatcctctaggctcatccatgttgccacaaataacaggatttcattctttgttatgtctaaatagtaggtcattgtttatatacatatatatacactttctttttctgttaatctgttgatagatgtttaggttgattccatatcttgatta

SEQ ID NO: 34211 - DNA, 1034 bp, Homo sapiens
caaaatttgatttttacaactgtatcagcagtagcaaaaatggaacaagcatggactttaagatagcatctccctagaaccatatcttggctctatcatctactggttgtgtaaaattgagctagtgacttagcctctctgatccccactctcctcatttgtaaaatggagattaaaaatgctaatacaattaaaatacatttagaaaggaaaaccatctagaacatgtcttggttcatagtaggtatccagtggacattcattcttttctctttccctcaaggaagacaggtagataatatgctcagggacacagggaagataaaacttcaaaatcaaaaatgtggcgtttagtaactatgtacgtccaggatctggtttttcttttctgcacctggcatctgccctacagttggacagactgagtgcctgggggagcacccttgaggctgatcttcggcccagctcttctagtcggtctacaggctttgctggctgggctccctgtgaagacaagtgcccctttatgcctgttccttccatttttagacggatgactaatcctgtctccgtctgagagagcaatgctgtgtaaactgtggtccttgcccagatctatgactgtattgcagaatcctgcaaggttcacagggtgctggcacttcctgagatggcatcaccatgggattaaaagcctgacctggagtggccttcccctgtgcactctacacaggaggcttcatacctggacaggaacacctgggaacaccaaggaaacacggaggaaataagcaaagccaaattccactcctgttaacccttttatcccttctgaaaaatccccttatatgaaacattagccaagggttgttattttgtctgggttatggggaaaatcatgttattctagaaaggaaatgaagtggcatctcttggcagccaattttgaattctgcatttgaaatcactcgaagcacttctgcggctggtggaatatagcaacttgttcaaagagaggaacgagaaactcatca

SEQ ID NO: 34212 - DNA, 842 bp, Homo sapiens
ataccattacaagcattacccactcctctacttgtccccaggactaggactacctggaaaaatgagaattaaccagggctgagaaaaatattatgtttaaaaacaatttatacttttaaaaaatcttattttctcttagcaaaagcccctctggaaggtattattaagcctattttatgggagcagaaactgagctcagagcagtaagtttacacagcaatctagtagcagccacagaaatcaatcttaggacctcccagttcaggacgttatcactgagcccactcaaagcacatttcccagcagaactggagagatcagtgtggaggtcagttgctgtcttcttgagttatctagttaatatacttccatatcaacgtgccattttccccttctgtaaacagagtgagtcaacagatgccttacaaaggaatatttgctggtgaaaagtagtagagtagggcaaagggctcaatgtctctcattcagatgatgggaaattttctctgaccgccccaccaccaggtgaggccctcccttaaataaagccaaatatatcatttgctttcattgccaaggtaaacacaggtcaggcacatggattttggcttttgtaacaaaggagggaaaatgggactttggaaagcactaaatgtgttcagcagaagccccacaatgcaggtgcccatcattcagtccttcccactgctctttgttttctagacaacactcctcagtgcctgtctgagaaagaggtggtgaaccaaccagcagcccttaggccagagtcacctggctgatgtgatttgtttgatctccacagttggttttttgttttgttt

SEQ ID NO: 34213 - DNA, 1158 bp, Homo sapiens
tccagcttaaaacttcattggggttgtcataagcgagtaagacaggaagaaaatggcattaacctaaaaaaacctcactttaaaaatctctctaggagggttcccctccccccatcttcctggaagttttaagtttttgcaaatatcctcccttgtcctgcccagatcttgtcccttctagtactggccttccccattcctgggggcccccgcccctccgacccccgccgaccggcgctggactacaactcccggcgtgccgcgcgcgtccggccggctgcaccggggctttgcgcgtggcggccgccgagctccgcgcggggcaaacctcccggcgcggccatgcggggaggtaagtgatctgcctgtgcgcccagggcgtgggaaggcgcccgccctctcctctctccaggatgaaaggaaacgaagaatgccgcaatgaaaaccgctctgccctcccaaaaacacatcttggccgtgtgtccggtgctcctgcagctcgttgcacccacggacgtgggctctcactgtggagtggagtgggggcagaagcgtgccctgccccacggagagccccggctcgcctggggctgctggcagtgctcggggagcgggacggggtggtggcacgactcggcggggaccccgagaacgccacacctccaccctccactttccaaagaccggcttccccggggagcccccacactaaacgccagcgaactgcctctccgtgaaagtcttagccagaaactttccccgctttgtcgccagtgccacagagagtcgtgtggctctgggccggcgctgctggtccaagaggcagcctggcgtcttctgcccctaccgtccccttctcaggccagttctcacttgcccctgagacgccattcccggctcggtgaggtcggccctgccctcgggcgacttcaggctggctgcaccgggggtcggatcccgggaggcagggccggcggctcctttgggaccgcgctggctccctaggcgagtcctttctgcctgggggacgaatgctgatctagaaaagaagccaatcaaagtcaacagcttcccgcccttcctaaccgcctcccctctccctatctgagcgcattcccaagtgggtcgacagttctgctccagaatactgacaccaaa

SEQ ID NO: 34214 - DNA, 1257 bp, Homo sapiens
agtcttgaagacaacttcctcttgactgtaccagtaatttttccatatggattgtctaatggcagcaagacctgtagaaaaaccacatggtaatttaaaggacattaaaatagccctctcctcctttctatgactcaatattaaaaacaaaaacaacaacttactaaacaggaaaatgtgtatgtcctccactaaagttacttcaagcatggtaatgccttattattctggcaatagttgagagatgagtcaatttcctagaaaatttaaaagcttttgaaaaatgttaatcattgagatataaatgtttctaagatgcattccatatccctgctttgtaaatgcagtgtattgaacacaattgacctttccttggtgactcacctcatccatgagtcattgtccaatgctgtaagatcaccatggcctcagaagtgtctgaggtctgcagggctgttcactcaattctaaatggctccagatagcggtgcttttagagttcttccaccctcccaccctgtcatttgtcacttctctgctagtgttaatgtgtccaacttcctgtttctcatgtgttatgttcactttgtacacatctgctgggtgagagtccaagagtggctccagacatcctcaaagtacagacgcaaggacagcttgttcagccactcaggtgcctttatgtagagccctgacccaaaggaacttaggccttcctgactccaagtccccagctgggctccatgagggagctgcaagtctgacttcctagagggaagaaccctgtgggcgcagccccccagcatgctgggattagtgcagacctgaggtgtcgggggccctcaggagccctcctctctctgcctggggtcctgagctaagcactgcttgagccatgacacctgatccttttttctatgtagggtccatttgttttgcctctggtggacttggccaggattactttcaggtcgctctcctgcccgttagaaggctttaaaaaggcttcagattctaattaatggcattctggtagccatgtcctttccttcctctaaagtaaatactgctgcctctccttgtggctggatgtacagcatgtgggaccaaggtaagggcagctctgcttcccagagaactggaactgaatccctggaggttttcagaatctagatcacctttgccaggcacctaagcatgacctttgtttccagatgcgactcccgagcctccacctgcagctgatggtggtcaaag

SEQ ID NO: 34215 - DNA, 1525 bp, Homo sapiens
tcctgttctattttttttccataccatgtcttactctgtagctcaccataatttatttgtatgctcattttaggtttccctcaagtaaaacgtaaactaatccaggcacggtttttgttgttgttccattattttgagggctgggcacatagatgcgcaaggagtgcccaaactcatcatctcactctttatacagctgggcaaactgcctaaagtttcctcaagcctcagctttactattttcttgaatggctaaaactcacaaaacacatctagcgtcaaaaactttgcgaccccggaagtaaaaggttaaggaagggggtcacaggagaaggctatttccgtttccgtacggaagcaaaggagccaagaccatggcgaaagccggggataagagcagcagcagcgggaagaaaagtctaaaacggaaagccgctgccgaagaacttcaggaggctgcaggcgctggggatggggcgacggaaaacggggtccaacccccgaaagcggctgcctttccgccaggctttagcatttcggagattaaaaacaaacagcggcgacacttaatgttcacgcggtggaaacagcagcagcggaaggtacgcgagaggcgggggctgccgggcgcttgcgcgttgttcctgacgcttagggcggtcgcggggcgcacatctgtggttgtctgctggtctcaaaagtgttctctgtggctccgtgggaagggtggcgtcgcggcccacgtgttctggtcccctcgccctagtttggagactctaggttcagccttttgcctgagcgtcaaggtggaagattatcttgataggctctttcctgggacgctagattcacaaggaaagctgtaaggccagttggcttagtagtgaaaactacgccctcctggcccagaaggcaaaagtctcagccctttggtccgtctaggtagcgttggttaatttgcagaatctgaaatggaggcaatacgtaataaatccaaaatactgcttctctgattcctgcaggagctccttaccgaaattagtactgtaaagtttctggtaattgtatttgttcttttcagctttatccttatacgtttctggtaggtaaacaaactgaaacgtaaagaggtttaaacgacttgtcaaggtcgcagtgctcatttctggttaaattgcaattggaagaaaacgtttgcttattcttgcacatcgtagaagttcacacaatattattattatgtgtctgcctcctcttactggcccttctgaggcccgggactggttcttactcatgttcagtgtcaaggtgctgtttcaatacatacaaggggcgtttaactcattctggtatgcacgtattggggagggatgtcctggaagacttattggagctatgatttctaatctgaaacctggtggattgaggatcagtaggtgctggggaaaaaagaatattttttattttgtcaagcattctatctagaaatctccagaagaatatatagattgacaatacaaataca

SEQ ID NO: 34216 - DNA, 707 bp, Homo sapiens
caaagatcacattaaatgtattatgtttataaagcatagtgtctggcacatggtaggcattttagtaaacgtggtatagtgagaagcatgtaaactttatctgtacagacctacatcctctattcattatttctaaatggggaactactgttatttgaggtagggtaattatttgtgctacactcttggcagcttccaagatggtttgcattcctggcctttggattctaaatgccagtaacacctcagtcatactgacaaacaaaatgcctctgtacatttccaaatgtgagcagctgtcagcagggggcttaagctaggtgcagtcccaccgtggttgagatctgcagttgccttagtctgatttacttaggctaatttacttgaccctcttcagcctcttttcctcattactgaaataggcatgatgactcctgttttatgtgatttgtgttagggattagcagtaatgtaaataaagcctcttgcacaatgcaggtacatgggaaaagaagttatttagaaactggtaagtttgggttttgtacttggcttttgacacagaccacaatttagtgggaatgttctagaaaggatttaagccttgatttgggcgttggaagaaatgacttttatatctcctagaccccttaataaatacttttggctgtatttcatgaagtttagcctgtggtgaatcttttaaa

SEQ ID NO: 34217 - DNA, 2935 bp, Homo sapiens
gctttcactatcccacccccatttttttttcttggtccatcctatctatgataaaggcacacctgaatgacatttaatggttacgaaataaatgatttcgagtttcagagccaaatccagccaagactgactagaaaccactgtgatgaggtaagaattgggagagtagagaaatggattccaaactgcagtgaggtctacagcatttcaaggactggacgtgagggggatcccacaccaagacgaatgagaattcccttcccttctgagttgaccacaactgagtaagctaggtccctgacatttctagttaacaaaactaaatgggagactctctctcaggaggatcctgcaccaagacgaatgagaatttcccttcccttctgaggtgaccacaactgagtaagctaggtctctgacacttctagttaagaaagcttagagaccctctcagttcacaaaacatttcggcaagtaataaagactagcctgatgagtataaaatcaaatcatcttaggaactggctgcttttaacagggcacatgatttacattcttgtttctttttttaactgcagaagtgtttcacatgtagcctgacctattgtaccagaaagaagccaatccatttaggactgtaaaaatcaggaaatacttagaacagcacttgaatgtcaagttattctatcaacacagacaaaaggctttttctcccaaagtaccccaagacaaggccaatactaaccagacgccaaaataagaccaataattacccacaataatcattttctccggcatgcggaccagtcgatatccccaaggtcaaatatgagcaaactgtgccataggtatgaaatgcacgctttgttcgaggttgtacggggcactgaccggaactttacactccaggatcgtttcgaaaaatgcttattcaatccacagtttaagttatgcaataattcgcttaaaagtatgtgttcaacggacaagagaagttgaaggtaagaatttaatactaaaggaagtaggtttgggaaagatcaaatgggagaaaagtctgctctgaatcaaaagtcggaaaataccctgtccgatgagaaacaggaggctggcaaagtgggaaaggaagggtgcggacagcgcgcggaggcgcagctgttggtgagaccagccgagaaggctgccaagggaggtagagacggaggaggaccggaatgtcggccacggttcaacccaggggccagcccgcctcggaaagtcctggggcggaagggcgaactaatcgtccccctaaaacacagcgtagacccacgcggcgcctgctctaaagctggccgctccccgatcgccgccgctgagcgcgcgtcctctccaggggaagcgagggccggcgcgtgtcccgcccgcccccgccagctgggccgccggatcccacccgccgccgccgccttcctcccgcctcggccgcccgcccccgctcacttttacgcggttgagtccggcctccagccggagctgttgaaccactttcttcatagcggcgacgctggaggagccagacatggtgcacgcgacggccgggccgattcgtgggtcggtgggtcgtgggccgtgggtcggcggggccagacaactcagcggcgcgcggcgggggcggggctccgaactttgtctctaagtttccggttctgtgctcagcggctccaccctcggtgcgcatgcgcgccttgccagccctctgttccagctccacacccggccccgagcgcgagcctggaggagggggaggagaaggggcggagcagtcggtgggcgcggcggctgctggaggctagcgcgacccgactcttaagttttcttttcctctccagaggggccgattagggagaggtaaggagagagcttaccgttagccgcgaagaactaagagggggtctgaagaggaccagggagggaaggcagagcttgtgggagtttctaaaaggcccggcggcgggtgaccaggaggtctcagttttcctcccagtttgtgggaagggttgagggaagtgaggggagatactgggtgaggcgtaggagctactgtgcacccggcgtgagtcacccgcacacccccgccccgtacaggcgtgtctctctgtgacccgagtttggccaacaggcattttcagttccacccccaacccccagccccgctgacccgaggcggagagcaggcgcggaggtcgctgtcgcgtacccagcggagccgggcgggcggggagcaggggcgctgattcgctggagaagggatcttctcgaggtttgactttactggcttcttagctcttgaatcggtttttctgaaggagattgtgaagaagccaaggtgctggctgaagattacacctgtctgctcggttacccatttactctggagaattaatgcttattgtactttttaaaataaaacttatttttgtgtttccggaaagtttgctctttagtatttccgttgtaatttattacctcctgcttgaaattgagtaccaaaggagtttttaggagagagggtagggtctaaccaaacaaaataggctcagccagtaggtctttctttcatccacggaaatatgtgtgttatgtcacagcactaagggcagatgtttcctatttcttttcgggtagtcaatctccgaatgcgctgatgttttccattaatgttaataattttatcattaatggatttcaaattttttattagggaagcatgtgtaattgcactggtcaacaaaatctaatttatttactcaacagtttatatcagttcgcaaaaatgtacatcgtaagtttagcattttacttaattcatacggatgtaatgattggggttaaaaccagggtttgaattctggctctgctacttacggtattcttgggcaagccacttaagtta

SEQ ID NO: 34218 - DNA, 2516 bp, Homo sapiens
tttttaacttttcagaattaattatgcataactcattttttctgctaagcaattgcctactgaaataataaaaattcataatgtgaaattaagtggcccattgttttctgactcatatttctatcaaaacttctattttagttctgataattaagattctatttgtttaaaaaatactaagagcctgtgatataacagatatccttaaaaaaaaaaaaagctgggtgaactaattgaaaatataaggggaaaatgccatgtagtctagtttttgtgtttgaaaaacatagaaaacgccagtagagaaaaagaccatttaccatgaagatacaaataagcataattttgcttctttgaatagttggttttcaaagtgcccacagatattgcctaacccactaagtattgggtactacagtaaatctttcaggttttttttttttctcttttttgagacatagtcttgctctgtcgcccaggctggagtgcagtggcgtgatcttggctaactgcaaccttccgcctcccgctccgcctcccaggttcaagcggttctcctgcctcagcctcccaagtagttcggattacatgtgcccgccaccacgcccagctaatttttgtatttttagtagagacggggtttcaccatgttggccaggctgttctcgaattcctgacctcaagtgatccacccaccttggcctcacaaagtgcttctcaatctcaaaaagagattgagaaaattaagaaatgtctggttgaacttttacagctactgtccccactgcctctaccaccgcgctgggcctcagattgtataaaacattttaattgggaggccattatgctgaaacagctccaactgccttggatttcctgcttaagcaaactccagcccaaggtcaacagtgaaaggaaacttaagcttaacctatcagaaactgccaactaacctctaactagtaattttccaccaagtcatagctaaataaggcaaacagtcatagccaaccaagtaattattttcctttgcttccctgttcggcctataaaagcccatgctactaaagcagacctctctgaaccccttctggtttaagtactgccgattcataagttgttctttgctcaaataaaaaaggttatcctactttgtctgaagtctttcttttaataagatgttaggtttccacactaggcaggttctccataaacactttcaccatttttatttcttctcctaagtcatgtatatatacttttttactggcatctaagtgttctgcctcagattaatgtactagattaagaactaggaatcatgcctatttctacaaaagaatcgttctttgaattaagcctttggaccttcctgatgtcatccaattcctgctttcagtcatcgaagtgggcagtcaggtggttttaatattgctccagaaggtgtttgattaaagttgccagaagccttacaaattgttatgtagatagaaggaaaatgtactgaaagctattttttttaccactcttcatgggtggttttgaggtactttaaaggaaagggctagcaggtatagaaaactaaaggtaagcaaaatactctgcattctaatgtactgttggagtgctgagattctttcaaacgaaatcctcgttccttggaaacataaatggattatcctaccttgtttgctttttacacccagagtgcttccgcagaggcacagcaggggaatgaaaggagcttgccttaggaggcagatctggtttgaactctcgcctgcctacgcaggcacttacaggctgtgaggcctgaggagttactcaacttctctgagcccgagcttcctcatctataaattgaaggatccgtaaacaggaaggccctcatcgagtggtcaaagctggtttcggcgcccacggcacctctccttagggctccgttctaccctaacttctcttcgtgccctgaagcccagacctagaggagcagaggaaggcgctgacctcgaaatctggatggtggcgaatcgggcggcagagctcaggctccgggcatgggcagtcggtcccggccgcgagccgcagcgccagcagcgccagcagcgccagcagcgctagacccgggacgccgctcggcgggctagagacgaggcgccagcgtcgaagctgcggccgggacatagcagcaggtctagcgggccggagtgggttcctaccgcctgggtgggcggggcctgctgcgcgtcggggcaggaaggggcggggagagtcgggaagggcggggaggggcgggaggggcggggctccggggcgggcgtgggaggtcgggcttcgagcgtccccgggcgctacaggtgggtgaagttaagtggctgctggagcgtctcgggggacagccagtgtctgcggcgccgagagggccgttcgtggactcaaatgggtatcacccctaccgtttatagtcctcccaatagtctgcatctcgttttgtcgtggctggtcgtgtactcctt

SEQ ID NO: 34219 - DNA, 960 bp, Homo sapiens
cgaaagaactgattttttaaatacacgttatttgaatttttcacaactacatattattatgtattatctccctccctcccttccgtccttccttttttgcaaaaccaatgcaatcactcttggggtctcgggggcaatgggatcacgtcaggctcaggcgctcccctgggcgcacgctgggtgaacaagccgcctccgggcgagggtggagctccagcggggaggctctgggcgcaggaggcttaccaagaggagtccgcggcagcccgggcctgccccgcgggctgctctgggctactgggatctcaccccgcgctcggcgaggcgggcccgcggcgccctctgcagggaagcgggtggcgcacgcatgctgggcgctccagtatttgtggcggggtgggcttctggttagggtaacatctgcatctccgcttcacagcgtacaaggtgccttccactttgcgctggctctcccgcgaccctgggatgccttctgtcctccaccggagaggacgctgagaatcgccgttcctggcgaagggctagaactcaccagcgcccggctccatagcgccctctgccggggccgaggggcggggcacgcgggcggccgagcgggcgggcagggagggcctcagatccccctatccccgcgggaggggctgccagcctgggtcagccacgcgtggcttcctgagactgggttatggctatttcccacctccttgcctctccctccttatttccctccacctgtgtgtgtgtgtgtgtgtgtgtgtttctaaagcaaaaacaatttttttttctattctccaaagtaatgcgtattcattataaaaaaatttttttgggggggtagaaaacacagcataaaaaagaaaatgaaatacctttaatctcatcattcagagataaacacatgtttagggtattttctcctagtgtctttttctatacaca

SEQ ID NO: 34220 - DNA, 1564 bp, Homo sapiens
actgggcaatcagcataggctcaaaaaatgtgcagggagctcacaattcagtttactgtcgttgactataaaattctaaaccaaagtattttcatgataaaattataaaccaaagtattttcacacatgcctgcctcttggatgatgtaaattcttcccctagactttttactagaccactatcggggttctcttccactgcagcggccacccaataactcgttttaaagactgcctcttgcggctgcactagcaaatcgccaaaccccgcatgccccacggccgctgctgagactctgcagccccaaatcggccatcccctcctcccccacgtccccgcgctgctcgtcccccaacgccgggcgccaaccttgctccatcccagagagggtttggggctccccgggtcagagcgctccgcaggcgcagctccgcgaacgccagcgagagcggtcccggggccagcacctacctcccacctcctcctccaggagcggcccgggtcgacgctcgcccgcaccctgcaacggccccaacagccgcgcggagcctcccgccgaacaacggggcgctgagccaggtgccggctctcacctccgcgcgcgcccgccccttgccggcgcccacccccgcccgcccctccctggcggggcgcgtcacaatccccgacgcgaggcgctgctgctcaccgtcacggcccccgggagcggcggggagtcaccgctcggcgtcctagcccggctcccgcagcccgagggccagcagcgcctcgcagcgcctcccgcccgcggcccctcctccgctgcgggctcccgccttccccgccccttgcagccgcctcccggcctccgcaggtttccgaggttcccaccccgcccccgcgcgccggcgccgcaggccccgccgcctcccattggctccgccagttgctaggcgatgaacaaccgtggcctgcattggtcgggtgggggcctcggtagtctcctccttacctccaaaaaaacccggagaaaaagaagaccttatccctgcggtccgcgcgcgctgcgggcgcagctgcggctgcggcacctgttacgcccagtgattcacccggccgttttctgctccccgcccccttctgacgcctgcagcgtccggggccggggctctgtgggggccgggactctgcagggaccggggtcgtggctactttagagcacgttttccgagccccactgaaccccaacacccagcctagcagcaaaagtgaagcttccaggagagccacgtgcgtttgccaaagtggagaaataaactgcgggcacctagaattaggtcaggtccaaggaacgggaggttcaagcgtcgggagtcgtggatgcaaacaatccagccgggagaaagttatatgtaaaattagggcgaagaaatggatctgggcagaagaccgcgggcaaaggaaagactaagaaatagcattcgtgaactcagtttatgcaaaaatgtcttacacccactcgacaaagtatgtgcgatgaaaatgtatgcctgctgcacccgtggccagggtcaggctgtctcc

SEQ ID NO: 34221 - DNA, 1348 bp, Homo sapiens
tgcactgcattccagcctgggcaacagagcaaggccctgtatcaaaataacaacaacagtaataataataatgagattgggaggaaggcagaaaggagcaaaggaacatttgtcttaccttttattaacttgttatatgaatttttataagcatgtattatagtgatcttaaaatattttaattttgctgtaataaataggctctgattttaatatgcattaagctaatgacccacactttattctactcatatgttttcctcaggaacaagtgtttcaagtaccccagccagcattcaggccacagtgcttctactaacatgcatattcacatttggataataatgggccaacttataaaggctttcttctgtaatgcataccatctgggttatttcaataggagcaacaatttctggatctggtagagaacatttcctgttagggccttatgctgtaacagatgagaatatgggctgagtcacctctgcttaacggccccacttttattaattctgtgttctggccaggactacttttccagaaataacagaatgaataaacaaagtctttctgaatactgtgctaggcactttcatatccatggcttcattttattagcaagaccaactttaggctgtttataatttactgcaaaacagtatggggcagagtccaagggccaatagacttcagagtcttctcagtgggctagaattatcagggagtactccatggaagagaaaaatctagacaagggccttggggcaatcttgactctgcaagcttcacaatagttctgtgagttaaaaaagcttcgagaccagactgccagctctgctttctgacttctaaaacatggccttaaacttagctgggattgactcctctgactatcttagtgaatttctgcatcatgctgcatttccaaagatgattcatttctagctaatccctttggatttgggccagtagtagtagtagttgaaatgacagtatgtgccacttacaaagtgctgactgagtttgcaggaaaaacagaccactgctgttcactcttcctcccacctccagccaggtgaaaatctccagaaaaggaaactctccctcctccatcctgccatttccccaccccactaccacccaaccctgtcatacacaaacacacagatcagcagacaaatgcctgggtgttccattctcctgggtgttacattcttagtacttgagttttttgactgatctgctgagtgttttgccccatgatttcttctaaaaggactctttttgagtaagaacacctgatgaattttatcaagagctaacacattagttcccaactctccaa

SEQ ID NO: 34222 - DNA, 1179 bp, Homo sapiens
tcaattccattgcttaaaaaaatgaagtaatatattcatagagtataaaattcaaaatgtacaaaaggacatgctgtgagaagcttctcttctactcctcaccaagccacccagtttctcttctcaggaacaaccaggagtgtctgtttcttgtttattctttcagggacttgaattatttcttaaaagatgtatgcaaggtactcaagtgaaaaagaggaagctgagcattgcagacaaagagaacagcatgagactgttggggagtaggacccatgaggcggaaggcagtgagagagtcctctccaggaggggccttaccatgctaaggaatttggatctgatcctgaagcattaggaaagccattagtagatttagagcagaggatctgcctgatgaaattaatgatttacaaggaacactctggcagaaatgtgaagaatggattggagagaggcgagatcagtgaaagataccagttaggaggcaattgtaattgtccaaggaagaactaatgaggacttaaatcaagacagaatcggtgtggattggaaggggggccaactctggttgttaaggaagaaggatgaacagcatttttggatcaattggattccaatgaatttaattcctgttctctccttatctaagaattgcctaagagtcacatgccaagaataatcagaattaattgccctctccctttaagcagtcaccaaggcacccagtcttgtcttaaatatctagctcagtgaccttaagatatctaagcctcccaggtcaaatttcatcactcaaatctctattccccgctgtcatcagaaaaacccctccaaccacactcctctctgaacagtcccttcaccttgcagctcgaaaggaaactttcccctgagcactcggaattccctgcagtggtggccagttttctctcacctgtcacttcccactgttccagaggtgatgcagatgtcttccctactcctcactgtcacttccaaactgctgtcccttccttgccctcccccatcgggtcctttgccactcatgccatcaacctgctcctccctacaggcctcctggctgtagccctcccctgtcctcctgatcactaccacacatttcttggaaatgtcaacaccaagtttattgtctttctctcttgcattcttttgtca

SEQ ID NO: 34223 - DNA, 3029 bp, Homo sapiens
tacctgtaattgtatctaaattgcaagaggctcctaaagctccaagtgttggacttggaggtatgcggggaagtctatctgatcctcaaagtcttctgttcgcatttgccatctgctgagacatccgttgtcccatatgacccactcacctgcgtgttctccctttcccccatctttgggttggatgggtctctaatctacttctaggccaatctctggccctggggagtcttctgctcctgtcacagtgatgcttccatgagatactccagggtcatttcttctctgcgttttccccactctctgaggctccatctgggaaacaagacactgatttctacttcttttgaacctcacaaacataggctagattttgcccttttgtttccctccactgcttccagtccaggctgagcccagagaactggagcagggcctcctttctttcagacccaacaacaatgatttctcacgtaccttccatttcccttcaacactacgttctcttccaacctgggaagcccttgttcttattcagctgttttccctcacctatttttctgagccctttaaaaacccaaacaccaggaaaaaggtgcctttttctctgctttctcttattatagcctgtcttcaaggcaatgattagaaaaagagtagccgactaccagaggaaaggaactgatgggggaatatgtccttaaaatatttcaattattccttcttccattccaacaatgcatgagtggaaaaaagtacacagctgagttacttaaccttattcaaactcccataattagtttagacagcctggctatgtttcagaacgtccggaatgaagatcatattgaatgtctcccctcgcttagcccctgaaagaacagataaaatctccattgtaggtttacagctacaaagatttccacttcaaaattttccaaaaacacatgaattcgattccagtagaactcataaaagctagcaagcttagaccaagaaaaatgtggccagataacattcaccagctgctgcactttgagttttagttgaagcgttcaagttttcagtaaagtcccccctccctccattcgtgcctttttaaaagacgaaatagaagctagtgaaagtaaattttaatgcgtttagttctggattgtcccatcctgctgcacatttggatctcatgtcatgctaggagttgcattcatttttccattcatgcattcactaaatatttagtgagtgtgtgttaggactgtgctgagaactcacagtcacaactaagcatgtggcagtttgcttcttcttaaatatattttgggcttgtttcccaatccaacttgaccagtctatggaaacaaatttgaaaaaccattaaactattaaatgctctggccagaaacattaattattacgggctaagaaatgtgtcatcagaaaacatgtgattaagaaaaaaaagcattaatagtggctttcagccgaacaggcagagagtggaatgaaaaggccttttattaatgtgtaactgtgcgaatgaagcacggtggtgagagtgctttgtgccatctgagtatcaggttaaatgccactgcattattactggtctaatgaattttaaaagtatcattctaaagcaaatctagtgagcaacaaagataaggaaattctgctgccacagctgaaaacattgccaccaccaaggcactttctaaaccagcatatgctcagaatggattacactttgcacccattggaaactccctcctcaaaacaaacatctctttgaacttgcagttcttaacccaagttaaagactaagaaaaaaagcactaattgtaatctaacagttcagggaccaaaaggccaggtgttcgccttagttcacagtgtcatgcatagttcactgaaagttaactattcgatgttacatttttttcttacatatcctgtattttttcctccaaaatcaaaagctgaaactctctttgttaaatttctattaattagtaataattatggggcctactgccagctgaatcagatcattggctaaaaagaaaggttcccttatagaagttgctgggttgttttattatttatagaatagttaaggggtcaaagctatttccatatgaaatctaaataaagtgggtgttcagatgagatcccatctggagattagtgactttgaaaacgcaatatataaaagagaaataagaagaaatatcctttctcaaatacttaaccagcagttacagtataaggatgaacacttctatttaaatcacattttgtgataaaagccatgtctgtgcaaatctacatgggaagtggtaaaaatgaagacagaaacagtttcttcaactaagagccataaaatacctcactatggtatttgtaagttatcaggaaccatgactcagtctgcaccaatagaaaccagactttctgatagaagagaggtttgctgactcagagtcttcttgtctccctcaaattaggccctctgcctcaaagtcccagggcttcatctacagatcaaactggtaattcttaggtaacactgaacaaaggcttagtaataaagggtgagctaattatagcctcaaatccaatgcacgttatttgacaaaggatattgaaggatagtaggtagcgcagagggtcagtagtggaggctatccttgtagagtcagaagcaaggctcaaaccacatgataggggctactctggagaagacctcatagctcatactaatagggataggactagatgccaagaactctgccgtgactgctctttaaacatgggatgtttccaaccccaccttcaccaatagatcctttcttcactgtacctacatttcattttactcacttctaaataagaggtatgcacagtgtgaaccccaaatatctgaggtaggtctcagtcaattttaggaagtttatttaccaaggttcagaatgcgcccatgacacagcctcaggagatcctgacaacatgtgcccaaggtcggggcacag

SEQ ID NO: 34224 - DNA, 694 bp, Homo sapiens
gtaagcatttttgtctggtctcaattcattcatttgttcattctttttgctttcttgaaaaaaaaaaattaagatgctgtcgtgttccaaggcagtggcctaagtattgagaattcaggaataaattaagagcacagtccaagccctcattaacctccctgtggtttccctgccacccaccctggctgtacctactgcgcttggggtgtttagctcagaatcgcagaattgcgccccctggctgttcccttttgcaacagcggacgttgggagcagatgacgctcccagcagagctctgttaatggtagcaggttcccaaattcccggtcccagggcctgttcctgtcagcagttctcttacggcacctgttgactctgcactttgagaaatcaattcctctttagcgtcagggctgggcgtttcggcatcacctcctaggacactgctcacagtatgtgctgccaaaaggcaacagcaatgcacatcagatcctttccaaacgtccttgcttaaagacactggaaccggttgctcaacttcggtactgtgcagacgcttttacatcccctacaacccccaggagcgtgcctgcaaaatccaagcgagagatactttaagtaacccctaaatcgattaaagtatgcatcaagtggctattatgggaaaagagaagttttatttatatacagtac

SEQ ID NO: 34225 - DNA, 1602 bp, Homo sapiens
aacaaagctgtccagatggagttaagtgaaaaagacctgcgtggtagaagtagtgtgctgagactgagccatgcagtgtgtctctattaaagcctagccatgctgcaaatattttttaaaaattttcatgtccactttctcaactagatcatataggtatcagggattgggactatatattggtaccatttactttcatacttccagtatgtagcacagtgcctgtcataaggcaggcatttaatcaatatttattaatgagtaaatgatcaaatgagtgcataaatgaacaatctgaagatacaggtagctatttccccaagtgcaagaagacctttaaatactaataagagtagaatttgacccttaggtaaccaggttggagacgatagcaaatgagaagatagatgagcagaagtgatgttactatacctggaaaatcaactttactgttcctatgggtccattttactgaacagaggttttattatgaatcaccttgtttgcttggcaattctagttagtccagccaaagcaaatgtatttcatggggcctttggcaagactgctttccttttctttgtatgtgtgtacaagatgattcataacacatacccatgtaattgaagtatttaatgtttgtgcctagctaaaatgagatcaggtcatcagcccattcttatacaaagtcttagcaataaatctcataaactgttttttggtagaatcacagactctgagacttgcaagaattcttacagggtgcctatctatcctcccactctatgaaggaatcccctaaatggcactacacacaagggtcatcaacatctacttaacacttcccacaaggacttcacctcactgcaccaggctgccaggtccactgcagaggagctccgatttttagaaaagtcttttgacaatgagttaaaatattctttctgtaacttctacttggtcctagttttaacttccagacctctgaaataaaattccttttccaggtaacaattcttaaaatgttttaagagaattgctatgtcatttcttctctggtgacactcccccaattccttcatctgttctggatccttcaaaactccagttaccttcctacaggtgcttactacactgactaaattcctcttaaaatgtgatggccagaattggccttaagatgcaccgtggactgatctgtttccaaagaaagcaaaacaatttgttctccaactctggattctacacctttgattaacgtgcctgcaactgcatgtccctttttggagaaccacgtgggcatgatgtaatctaccccacagcatttctggttcatagaaacccttaagtcttttgttttccttgaacatgcactgttatcaagaaggtcttactcatctttgtggagttgtgattcgcaaatgtgtgtacgtgtgtgtacgtgtgtgtacgtgtgtgtgttttatctaaacaatgagcatatctagtctcttaaaatgctgttcttgcttgttttggcataacatttgactctgttgatggctatttagatctggaacctcctacttaacctattagctattcttcccacatattttgcca

SEQ ID NO: 34226 - DNA, 705 bp, Homo sapiens
ggattacttgaggccagggattcaagaccagcctgggaaacataatgagacctgtctctgcaaaaagtagaaacaattagttgggcatggtgcacatctgtagtcctagctacttgagaagttgaggtgggaggatcacttgagcccagtagttcaaggttacagtgagctaggatcactgcactccagcctggatgacagagcaggaccctgtctctaaataaataaatacgtaaaataaaataaaataaaataaatgatgacaacactgtgcaatatgatgcaagggttaggtacacatcccaggaccaaagtgcactcaaatcttagctcttccaattactgtgtgacctggggtaacttatttaacttctctgcttagaataggaatggtgataatacatacttcatataaaaattaaataagtaaatatccatagagtgcttatttaagctcctggcaaatacaattatataagtgcttgcttctatttttaaacagggtgtcactctgtcgcccaggctgcccagtggcaaaatcacagctcactgcagccttgaactcctgggctcaggcactcctcccacctcagcctcccaattagctgggaccacaggtgtgtgccaccacacctggcttatttatttatttatttgtagagatgggggtctcactatgttgcccagctggtttcaaactcctgg

SEQ ID NO: 34227 - DNA, 590 bp, Homo sapiens
aaaaaaaaagaatcaccatttggcaacattcatagaggtggctgattcaggcagacgtcatcaataaatggtagtttctgtaggtacaggtttaatgaggaacaggctatttgcataaccctagaatagttccccacaaacactagtacaaaggtgttttcaaacacctttggggaaacaaagggaaacgaaggaaaaatggcgaatttaaggtgaagaaatctggcaaacaccaacataaccaggtgattgaggtcaatatcccagcagtgggatgggttggcaccatgtgccttctgttgtaagaagctaagaagagctgagtttcatttctgaaggattcctgccaagaatgcatgacctcagtcaggctgtgaagaaatacccaatacagccaggttgggagtcatcctacagcatgtaggacctatacaactgcaaacactttaggaacagggaaagtctgaggaaccgttccagaagagacatggtaactaaatgtaacatgaatcctagatcagacaggtagaagagacatttgggggataactgacgaaataggaatgggctctgtggattggatgatagtg

SEQ ID NO: 34228 - DNA, 394 bp, Homo sapiens
aacatgccaggcatcttcctctccctgggcatctgtgcttgctgttcagtactttctccagagatttttctaattttattttcacgagttcactctaaaaaatggtttgtttgtttttaaagacagggcctcactcagttgcacaggctggagtgcagtgatgcaatcatagctcactgcagcctcaagctgttgggcttaagcaatcctcttgcctcaggctcctgagtagctaggactacagacacataccaccacacctgactttaaaaaaatatattgaatgccttctatgtgccagggtctaccattttaaacaggatggtcagggaaggtgacacttgaacaaggcctgaaagaggtgaggggtttcacctgtagtcttctagaagtg

SEQ ID NO: 34229 - DNA, 630 bp, Homo sapiens
gaaacatgtaattaaaccagcatattttcaggtcctcagataagcacatcgtgtgtgtgcacttcagatgaaaaggcaattaactccagttggatggtggcctaggtgctcttcacggcttcactaatccagcactgtaaataattaacatctccctgcacccttctaccttggagtgctgcccagggtcggcgctgctccaccgggttgctaagttgccattgccagggcagatctgtgcaactgagcaaggtcctcacaacggaaattaaatatctcagtgaagggctgatgaacccctgtgtggtcaatttcctcctgccatggctgatcagctctctgcgggcacgggctcatgtgaaacagcacacactgtcagagcagaaccctgcacaccagcaaaaccagccttgggagcttattgggaaacgatggatttttaaaagttgtgtaattgcttttaaatgctttcttgttaacaaatatgacataaaaagcatagacggtgagtatgacagataatataggttgtgtttttctacaatgccaatgctccaaacttaaaaagacagaaaataagctttcccaaactcatctgtatatgtgatattctgagatgtttttattctt

SEQ ID NO: 34230 - DNA, 3174 bp, Homo sapiens
tgtgtgtatgtatgcatgtgtgtgcgtgcctgggagaggcaaaaaaaaaaagttgtaatgagtaaaatgacagtttatgaagcctataaaatctaccttgaatcaaattcaaatttacaaactccacaaaagtctacggatttgcctagagctacaaagaataaaaatcaagacagtgccgcccatctgtaaacctactaaaagtgtgttatacttaacctttactcctttaggtaatacttagggaatagacacactggtttttcgagaagaaatcacaacctcaattcttcatgccattgtctgattaaaaagaaaaaaaaaagcaaaacgagtaaatgcattacattaagtaaccccgaaattactttaagctgccacttacatgacacttactttcgcccggtaacgtacctgtcgcaaaaacataactttttcttggctcttaagacagaagcccagtcggtaaacagtaaggctcgcggtgctagcattttcatcgcaaagtatcctacctgtcagcgtaattctttggtctggaggcaccgacaggacacggttttcacgcactttcaaagcgcccacatttggggaggctgcctgcgttcctgtgactttgggagccgtcccacgggcacgacccttcattcccagggacagcagacgccctttgtacatccacttctgcagcttcttgactgtcactgccggcggcctgaggaaggaggggccttcctggcggtctcctttgccactgcgtatcacagaggaccccgctggatccctgaaagggcttcccgaggagcagccgtggtccttgcagcctggaggctggaggccggtgggtgcagccgcccgggcgcggtccccactccagccgtccatcctgcctccacgtggcgggggctcgtcccagtcccggtgcgcgccgcacctgatccagctgtcgctcggccaccgctggaagggaggcggcttggcacccacccggaggctctcgaggcttctgctgcaggacggccgcatccgaggagtccgcagctggcctccccgcggctccctctgaggcgaccggggcggggacacctgctgccgagggcgtccgccgcctccccgctccccgtcccgggggcaggctcggcggtacgcggcgccgcgggaaggcggctggcccggagcccgggctcccgcggggaagctgtgatccgccaagcccctgccgccccgccgcgcgcccgagtcagggggcaggtcgtgcatggcctggatcagcagataataggcctctcgcaactgggtccgcagcctgcctgtctccaggcggccgccctccgcccccagggaggagcccgccgctgggggaggcgggggacgccgttccgcctccgccccctcaggctcgggcgcagactgcgagccgccgggcaggttttcgtagtagtcggcgtcgtagtcgtcttcgtccttgtcgtcttcctcctcctctccgctgtcctcggagccctccggggagtgcggaggggcgtgagcgagcccatggctctggggggcggcctcctgcccgccgcgcggccgaggcccgagcgcccccaactgctccgggtgccctccggggacccgcgccccgggaccccacgcctcaggtgacggcgagggctgctgtaggctccgcccgtgtcccccggcgtgctcacgtgggagggtgtctgcggcaccccaggcgtctcccgcggctgccgaagaggccgccaccgcagctgcggctgccgcccggagccctagccccccggtgccgcggggaccccgccttccccggagcctggacagcgtcctcctcagagggtccgccatcccctctgccttagccgcgaggctcacccccgccagggggagaggtcggagccccgctggggagaaaaccgcgctcgcggaggcggaggcggaggcggcggcggctccccatgaccggcgctggccctcgccggctcctcacatacttggcataactctgccgcgggaaggcgtgggggagggcggtggcgccgcaacgcgcatgccccggagccccgggccgcgacggggcgcgcgggccgggggcggcagaggtgggttctcggggtgggcgagtggtgcaggtggaggcggagggcgcgggccggtaggttgagtagtaggtcggctgaagctgaccgacggaagcaggggtgggcgcacagagcgcgaagggtgcggggagagttgaggcaggggaaagaagaacgagcaggaacgtgagtttgggctggtggctgcaaagttttggttagggagcccgagaaagggaaagtgccctcctggctgtcaccccagcaccttcaccgccaccgctgcacgaggtgtgtcttaggcacagcaagtcctagcttgagagaaaacaaagattgttttgacggacaaagtacgagtgcaggtgtatctcggtgcatgtgttctagaaatgtatcaatcattttaatcgcccagagagctagctagctaaaagaaatttgcagcgattccttttctataagagttcttttatcaaaaacaaaacaaaacccacccaccgatgtctcttttaagtctgtttttccttctttatttcagttaatgcatgctaacaaaattattacatcagccaaaacttgtaaaatggagccacaaatattatgtccctcatcaccctacctacaagattatcatacaggtttgcagctttctaatataaaaaagttaacacttcattttaatttaaatagtgagttgagaagcaattgaattgaagttgagacacagtgtaatctagaaataccggctgtctcccaaaaacgttaaattccaggttctgggcagcagttgcaaactcaagtacccctcgttgccagagattaattgattcagtgactgataagaatcagtcgtgctatcatccctgatttgagttactttttttagtgtttacatagtagaaagggcctttttctgagttactcataaatatgctgacacctagcacagtgcgtgcacttagtagatactcaaatacttaagaaaatatttgttgaataaataaatgtttgcattactgaataaaatgaaataattttgccctaatttaccttatttgcaactgcagtatattttcctatgtcagtt

SEQ ID NO: 34231 - DNA, 1463 bp, Homo sapiens
ttaagcaagcacattaagaagcactgtgacgaaccgaggttcctacgatggacgtgggcacatgcaactccctgccgttcgcttatcgttcaggctgactttttttttctttaaggttgaaagacacatttttccatcaaaatcacaatactgttaagtgaaaagccaaagggttccctatatgaataaagctaataacttttagttaccaaagaagaatccagtctcagagatactacgccaaggctgaccccttcaggaggctgcagcagacactgtcttggaggcagcaccgcaggcacttcggcgtcaaagggaaggggtctcagggagaagctgcagcggggggggcgggggagtcaccactgttagtcctcgccgcgcggggtcggggcaccgagcgcggaggtttgggtctcctcacaaggggcggggctgcgggtccggtctaacacccaccaggcggggagagggggccaggtttcccagggcttgaggtgggagggggtggtgcggcatcccgcgggggtgactgcgtgtggggggatggacagcaggtccccagcagggggctcaggagaaagggggcgcaggccggggccgagaccgagaaacggggtcggggacctcacctcctcaggcgccttgacgacgtgcctctcccagtctatctgtttgttgagcggattgtagagaaaggccgggcgagtcacgctcctaaacagctcgtcaggtcccgggagccgcttctccgccttgttcctacagccgcccgccgacttcgccggatccggggttctgcgactcgtctcctccggctcgatgttatcctcctcgtccgaggagcctgagctgctgctcccgtatgccgcaaaatagctcagagggtccttctcctccgctgccatgacggctgcgagcgacaacccagcactccgccggaagccggaaaccggaaaccggaagccaccccagggcccgcccctcgcgtggccccgccccaactcttacaaataagcctgcagtctgcgccccctggcggttgcgccacgctcctgctccccctcggaggggctgaggctggaggcgggcccggcacgttcccaagcaggggcgggggctgcttttgctcatttctgaggagctctgagaagagacgaagttctgagccagggatcccagccaaacttcctgcattcgatagcatttaccaaaggcatagaagacctaagaattttgtcttttcgctgtcactccactttagcccttgcccagagagggtaggattttttcctgatccactgcatctcgtcttccaaataaaaattactctcagtgtgtttccctaggttgtcatggaagacctctaggggtggtggacttcccaagccaagaaccaaatcatttcctgcttgacctcattcaagtgcgctctgaatagctttgacaaaactcctcttgga

SEQ ID NO: 34232 - DNA, 2378 bp, Homo sapiens
atcagaagacattttgaaaatatcatgaaaaaaacctctaagaaaaaagcatgcacatagtttctttcatagaccttttgaaacccatccatggtttcctcaaggttatttatttctgatataggcgtaaaatgaaatcctgaagacagataacatcaatgaattgacagagaagaacaaagacctggaagccactcttcacatctgtacttgtatacagatcttatttccttccacttgtaatttctcagttcctgttttattagctgtaaaatgggaatggcaattatcttctttagaggttgttgcgaaggttaagtgggaacattgtaaactgtgtgacacagcatctggaacataggaggcctagctcttggaagttcaaggttttactggcactcaccatgaataagacaacatttattctacagtagttatttatgttccattcttatctcaactagaatgtaaagcaggaaactgatcttcatttttttgtatccttccagacccaaggccagtgctttccatatagcaagtgctccataaatctctgttgaatgaggaaactaagcacaactcccagtcatatccagtttccttctgctggtgagtcacaccaattgtgagtacagtgtaataaaccttacagggaagaggaagggatttgaagtggatgaacatttaaaaagttgccatcctgtccagttcatcaaaatgactttgtaaaagtactgcagtgttcaataagaacacgtttcatgttgagtttctgtttttcatttgacttcagataaagtattttagtgatactcatataggtctcatctgacaaaacaagtaaacgcaaaggaaaaagaatgtcatatctcaacaaagccattcgttacgaataaatatgaaggtttatgtggttctgcaccatccgagaagagcataatttagctactgaatattttcgacgtttacctgtacattaattctcagctacgtgtattcactcccccaaccccaatttaaatatgtgggcgtctgcttactaggggaattccaggttgtgctttcagctgttgagcttcctcaagcccccttatgcaaaagagcttcacatttttggtccactgcttgggatccttcacctggtacagccttcgctctaggctgagtgagcagcctaggcagcctgacttaaggatgaatctgagccgccagtccctaacgaagcatctccaagaacccagttggggggaaagcatgaggagatgggtgaggagtgggcaagaatcaaaacaccacttggcaacaaagcccaagctctgcgtttagcgatgtaaaacctggattgacagatcactggaggatcactgccaccaaggtccctcggatgcagggctcgccacagtcctcctgtgctaggactttccgctcctccgacctggaggatcctccttgtcctcggactccaggcttccgctttcgtctcccgctgggctgcagcccgcccccgcccgccctgggcacagctgcgttactcacgtccttcttcacttcagtgaggtcctcctcggtgagggacggtgcggtgggctccatggtggaggcgggagatggcgcttcttccgggtccgggagctcgggctgcgccgccccgccctggctgggggcttcggcctccgggtaatggggaagaaggagaggaggcggagcgggtcgggagaaagacggccgccccttcgggaacagagggactcgggggtcaaaccgtagcgcttccggccccgcctctgaggtcgacggcgacgcgaatctacgcgacgcgacgcggagctcggagcagcgttccttccctctcgtagaggctcaggcgcaggcaccgccccacggcgaggcgcgtcgcttagcagagcccgccctgtctctgcggcagcctatcgacgccagcccgcgggccgatcctgttcccgcccccgaccggagcctttcgggtggctccgcccacagcgggcgtttcctcaagccacgcctgcgcaggtcgtcggtaagtggcccgggttagcttcctcataaggcatcgtttccgtgggtggggtccgtcagtgcccaggcagctggcactctcagcctttgctgcctgctcacttcgggggagtccggtctgggcttgtcagtaccttgggttcctccccttttcccagaccctgccctacaatttcctgttgttacgtttgccagttactgttttggtcacacacaaacgcactcatacacacatacacatgcatacacacaaacagcctaactacaatactaaacaaatttttgaaagaaaaaaagaaaccacctacaatcccaccactttaacacctcatttaacgttt

SEQ ID NO: 34233 - DNA, 2244 bp, Homo sapiens
gtatttctagttctagatccttgaggaattgccagtttcacttgggagtgaatccatagacctcttcatgctaccatattgaagctgtaacccttactactgtcatttagtagatgctgtgatttgaatgtgttccccaaaggtttaagcattggaaacttaatcattaaaacaacagtgtttggaagtgaggcctaagaagaagtgattgggtcatgagggtggtgccttcacaaatgcattaatgtcattgtcatgggagtgggttagttatcatgggaatgggtagttataaggtaagcctgatccctagtgcctctgtcttgtgcacttgcttccgccttccaccatgggatgaaccttgttagatgctggtaccatgctctaggacttcccagatccagaatcatgagccaaataaacttctattgtttatcatttacccagtgtgtggtattctgttataagccacagaaaatgaactaaaacactagatgagggcaatgttcatctatttgggagactaggggtagtagaggggaaacgaaagtcacccagaatcagaatatagtacaaaggcctactaaaagattccagggtgggaaaggaataccttggtatggatgttaagtatatcagatgttagtggatagaaggaccactcctgcacatggtccttcaaatgctacttgaacaccccaggaaaggggaattcactactattagtttagactgactattatccccataagcaatatgaccaagtaaaaccaaaacagctgtgcctgccaagatgagcaggatgtacaaacaaaaggaaacagaaaagaggtacttcaggatcctaaacaactttatgttaccagaaggtcatgggcatgctacaaaaaggcaactagctgttttgggataccaggtgcccaagagactgctctaattttagaaataacacagtgcttactaaagaggtccaggactcatgggtctggaatgcaacgttcttccaccctcaggccgtgcatactcatgttctggtgttgattctgctccaattattttctgatgttgagggagggaggaccagaccacagaactggcatgtgcctaaggaatctgccaagagttattaaatgataactgaaataataaattatttaaatttacagagacttgtaaatttacagagttggttatgaccactgtctgataggctaagagctcattttcacagtggccttgtgctgatatcctctgactctccagatccatcctctgcccttctctgccagttctctgccctagaacgctgacctcctaggctggaggcatcccctgagcccccaactgcatcttgtggttgtgttcagccaatggggagcaccagcagatcagagttaggagagaaagaggttaaggtacttcttctctgctctctggctgggtctgtggccctgccttctctgtcttatattttgcagcacaattttctgtccttgtcctgctgggcctaggagtgctgctgacatctgttttccgggtgtcttaccaccccttgtttttacccttaacacccatacttctgaaacagaccttcattaaggtcatctctttatttgaaccaagtgggaatgaattatatttcctaacagactccttgatactattatatcttgccctgctaacaacattccttctgtctctcccaattattatcaagcctggaaagaagcaaaccccatgttactgtcttagcattaactctaggggacctcataccctcatctgggtcccctgtaaacaaaatgatgactttgctcacatccttccctggaattttaagcctctgtggccctgtgaatcagtatttattccactagctccttttacacagctagactgttgcttgaaatcagaacttgtttggttcctgagcttttcctccatcaatgtgaaatatgcagtctttgtaccctggtgggatagaggcacattcaacctatagcatatagggtcctagtttaattttgaatggtcatcctctgagttcttacctcaaagccttagctaataaataagctttcttgtccatgagcaggaatttaaagttcctgcttttaaagtgcttttaaagtgagaaatggggagatgccaaagggcagaaagtttcagttttcaagatagaaaaatgctggagatcaaatgtattgcaatgtgattatagttaacaatattctattacatact

SEQ ID NO: 34234 - DNA, 3782 bp, Homo sapiens
ttgtgtaatttaaaggctagagaagaaagaagtttaaattggatcccacagtaaatattcacggatatttcaaagtagaattgtccactgtctggggttgggttcaagcatcaaggtgatcgcttcctgaacatgttcattgaccatgaggagctgtttactctggctcatattagactaccagtaattattttcagacatgatgtctcttttgaaagaaatgactttgctggactaggataactgcaggggtagaagactggaaatacggtgagtcagggtaggtggaaacagaaatgagtagaaggaaaaaaaaaaaagagttcctccaaggtcatatatggtcagtaatgaagcaaaaattcatggtatgtgacttaaagactttctaagacattgtacccatgggatgtttccaagcttcttgatctttaatcttttagcaaccttctgatactggatttaccttcctaggtgtggtgccctccttctggaatttagatctctggggcaaaccctgtcaggatgtgcctctgtgtagttaacactgccccagacagcagctctgatttcagtcacagttctgctgagaagcctgtctgcccctggcaggggtgaggggagggttgttggtggcagatgtagtcagaggcagaggagaccaatggcagacagggtggacctgcaggaaggtagccagaaggaaagaccttgggttttacccaaggtcaaggtggctgtgatagaagagcgaaaggcaaaagtaactaactgaatttcagaattcagaagtaaaagagaaaggaggaggatccctggaccagggactttcacaggaaccaaacatgattcatgaaaaaaaaaaaaaaaaaaagcaagcttatctgactgatcaagaagacattcttcagaatatactggcaactaaataattttcacaccaaaaatacagacactaaatgagtgtttccttactgggattaatcacattttgataattcattagctctgtatcttctaggttgcttaattcatttagcaaatccacagcttaggtaccacctcgaggggagggagggtgggggtgttgaatgaagcaattcaacttagaatcaaattttgtaaacaagagttagtagcacagtggcacagtagattgtcaaggaaaacaacaggagtgggcacagagtcatcggccttgcctgtgcggtcttgccggcaaccgggggggactctgcagctcaggagtctactttcttgttaattaaaactgagcagcaggtgagcagcccatccaccttttccagttcagacatgctcacggggatcagcatatggtccttcagtttctcataaacctacagtgggaatcaaggaaaaggaagaaaagaaggattatgttttaccatcctcagaagtggagaatcaatttgatttgtacatctaggcttttcattcatttaatcccaagacacacaggcagtctcaaccacacacatgcccacagtcatccctatagagctggtgggaactggttaaccactagccctgtgctttaacctcaaggccaaagatgtgtcagaaatgtggttttgctagagatgcctttactctgccattgtcattgctagattaagtggtacatggaagttggtgaccatgtgtcagtctgaatattactttctcttcacactttatttttatttatttatatatttttggagacagggtcttgctctgtcgtccaggttggtgtacagtggcgcgaccatggctcactgcagcctcaacttcccaggctcaagtgatcctcccacctcagcctcctaagtacctgggacaaacaacagatacacaccactatccctggctaatttttattttttattttctgtggagacagggtctcactattttgccagggctggtcttgggttcctgggctcaagtgatcatcctgccttggccttccaaagtgctggtattaaacaggcataagccaccacactaggccttctcttcacagtttaaaaccctctcaactatactttaggtttattttcttaccaacactgctggaaaaatttgacaagatataacttaagtatttcaggttaaactgcttttaaattacaggtatgaattttattagcatcttttgacactaatagaaagcatatgtcaaaacttcaattaacagttcatagattgttctgtgatgatcaaacaaagcatatttttaaaaacagaatcacttgaaagtgtactgcctaataacaatctcctgtgcttctttaggaagcactgcgtttcttaaaattcagcacagtggttaattaagagtgttggagccagagtagggtcccaaacccagttctgtcaacctactacttaaagaattatttcagtgaagtgacattccctctgagcctcggtttacttctctgtaatattggaatagtaatgttgcccccatagggctgttacaaggactgaataagataatacacctgggatgcctggcaccctgcctggcaccggggaagccctcagtaaacagggatattattaatactattgttatttttgagagacaaacggctgaatcaggggggcagtgaataatcatctggtaggtcagatgatcaatgtggctaaagagggatgaatgattcagacctgtatttctcaaagtgagttctgtgactgggtgcttgttgatattgcagattctagggtgggggtccaggaacttgcatttttagcaaccctgatgtgcattaaagtatgagatccattactcatctaagagctgggtaagccccagttctgggtcaggagtactctattttcctcaggttcacactttcagccatggaaatagaaaaaattatctatgtattccctcacctttttctttttatctgctcagaaagaggctgtgattagagagtgaacctagtaattatatcatattgcatatttaaaaggtagtataaaatattttctaatatttgcgaagcttaagacaaaaaaaaaagatcaatgattactaaaggctcttctgtaatgcatagtataaatatcttgttcctccgggcagagatgagatgctgagtgcctagaagatatggacacttgaagaatctatggacgagcactgttatgtttgcttggtagggtaaaatcgaaattactaaagtatatagatgagactggcagagtatgctgaaaaacaagggagattttcttagaccaggaaaagcattccagatccagagagagctcccttattggaacacaaacacagagactcctggagcgaccagttggctgatttcgagtgtaccatattactacctgctctatcttttcaatgaagagctttttgctacctagcacgggcagtttcttctttctgcagccctgacaatgaacacccaccactctgggtcattcatactcctctacctaaagaaacaaatggccaggtgtggtggctcatgcctgtgcactttgggaggctgaagtgggaggatcctttaagcccaggagtttgagactagcttgggcaacataaggagaccccgtctctacaaaaaataaaaaattagccaggtataatggtgcatgcttgtagtcccagctactcgggaggctgaggtaggaggattgctcagcccaggaatttgaggctgcagtgagacatgattatgccactgcactccagacttggcaacagagcaagatcctgtctcaaaaaaaaaaaaaaaaaaggactg

SEQ ID NO: 34235 - DNA, 6502 bp, Homo sapiens
agccttgaatacccggcatgatcatctcaattactatgcatgcattagtgagcaatgacatgaatgagaaaagtgaaacacattttccttgtgccctaaattgtattatcctttcttttcttaattgtttgatatgtatacaggaaaaggaggctcctattggtcactcctttatgaaaaaatccccagggaggctgacccagctgcagtggtcagaagggatatttttttacctttgcactttctggatactcttccggggttcggtgcagcaagacgtgccctttgttggggatatttagatatatacagtttgctgctatgtcatcaggcacagtgagtttgtcgtagcggtggtcactcatctgttgcatgatctataaagagaaacaaagcaggcctaagaagagtaactccccacactttcaaacagaaggaaggcagtgtggtaggatacaagcttggaactgacactttaggctgttcctctgttcaaattcccatctattacctccagtcacttagaaccagaaaaggaaaacttgattaagctatgagtctttggaagaattgcaagggtttttgttgctctttaaaagtatgtgtttgtctctcttttcttttaaggttttaaaaccgtctattatttttctagtctttgttcgtaagacttatcagtaagatgcaaaatggccacatgtaaggcccagcaggggttttgatatctttggctgagtaagcagggctgcctcctctataggaaagaagggccataccagtaatcagaatagtcaataatgtgaatctgattaatcagtaacaccacacgtgtgtgcatgcacgtgcgtgcgcgcgcgcgcgcacacacacacgctttgctcttccacatacttttaaactgaattcacctgttcattggcaggtgatggccttaatacaatgagcataaaagccacctggggagaataagaaaatcatattcccaggcctcacccttagggaaagctggtttggcagattttgggtgaggcataggaattttgcattttgaagccctacagataattttgaggcagaggttccctggaccacaactggagagaaaaaaaaaaaaacctacttggcaggtctgttcttcaaatgatgaacttattagtatcctagcataaaataactttaaaaacaacacaaaaatgaactctgcacaaaatttaaaatattgatacctcatccttacctcctcaacataatcaaaactatcaaaaaacaacactcctccccctaacaacaagaatatccaaattaaaaacccacaaaaacaaatattatttggggtttagtcatgtagactctttctactctttatcaatatccatacagttttaaggaatctgctgaaatatcatgctaggaaggtataacatgatcttttccacaatctggttctaatctacctttatggtcccatttacttttacttttcagtgtttgtatggaaatgtgcttcatattactaggcagacatgcccactcagtcatgggggcactggatagtaagatttatggtatgaaaagcagaagagagacagcatgcttcctgtagaaaattcattcctaagagtggcacatagtaagcccttcctgactcaccagtcaggtaaatcattcacttctagtgtggaatatgtcaagggtggagagaggccaagagcaatcccataatggaatacccttcacatggaatgaaacatcaggaatggggatgagcttatgcactgtatgaaaggctgagacatacagatgaacaggtcacagacccagttttccaagattacagtttagtggaggaaactgacagaaaaatagataattatattacaataagaactagcagggcaccatgccaaacattttacatttattatctaatctcaaacttctattttacagatgaagaaactgcactgagagaggtcaaataacttgctttaggtcacataggtagattcaaacccagatctgtgcaactcaaaacgtttcttaatcatctcactttgctctttctcaacttctgcagcaggaaactacctcctacaaactacataacacctactttttcacattcacttgatacttattattcattctctggcagtaccattaattcttttcttgtatgtaatcctgttatgacctgctaccgtctggtataggtaaaggacttaactggacatctctcttgcacttttgaatttaaattgttcttgaagggataggcccatagaggggctcacctatggagtgggtctttctttacagccctgattagaaaccttagatctaatccaacatgtgggcaattaagaagttaaagacactcctaaagattaacttttctaagaaaattaacaacatattcaatttagccctctttataaaatggatatgcccagaaataatatgaagacgcttgagagaataaaaaaacagacccaagtagctcttttgttacgaattgcaatttagttcttcttatgcagattttctttttggctgcttccaaaacacaataatagcagcttccatttattattgtgtgcaagggaacaaatgaagaccgcctgagcccgggagtttgagaccagcctgggcaacatggcgaaaccctgtctctacaaaaaaattagctgggtgtggtggcacacacctgtagtcacctcctcaggaggctgaggtgggaagatcatagaggttgccaccagccgagatagtgccactgcactccagcctgagccacagataatctgtcttggagtctaatccttagtcttaaaaaccataaaagactagacctaccatattctcacaattacttcttcagcttccttctttctaaggcctacgttaacatgtaatctagtagtgttgcaggcttagcatcccttctacctagatcccctagagagataattgctacaaagttcccaaagtttttggaataaggacaaattttactatgagtttttgtgcagttttgctctcttcaaccagactgctacctccttgaatgcaggtccaggcataatgaggtggacagagcatgggcttcagagtcagaaaggtctgggtctgaagccttgctcagccacacactaattgtgtgactttgggaaagtcacatatgccctgtgagcctcaattccctcagcagtaaaatgggatgggaatgctatacctatcctccacagggtaactctgaagattatttaaaaaaaaccccaaaacagataatgtacataaaatgcttagcacaagcttctagcagatattaaatgtgtaataaaagtcggttcacttccctctttgtttcttgcaagtcacttgacatatagcaggtgaccaaaatatgtttgcactaactggttcatttcttcattcctttcacctttttaaacgctacagagaacctcaggagggcactgtgatgaactgtgtggtcaatcacatgggtaaacaattgaattccctcagagaaacaaggtatggtctatgtccagaaacagaaatacaactcattatttttaatgtgaaaaaacatggctaaaatcaacaaggccaaggtttgtctgtttttcaaagccatacagaagggcactatactctgtggtcctaactcaaatgactctggatgacaaagtaagacaacagggggttggatctggaattacctgcagagtatgtggcacctaagggcattcacagaaagaaagaaaagaaaaacttttgtgtatatcaaaccgaacacataagcctctgtcaggttgtgaccccaatttagtaaaatagtccataaacccaatgggcagattgacttcttcatagtagagtggggctgcctcgatatgcaaggtggcagttaggatttgtgaaacttctagacaatagcttttggtcagtctcacaaacgtgcttttttccaggtgcagggaatgggattccactatgtctaaatctctgtttattatgtgctgttgagggtggaccaagatggccagtctgctcatgtttgcagtcagaactggacggtcatcctgtcacatgaattggacctagtttacccaagaagttcagaatttcttccagacaactggggaggcagttctctgagccagaggtttactaagtaggaccccagtggtttgaggacctcagagagatccttagaacatgtatacacaaccactgctacctggtcaacctagacacaaacaaaacaaaatctagaaaatctattactcacattgacttacttttctaagcaattgggaaaactgtgtgtggcatattttggcccacacattcaggctaagtgctcccaccactcataatcaccagataactgccagttggctttccattttaatttgtgatctgcagaagcttcattgtactctttacccacagataaataaatcacccatgtctcttagtaccagatgaattgaaagagaaagaaacatggcaagactacatctcttaggcctgactttattcactggatctagcggtctgggcaaattccccacctctcagtgtgactcatgcatgtccggaggtgactacaaagcaaaagcatggaatgtcatacattccagaggaagtgttctcagggattgttatcagtgctgacttcttgtttaccagtgaggaaacaaactaaaatctccaaggttgtgcccatctcagaaagtaccacgtgtcactgaagtgacagggcctgtccagttgacttcagctgtttccatgctctgccctatcccccaacctcacctccttgagtgaacaatcctctcccctacttggttcctatttgaattgttcttcagttactggcatgtatttgaaattgtaatcactcttcattctttaatgcttcttccttttctgagccttattttttatcatttaaagcttctggtggggacattcctatacttactaacataaaggccagtacctactttagaattatttgaggacagtttcaatttttcattactgggaggaaaggaattataatatctttagtggggaaataatttaatgctgagaatatatgaagtaattcattgataaattctactgagagttactcttaaaataaatgtcttaacaaaaccccaacaaagctaccttaggagaagcttttcaattaatttatcaagactccacggttatcattttaagacagatttaagaatatgcccaaagaaatgacttttaataatgaacaggccccatttggagcagtgagtagttctgcttaactgaaaaaaattacaaaagttatgtcaggtgtagcctttctaaataaaagggatgtatgaagtggtaactgtagataacaaacaagaaatatgcttttcccccttgaaaatgctaaaggtgcttattataaacacaaagagattttgtctttcgaggcaaagaacagatttctcctttcctgttggagtaattattttcctttctcttgtatgttgttattgtctgaataagcttaccatttatttgtagctgggtttaggagacacatgtatgtacacaagacagggtgctggccattcagcagggaacatgcagagaaagatgcaggaaggctgtgttgctcttgaacatctttccctttttacaccctaatgggcactgtgaggatgtgttaacacatcctgtctggtagggtatcacctcaaagagctcaggctcctgaggactgagcaacagtgaggccaaggaacaggttctgtttcccctttgtggatgcacagaggctttgttaaaagatgagcaccatttcaaatatcccgagaatgcagctgttgggccgtttagttctgttccaacattttttcctaaaaaagcatggaggaggtggtactgctccagtgctgtatgtagtgtttttccaaccccagggactgtacttcctgcttctcactgtgtctcaagccagaatggaaaggagacacacctaaaccctccacacgtcaccacaaattcctttccctaagagcagattacttgatatcctgagaggccccagactcaactctgaatgatacaaatgagttctacaggatttgggggaaagatctgagaagtcaagttgctgttccgaatgccctttctgaattttgccaaaggaatgattccactttatggaaactaatttgagtgattattatggggattagatcaattggtggtcagctctgttcaacaatcttttatggtacgcccccttcgggctcagcacaatggcagtgtgaggtgggaaagggaaagagatgccttcaggagatgaaaagctatcatttaaggcaggacaagcacatgaagagtatgctagcagtaaaaagacagtcaacctcacttttatcataggcaactccttaacgaagaaggcacgcagctgtagggaggaaatagctctgagaatcat

SEQ ID NO: 34236 - DNA, 1181 bp, Homo sapiens
tgccattgtactccagcctgggagacagagcaagactccgtctcaaaaaaaaaaaaaaaaatatatatatatatgatcttcacacctaacaggtattgttactgctactgataatatgactggtagtagccgaactttatggagttcttatcgtttgccagggtgtgggtaaaaaagaaataagtgattagaaaacatacaaaaactctaatagattcagcgcttttcatttagctcctaattgtttttcattgttgttgtttttggaaccctataacgatgagtcacctctcagtatgtggtcacaggtttaaacttggtcccacttcgggaagagataaagggaatggctgttgtaatctatctccaaagctacctttaacatttgcaaacagatagtgtgatgagtaatatggggacccaacagcagcaacagaaccatagctgagaaaatgagatttagaaatattcttaaagattattggacaaatacaacattttgaaagatgaaaacaaggaaaaatagtaagtgattaagagcagggcaatggtagtgggatggttttgcaggagggtggtagaaaatttaatgtgtttcttttgcatgtcagtatttctaaggatgatccaaattctagtattgtgtcatgtagtggggaagttttccccggaggctgcagaataattcatggtcaaaatgtcacttctaatttagtgtctatgtttcaccctatgctttattaaccttcagccaagcaataggatacttatcaacacctacggcatttaatacatgtgatttccacagagaaacagtaacccaaaactcaaaaccctcctccttccagctcaactgacaacgtttcctaatcccttcaagaccgaaggtactggtgttggcatggctgagactatcacataggtcatgctgtgatgtacgatctcagcccatgagacagaaatcatcctttttttttaaatcttttgccaaatcaattcagccaataaacaatctaacactgctagagatggaaggcatgcaaatgtttttaagatgatttttttggtgggccttgagagagagtaacagatgaaaataaatggaaaagggtaaaggacagagactccagacttgagtgagcactgattccactgctgccaatggaaactgaaatggaagc

SEQ ID NO: 34237 - DNA, 1104 bp, Homo sapiens
atgaacagctgaacaactttgtaagtcagacagaatttctggaaatgttataaacaagtatacggcaaaaatatccaccttgtttagacagggcatagccacggcaagagccatacaacctctgtgacctcttttaaacaactcttacgacatttcaagggtgggaagattcatctttatttctaaaaacccgcaggtgagaaaactaccgttggcctatttgtcccaataatcactaaccgccactcatctccagtaattctgttcatttgcttagtcattcaacaaacatttattcagcattttcaatatacctggcactattctaggttccaagaatacatcagcgaagagagaagagccctgtgtatattctggtgaggatatggagagataggcaataaataataaacattaaaaatattagtggtaagtgctatgcagttatttaattcaggagatgtgatataaaatggctagggtagttactgtagtttggaaggtcaggaacagcctttctgaaagtgtgacatttgtgctgatatctgagtgaccaaaaggaccaactctgttgcccataggaagaatgttccaacaagagccagtgcaaaggccctaaggtgggaacaagcttaacttgttcaaggaacaggaagacagctagcacagtgctaaaatgaagagggcaagtgttatgggctatgtgtctcctcaagattcatatgttgaaaactcccagggcttaagaatgtgactgcctttagagatggggtctttagagagataatcaggttaaaatgaggtcattaggatgggccctaatccattatgactggtgtccttataagaagagcagactaggataaagagacatagatgaaaggccatgtgaagacacagatggccatctgcaagccaggcagaggcctcagaagaaaccaacccttccaataccttgatatcagactgctagcctccagcattgtgagaaaatatatctctgttatttaagatgtccagtcagtggtactagcaaactaatatggcattttaccagataaagctggggttgccagatggggttagctgaacttggtaaactca

SEQ ID NO: 34238 - DNA, 812 bp, Homo sapiens
aaaaaattgaagaactgtgtggccatgctgagtttgaaatgacttctagatattcagatggagagatcaaggggagtagtcagaaccagaaataaaaattgggagtcaatgatacaaaaagttacttaaatctaagagatatcagaagagctaactcaaaccatgatctgcaggaagtgatgtgaggaaacttgccttgtccattaatattaacaatactattctaacaaaaagactccaggagacattgctcattcattactgttgcgaagtttggtagctgtttgcagcaatggatgcaaaaatccccctttggcaggaagagctacttaacgtacattcattatgattgcaccaatgccatctagatcaaaggtctggaaacaaataaatggattgtaatgaactttccagaggtaacaggtagtgaagtcatcaagtgctacttcttgccacttgcttgtacattttcttgttaaattcagttttgtagatgctataaaacatagcagtaaagctgggcacagcagcacatgtctgaagcctcactacttgggaggctgaggtagggagatcctttgaggccaggagtttgaggctgcagtgcactatgttcacacctgtgaatagccactgcactccagcctgggcaacacagtaatactctacctcaaacaacaacaaaaaacaaccataccagtagcataagattttattatttcagaaatcaattttgaaattatgatcacttgaattggagacaagctgaagtgcattaagcaaatcaatagtgtaggcaaggctatatagca

SEQ ID NO: 34239 - DNA, 658 bp, Homo sapiens
cactcattggaggaataaccattaggaatataacacagaaggtacttcatatctggttttgagtaatactcaaagtacgataacctcaacaccatctagattctcttcctatgaggcagagtataatgaaattagattctcataaatgtcattgccccctatttactgtctttttccttgaaccaaggcagagctggctaggatccattgtctctcaagcagatttattatagatcgggtgcattccatttcagaacaggaatgtgcgtgttatgaaatgtacaaagcctacagttgaacaaagcacacaatctgtcggcaaaaaaccactattagtttaatagtgggtatagttagtaaaatttttctgatgtatcttaactaaatttaatattacataagttgatattcaaatcttgaaataagtccctagtgaacacagttctgtttatgctgtcaaaactaaatgcatttcagtattatgcaaatatataagtgaagtatttcttattgacgttatatagttagctagatttttcttgttgcttcacttcctcctggatagtaccacaggaactttgaaaagtaaattaactctttcaggtcttcagggcacaatgtaacatactttagtgctcaatgtcatttagaatctgtg

SEQ ID NO: 34240 - DNA, 558 bp, Homo sapiens
acatccaaatactaacgtgactctagataggggagactggaccactggaagctgtattaccagagtcttttttgcttgggttatccacccctggttcacctgtggtctactccatccaggctctcactgttggagtccccatacttccctgggctattattttagactgaactcaaaacagccccagaccaactttttctcctacatgacccatttctagtccatgcaaacacttgcacatcctttgtttacaaactctggcagtgcagctatgaccaacacagtagcactttcttggcttcctacctaacctgttagtcaccagctgctaatcctctgtatctcccagacacctatccttggtgtttccaaactgcaaaaatatatttaatctctctgagaggtttatttaaagcccactctccctggacttgaagtgaaaaaggtaacatatcccatcccacaaatttaatgtagagaaattagaaagtatagataagtcaaatagaaccattaaaaatctttgtaatcccaacacccatgcatagataacactta

SEQ ID NO: 34241 - DNA, 1076 bp, Homo sapiens
ggcctcattttgaatataggatctaccacttacttactagttgtgtgaccttgggctattactccatgccttagtgcatttgcattgttataaaggaatacctgaagctgggtaatttataaagaaaagatgtgtatttggctcaaggttccacaggttgcacaagaagaatggtgccagcatatccatctgggaagggcttcaaatcacttctactcatggtggaagccaatgggagcaggtataagcagagatcacatggtgagagagatgaaggaggagagagagggaaggaagatgccaggctctttttaacaagcagctcttgcaggaactaatagagtgagaactcacccattaccaggaggatggcaccaagcatgagggatctacccccatgacacaaacacttcccactaggcccacctcttaacattgggaataaaatttcaacatgatatccaaagtatgtaatcctttccctggttccccaaatctcatgtccttttcatattgcaaaatgcaatcattctatcccaacagtcacctaaaattttagcttgttccagcatcaactcagaagtccaaagtccaaagtctcatctgatactcaagggaagttacttacagctgggagcctgtaccatcaaagacaaattatttatttccaagatacaatgtttgtacaggcactgggttaacagtccgattccaaaagggaggaattggacaaaagaatggggtaacaagccccatgcaagtccaaaactcagtagggcagacgttaaaccttaaagctccaaacaatccttgactctatgtcccacatccagagcacaccggtgcaaggggtgggctcctaaggccttaggcagtgctgtccccacagctttgctgggcagcacacatggttgatctcatgagttggagtccaatgcctgcagcttttccaagctgagggtacatgctgctggtgggtctataattctgggatcttgaggatggcagccccattcccacagcttcattaagcaataccccagtggggactctgtgtagggggcttttaccctaca

SEQ ID NO: 34242 - DNA, 611 bp, Homo sapiens
acttctgacaattctcattttttgctccaaaaatattagtttaacctccacagatacctgttttcttaagcatgctgggtatgtacccatggaggagtgtctgttccaagtgataagaagggatctgtgtgtgttggctgtggactgggactgtcccttagggactgctaatgtttgatctggtgagtaacaatcacaagtttgagggaaattttcccttggatatgtaaactcctagatttaccacatatatacatatacctatatatatatgaatatatatatgaatatgtatgtgaatatatatgtgtgtatatatacacacacacatgcatgtacacatatatacatatacatatatgtgtatgtatatatatgtatgtaaagtaaaacagaatagttatatccaaagaaaaaaaaatctgaaaagaataattcaaaacgtgcgagacacactgtacttaaaatgtacttgaaggcttgtttctgtaagggttgcctaaacatccctaggctctactcttcaggaatcttatttccaggcacagtgtcctggagcatttgcaatttttcaattggaactctcagcactttactttaaaaatagtcta

SEQ ID NO: 34243 - DNA, 1908 bp, Homo sapiens
atgaaacaactattatgttttaaaacttgaaatattcaagaaggatacatatagaatatacatttttaaaaaattaattttttaattaacaaaaattgtgtatgtttatggcatgcagcattatgctttgaaatatgtatacattgtggaatggctgaatcaggcatatggcttacctcatatactgatcatttatttgtggtgagaacacgtaaaaatatactcctttagtttttgagtatacgaagcactgttattacatatagagaacagaatatactataaacattcataaagggcaagctgaaaaaattacattcctttatttcatggtagttttaaatttttatattaaaaactattatattaaagctttaaaataaaatgctatattacaagggtctttatgactcaaagagaaacaaggaaaattagagtatatttcataaaatttaaaggaaagctcttttatttgaaatatataagaagaaaaacacattatatttctttaagagactttagaccttcctccttgagtttttgtttttcatgtgtccactttttaaatgtttccatttcctccacacacatatttctgaagagttatgagcaggaagttttctcacgtattttcccaagtagaaaggcctccagctgcacacagactttcccattgccccagtattaaagttctgggtaaaattttaattactaatttaggaaagatgagacattttaaaatttaatacagtttgccctttttacagaccatgtagaataaagcctcagtatgcttgaaaaaatctcttagcaactgagagcggagctggccaacaatggatgattcattgatttagcttgagtgtgcaggaatgtctgccaaaaggtctgaataaactcacattgctagacactatggtaaaatgtaccctgacctcttttaaaactctatcagagcggaaagttaaacttgcagctttccagcaattcactggcatctggaaacacacttgaattataatatcttgcttttataacaatcgatagattattattttcacctaattagacaatggctgctactaattggaggtttctaaggggacaccaccgtgcttttaagcactaaaaataatggtttcctattcaatttaaatctgaaaggaggctttttgaaatcccaaactgaaagaactgattgttggtttttggtaatattgacccaagggttatgaaacattaccctaaacaataatttgtgcatttaaaattggtaaacattatgtaacagatatcccatgtctctaagtttatgcatacatgtaaagattatatataccaggacatcctagcttatatttatataaaattcaaaaagctcggctcttttggttacatctatcatttgtctcctcaacatcctttttaggggcaagtattatttctcctgctttagaactggaagaccacgcatgtggaattttaaattgttggcttgcattcataggtattcaaatcaagtgcaggcccgggcttacaaatggatattctagtttaaaattgagtattagacgcattgcactactttatcactcacaacttcagcagctataataaaaataatccatgaaaccaaatccttgtttcccagtggtgaacaaagatatacttcctggtttcttttgcccttcacaaatgtaagcatagagcatggaacgttctgccttgaaagagctgtgcttttgtctgctttacttcttcttcctcatctttccccttacctttttctccttcttcctttttttttttttatctttttgtggtaaaatattcaggattaactgaacaattctctgctccaccccagaggtaaccatgtttatcaatttgaagtactccttttcatat

SEQ ID NO: 34244 - DNA, 811 bp, Homo sapiens
gtgtgcacagggatgcaaaaagggcaacaacagacactggggcttactagagggtggagggttggtggaggaggatgaggatcaaacaactaactttatgctcagtacctgggtgatgaactcatttgtacaccaaactacagcaacatgcaatttaccctgtaaccaacctgaacatggaccccctgaacctaaaacaaaaactagaagaaaaaaattttagggctccttaaaatggctctttatgagattaaaataattggctgaatttctatttaagggtgaaatttgctcaagaatgtagaggtttaaaatctatttgccatctgagaacattctgtagttcttccactttttggaagatgagcctaatgacaggaaatgactgcagacttctgactgtgtgaaagttgatgcactgacccctgtgctgttcaagggtcaactgtattctagtcctctttgagcaaccccagctgacaccaagcaaagcagagacatgttataccaccaagtcctgcttaaactgcaaattcacgagcaaattaaatgctgccattgctttaacccactacgttttggaataatttgttgtgcagcattaaataaccagaacagggatcaagatgatcctggaggaagatctatttttaaagggctcttagatttttaggtatgatatactgatacctagatacttttgttgagcagactagggtaagccaaaatataacttcttatgagaaattagtagtgaaggtgaataaaaagctttataacaggatggtaattaaaaggatgggtattgaac

SEQ ID NO: 34245 - DNA, 894 bp, Homo sapiens
atatataggtcctactaagtaccctaataaaaggggaacatctatccaaattatattccccatcccttccatttatgtccccattcccccatttgatgcctaattccacttttgggatttattacctggtgctaagcattgacttcttcctgaagaggcccctacaaatgcaaaagctcaaggaaacaataattaaagctattatcactttgtaagaatgcatttgtgtggttttctccaagacaaaattaccccacatactaacacttggtacctgggaaaggataaaatagctgttaaaaaggagcaatcctagtcaacagggtacatgacaaataaatttaaaaaaaaagtaaaggggcaaaagggccttttgcaaaacaggatatattttgcaattttgcttaagttaagttttgtcagttaatcattcattaggtactaagaacctttggacagaaactcaagaaattggcattagtagttgcctctaaggaggagaactggttaggcaggtgcaagagtgggcgtagaagggcaacacccactttcactgcatatccttttgtaccttttgattttggcactgtaggcattaattatctacacaaaagttttaatttaaaaaattcaatcctcacaccctgttatttctcctacatcatcttttagattatttgtttacattatttgacatttaaacattgacttttggccaggcacagtggctcgtgcctgtaatcccagccctttgggaggctgaagcaggaggattgttgagcccagaagttcaaggctgcagtgagctatgatcatgccactgcacttcagcctaggtgacagagtgagaccctgtctctaaaaacaaacaaacagagaagttgcattttttcc

SEQ ID NO: 34246 - DNA, 2795 bp, Homo sapiens
ttatccactacaccatgtgacttctggcagtgggccaccaggctgatatcagaattaaaccaatttaaaatgtatgcttcaaaatctaggcaggggaaaaagatcactgctcacttaggtatcagggaggccaaagcttggaagcttttattataggaataaaatgaaatgggtgaataaatatggtgacagtctcttgagaagaaattggactactctcatcaaaagagtgccattttgaaagggttttgaaatcgattttgctcttttaagttcaaaccatagctctgccatttggcctagaacgcattagaaagtattcaaatgggattacattccttatcagtttaaaagagtgggacatctcacagactcaaagatggagaggtgtggcaaagacatcaaagggctagcagagatctgttactcttttggttttctgttaatggagggtgaaataaaagctgattatctcgatgagaaattagtagaatatgcttattttctcagaccatgtggcattccatcaaccaagtagtggagcaggtgaggaataagcatattttatcataagctctatgaggcatttccaatgtgaagtgaatacagacaaaatagaaaaaaaattcttaaatctccagaaatgaaagaaaccactagcttcttgcaatgccactggatgccaatagcaacggagtcttgagcctgggctcttaactggcaatgagaagaatcccaggccagatggcattttaaaatccaatctcactctatttgtctctccccactaacctacattgcacttaaagcaatcagccatttcacaagctgcagtatttcaaagtagttacaacccttgagaacagaaaaactctcttaattgctgtgagtttaaaaatatagagaataaaaattatggaatttgtgaaacaaccatctctaattaaacacgctcgctagcacacacacccaacaccgcacagagtacagcttttcaaacctagcccattcatgcacacatttagcacagctcaccaacaaaacacttttccttccattcattcacttactagtcccgttctttgggactcactcgccaccactgaaaactaacttgagaagccccaggtctgtgggcaccgacaccccgttaattcatccagcttgtcctgctccgagcgccaggcaggacttgggggcttcggtgtcacgactggcgctgccccctggagggacgcccagcctccacccgccctaccggagcggcacccctcgcggccctcgctccctgggaaacactcagagttgcactgtcgtcgctgccgtttaattttcacaaataaaaatgcccgtgagacggaatcccccgcccacccacctgcccgagaccgtacaaccacattgaatcggatcctccagaaggctgccggcagccgggaggtgtgaacaatgaacttctctctgactctctgacacacacacacacacacacactcgccccccgacgggaagttgtgaactactagcccgagggccaatggcgcgactccccaggcaacacggcggccggcggcgggggagggcctggcgcgcgccccggccgcgcccctcgagtcggcagttacctccttcctccggctcggcgccccgggtcgggtgatgagggccgtctcctcgcacaccacggccacgtcctccacgaagacgcagtccggaaggctctcgtcggccggcagctccaccacctgcagccccagcttgctgcccagcacgcccacgtagagctggtgctgccgttccgcgcgggcgacgtccacctcctcgcccttggcgcttctcagcgcgtgctggccgagcgactcgggtagcgcccgcaccacggcgtgggtggcccggccgaaggcggcggggtggccgagcccggccatggcttcgggaggcttaggggcggcggcggcggcggaggcggccgggtcctgccgcgggcagcgcgcgctgagcctgcgagcgcccgtcggctcctcttggcagccgctgaatgtggtgcagaaggagcccagctcgcgcccggagccctgcccgcgcgactgagcatgcccagagctccgggcgccggcccgcgcgcatcccgcgcgcccactccggcgctcgcgggtctcgcgccagcccaggcgggagttgtagcggcgagcgccgggcgaggagtggggccaggagaggcggccggggaagcagcgagggcaagaagtatgcggaggcgggggacctcggcgaaaagccaccgctacccggacctggcggtacctgtgttctgtcgcaggtgcacacctcccatcgtccccagcgcggacttggagagccggcctcggtctggacagagcagctggagggcttcctggtctttacctgaacagtttaaaccttgcgtgcttacaaagtctagcccacttttgaagagctataatggtttacagattcttcatgttgagcttaaatcccacgggtcccagttctgttttctggccttacctaaagtacaagtttttcttgttttgtgtgtgttcgcgtgtgtgtgtgttttcacaaaacagcatttgcatatctgaaaacagttctaattatctatgctgcctaacaccatcctctaccccccaccctaaaccccctccagtcctggagcccaaaccactgaaaagtaactagtgatttggtttccaagtcccttcaacattctggtcagcttccttttgatacacaccaatttgcttgtatccttttaaaatcatagtatccgg

SEQ ID NO: 34247 - DNA, 768 bp, Homo sapiens
gtggtttcatccagccagccctacctatcttaatcagactgacttccccagtactaaataaagtggagaggaaatttctacccacccactcatcagagactataagacccaactcacatcctgcaagcctcaggatggaacacgactccttttaactacctgggcacagtagctgactatcaggaaactgctcgtggcctccacacattgccacactatttacacagctgatggaagtttgccctggttgaggaatttggctctagaggagtccccttaaaattcccaaagggcctattcaccctgtcacacccgcacagatgcctgtgaagatagcaacagtggggttcattttctaactccttctgtacacagttataactcaacatgtttatttaaaagtggggggttggagaagagctaggggagctgcaaaatctaacattatatgagatattttcaagaaatattttgagcaaagtcaacaacccccttgccctgcctctcagacattcctcagcttcattcagcaacccaaactctgccctccatactcacaggcatgaagcagagccaggacgtgactcccaacagaaaatgagcctttctaaggcagagggaaagaagctgaaagagtcaaccaactctcaaagcacagagggagaagcagcaaagcagagggtcaacattcttctcctttaataatttaaagccctgctattagcagaggaaaagaaaatatcagacacatgattgtatcatgacaat

SEQ ID NO: 34248 - DNA, 3242 bp, Homo sapiens
cactggggcctgttgtggggtcaggggagaggggagggatagcattaggagatatacctaatgttaaatgatgagttaatgggtgcagcacactaacatggcacatgtatacatatgtaacaaacctgcacgttgtgcacatgtaccctaaaacttaaagtataataaaaataaataaataaaatttaaaaaaaaagaaaaaaaaaagaaaatggtgttaccaagatgacctgcttcaatggggcatctgagaattaaacaaatcaatatatagaaggcatttaaaatgatgcccaacctatgtgaaccctatataatgtgttaatttctgactaatttattagaggggatgacatgagatttggccctgaaaggagctgctctggctttactacttgctgcctcctttcccaatttactgagaagcaggcaaggtcccgagaggatgagcagcgtccccaaggccacagcctactgatggcagagccaggacttcctatccagggctccccacacgcggaacttctcgaggaggaagaggggaaggggtcgtgggaggccaggagaaaccgagagccagctttaccatgtgtcccttctggggataatggaatccaggcccttcggggcttttccccagagctggctacacgtcccgctctcgggtgcgcttggtgtccacgcaaacgccatcctccgaacatccccccgcccacacacacacatacacacacagccccacacccttgcgccggacgcaccctctacgtctggcacagcacggcaactcgctgccccgctgggaggactagtcaacaggggggcggacgggaaaagtgacacaactgggccgcggcgccctccgcgccagcctcccacgcagcgcagggcggacttcggccctcagaggggtgaggactggggccaaactgcccgggtctaccccgccgcccgcaacgctccggggtcccgcgcggagggaggcctgggcgcgggccgccgcggcgcacttttcaggaacgcggcggccgcaagcctgccaggccgggtcgcaggacagccgccgccgccgccaccgccaccgccaccgccccccgaagctagatgacggagtcttgaaagactttcaccaaatatgggccggggctggaaacgtcctgcgccgcgcgccgccggaaacctcgattcttggcaaccgcggtgactgtgggcgcgcgggcggggtggccggcagggggcggcggtagcagccgggcaggcgcgtccggatgcctcgcgtcccgcaccctctcgcggtgcggaccctctccgctccctccgcaggggtcccggagccgaccgccctctccgcgcgtcggccacccagttcctgccgcagccaccaggatcctggcttcctggggctctcctggctgtcaagccaaggggatgggggcggggaaatggtagaggagagaaatgggatggtacgggggcgccaccttaaagccggtcttttgcagacaccattaagttctgttcattaaggtggctttgaagagtggagttgtgaggttgggtgtgcagccgaggatctatgaagacacacacacacacccctactacaggcactccggtcgtccagggcagtggtgctcagggtgtgatctccggaccagcagcatcaacatcacctggggacttgttagaaatgtaactaatcagaaactctggggtgggaacccagagaaccattcattaactagccctccaggcgactcggatgcacgctagtctgagagccttcctagggctaggaaactggagtcgccagatttaccgttattattctcggttgccgccagacagtgagcccttcattaggtaacctaaaattccctggcagcagcggttgagagacgtccccatctctcagcccgaagccaggagctgcagaagacaagtagccccttctccgtggattgcaatccaaggcagcccaaggaaacaaggcagtccgttatttcctcctggggcacccgtatggggagggtgaaggagaaactagcaaaagagccatacagaattagcacccgaagcaacacttacccataaacatttgcacatttcgcctcctgtccgtcaacttggactgatctgcggctcccagcggaggcggcgagaaggcgacgggaggctggggtttctggacggtctttgggcaggacttgaggagccgctgtttctcttgcctaatgtcgtcgattactagcaggcgcaacagcacatggtatatggagaggctgtgcacataggttactctagtgtctcccgctcccacacctcctggccctgttgctccagcttcccacccccatcccacaacacaccccctgctttaaatgggcagctgacggtaaggttctctaaatttctcttctggggcaaactcatcctcaagattccccagttgaagtccagaaacaaacccacacacccttgttaaaaaaactttaatgtgattttaaaggaatctctggaatggcgtgtgtttgaacgcagtgcggcagactggatctctgccgtcccccatccccaacctccaattaaggtatatacggccagttggatgatccactgtgcttttattttaaatcatgatggacagattgcgtgaaaaacaaggaattccaaagaatttcctgctctgggaagagaagttaaatctatatttaacaacatttgaagctgtcaagaatgctttgtggttggataacagaggcagaaaaatgttaaaaacgcaggctactgctatacccaaatatggaaatattgttacgtctggtgtctgattcaccatctggaaatacttacaaccatgaagtcaaatagaaaagacgccacaacagaagccaggaaccctcctctccattctctctctagttcaaccagtactgtccctgcacccctcctcccccctcccgccccccgtcacttcattaagaaggaaacaataatgaaatgataaggcaggaaaaacagtgttttgtaaataataattgatgtattaacctgtgtacgtgttgggcccacactttcctcactgtatttgcataacacctgacaatccattgtcttgaaaagtctcccacccctaaccctctaacagagctttagagatcccactccctctagcaaatgctgcttccatttatgaaagggcactttggaatgaatgaaactgaactccttcctgcaagaat

SEQ ID NO: 34249 - DNA, 7197 bp, Homo sapiens
aaagtttttgaaacttgcagggaaagtttatcaatcacactaatggtattggtgatgttcaagtaaattgtcttgtggtggggtcttctactgagtgtgttgcaagtagaacgggatcttaaaatctgctgacatttttactgcaaaatattacatcctaaatctcttttctgtacttggagagaagggcattgcaattcatttaaaatgggaggcttccagtggtccctaggaaaggagttaaaaaccccacaaaatgtccagcttgaaggagtctgcttttcccagagattcatagggcacaatggtcctggaatctggtttggccttgcggtctttgcaggtgatgatttcaggccactccacggtggtctcctgcacttctggctggctgcttggttagcatagcctcctgcccgcggagggaggcgggaagggcttaccccgtctcctgcatccgtgaggaagtataagtcagcctcccggagaactccccgcgttcgtttcctctcggacttccaacccaggcagtgggctggaactaaagtgggaacctccaaaaacaaacaagtacaacatacccaaaagagggaagggctggaggagtgggggagacctctgcctgggaatttgccagacgatgggcaagtttccccccgccccaccccccccccgccttttcattcataaatgccactgtgggtattaatttgcaattcactgaactttgctaataaacatcatgccaaagctttgggacttgttccgaacacgcctctttgaagtccacaaatattcctgactcagagacacactcctcttccccgttctactctttcaacagataacttgcctctcaccttcgctgtaaaaaagcaaacagctcactgccttcccgggtgagggcttcagtggctgcccggtcaactcgcatcaccaaacaaaacgacttttgttcctccctctcaggtcctcccacccacccagtccaggcaaagttctgaactggcccccctcgcccctcacgaccctccaactaccatcaccaccatcacgccccaaagaacccttcccaacataagtcgtaatttaaggtggaaaaaacgaactgttttcttgacgggtctgggacacacacacacacacacacacacacacacacaccccccgaactgttttcttgacgggtctgggagacagacacacacacagacacacacacacacacacacacacacacacacacacacacacacacacacacacaaaggtgcaatggagccaggggaggcgcttggcagcagcccgcgccaaccagcattcctgagatgtttgagaattctggaacgcgcagacagagccgacgtcactgcaacacgcggcgcctccgccggcccgtataaaaggcgggctccggggcgcctgggcagaccgcgagcgagagcgcccccgagcagcgcccgcgccctccgcgccttctccgccgggacctcgagcgaaagacgcccgcccgccgcccagccctcgcctccctgcccaccgggcccaccgcgccgccaccccgaccccgctgcgcacggcctgtccgctgcacaccagcttgttggcgtcttcgtcgccgcgctcgccccgggctactcctgcgcgccacaatgagctcccgcatcgccagggcgctcgccttagtcgtcacccttctccacttgaccaggctggtgagttggactctccttttgccacctattccccgtccgctctccagccccttcccctggtcccagattgcccacggcaggaaaagttaaaaagttcgcgatcgtttgcgggtagccgtttctttaagcactctccccctccccccgaagacgtgtcgggacctcttggtgggagcagccttccgaggtggccgggctggacgagatcagaggctccccgtcgatagggtcggagacccccgtccctcactgcggcagccgcggcgcccctcctgcgcaccgcgccgagtctcacgcgtatcttctcccccttccaggcgctctccacctgccccgctgcctgccactgccccctggaggcgcccaagtgcgcgccgggagtcgggctggtccgggacggctgcggctgctgtaaggtctgcgccaagcagctcaacgaggactgcagcaaaacgcagccctgcgaccacaccaaggggctggaatgcaacttcggcgccagctccaccgctctgaaggggatctgcagaggtaagatgcttgtggtttggcccctttaaaaaaaatactagtccccatagtccagaagtttagtaattctgagaccatgtatggtgatgctttgttgttggtagcttggcagaaaggcacatgatttcagcagtctggaatgcaattcagtgtgtctgggcccaacgaaagcgcatacggaaaagtgattcctgactaacttattgttctggtctggagtctccggggaattgtagggaactttaccataaattgaatttaacagcagaaaatatgtatgagtttcaggcggtggtttggaatcttaactttatccccttctacctttctcttttggtgatctttgcagctcagtcagagggcagaccctgtgaatataactccagaatctaccaaaacggggaaagtttccagcccaactgtaaacatcagtgcacatgtattgatggcgccgtgggctgcattcctctgtgtccccaagaactatctctccccaacttgggctgtcccaaccctcggctggtcaaagttaccgggcagtgctgcgaggagtgggtctgtgacgaggatagtatcaaggaccccatggaggaccaggacggcctccttggcaaggagctgggattcgatgcctccgaggtggagttgacgagaaacaatgaattgattgcagttggaaaaggcagctcactgaagcggctccctggtaagtggagactgagcacttcagacactgtactgagatgcatttctggtctaaatctttgtagaaatgagtgcttgagcctgtttgtgtcggtatgcctctgagaagtcttccctcttatatgtctctagtttttggaatggagcctcgcatcctatacaaccctttacaaggccagaaatgtattgttcaaacaacttcatggtcccagtgctcaaagacctgtggaactggtatctccacacgagttaccaatgacaaccctgagtgccgccttgtgaaagaaacccggatttgtgaggtgcggccttgtggacagccagtgtacagcagcctgaaagtaagttccttcagggacgtgtagactgttgcctggcaggtgggtgggatgtgaacatctttttgaagaaagagaaatatcacccctaactttccttctctcctttctcttacagaagggcaagaaatgcagcaagaccaagaaatcccccgaaccagtcaggtttacttacgctggatgtttgagtgtgaagaaataccggcccaagtactgcggttcctgcgtggacggccgatgctgcacgccccagctgaccaggactgtgaagatgcggttccgctgcgaagatggggagacattttccaagaacgtcatgatgatccagtcctgcaaatgcaactacaactgcccgcatgccaatgaagcagcgtttcccttctacaggctgttcaatgacattcacaaatttagggactaaatgctacctgggtttccagggcacacctagacaaacaagggagaagagtgtcagaatcagaatcatggagaaaatgggcgggggtggtgtgggtgatgggactcattgtagaaaggaagccttgctcattcttgaggagcattaaggtatttcgaaactgccaagggtgctggtgcggatggacactaatgcagccacgattggagaatactttgcttcatagtattggagcacatgttactgcttcattttggagcttgtggagttgatgactttctgttttctgtttgtaaattatttgctaagcatattttctctaggcttttttccttttggggttctacagtcgtaaaagagataataagattagttggacagtttaaagcttttattcgtcctttgacaaaagtaaatgggagggcattccatcccttcctgaagggggacactccatgagtgtctgtgagaggcagctatctgcactctaaactgcaaacagaaatcaggtgttttaagactgaatgttttatttatcaaaatgtagcttttggggagggaggggaaatgtaatactggaataatttgtaaatgattttaattttatattcagtgaaaagattttatttatggaattaaccatttaataaagaaatatttacctaatatctgagtgtatgccattcggtatttttagaggtgctccaaagtcattaggaacaacctagctcacgtactcaattattcaaacaggacttattgggatacagcagtgaattaagctattaaaataagataatgattgcttttataccttcagtagagaaaagtctttgcatataaagtaatgtttaaaaaacatgtattgaacacgacattgtatgaagcacaataaagattctgaagctaaatttgtgatttaagaaaacagcgcttcatgttcatcagaatataaagcctaagggtctccatcactctgtgagatggctataataatttattattttaatcaccaggttagtgggcatgccactttagtagagtagagaaaccctttaatgaaaaggggtagtccataactcaggctgcccacatccagacccatgggcaagattgaatataattaatgtattctaaagacttgcttgtttataactttatattttcccaataccgttcctaaaaattagaactacttagaaatttacccttggctgttatgaggaaaaatctgagtctataggagtcagtttgttttcactaaatgagcttgaagcatgacttgtgttaatcctaataagccggtgattaggtaaacatgctgttaaatgcaaaggaatgcaaggaatttcaactacttttccaatagcgtgagggccaagctaccccatccccctttcctttttataatatacgttatattgatgggggagggagcagttatatagagttggctattcagaaggtcaaaggtccagagcattcctaaaagaaagggacccaaatcataggtctaggagaggttgagaaggctgtgtcaatgtttgtgaaaatgtcagtagtctgtttcagaagcatcttcatctttagaaagcgctgacaataaaccttttatagggagaagttttcctttcatcatcactgttggctcctgttcaaatccatagtgaaatatttcagtccgcacttagttaagagagtacttgagtttttaggcagaagagaaagtgcttttaaaaggaatggaggaggacagctcctgggatcctgaagggatttttccaagtagattaaataagatccatactttaatgaagacccacagaaaaatactgcctaagaaatggttttaaagccttatggaaatgcatagaggttaatataaatgcactagtaaaatctatggccaaaagccttcacttctgattttgacttgcctgaaatattacagcttgtgccttctgaatagtcaggtttcttgcctgagacattcaaatgttaaggtatttgagaatttaaacatcagctggcccagtcgtggatgcagttaaacttgtcagtgcaatgtaacgtgtgaaacataataaaggtgtgaggcttttgtggtgcaatcttgttgaacagacatctaaatccataggcaagatttacacattcccaagcatcaaccctgaagtattgctctccaacactggagtccaacaaattgcttcttatgcagagatcaaggagcaatattttacagatcctttcagtgtgcagggaagtagtatttgtccaaataagctcaaatgtgaaacagaacctagtatgggaaaacactgaatctttgggttattaatttcatcctagtaaatataatgagggtgattgaaagtgccaattccatttacaataagtgtgttcaattaataaagaagatgaatacaagcaaattatgtcttttgtttagctatagaaaaacctgaagaaattaaaagtagtggagaataaaattatgatatttagaacacgtaagttttacctacatccagaatggagctctgcccactttaaatattgagaaaacaaaccaaaaattatgcatctgcatatatgaaatagaagttacatatagaaatattcattataatatatatgtaccttcccatgcacagtaaagaccttgggttgttcttgcttttcaatccaaaagatcctggtggtcttgagctattttttggtagagattttagaactgagagagtgatctcagaatcttaggcattccacgaattttaagaaatactctatgggacattgagcagcacagcaagtagtctcactatgactattttttcatatgaacatatgtgttgtctgctccacaaagagatgcaactgagtcaaaattagcaaagcatattttagagttatgttttccaacagagggaacagacttggtttgttcacaacctcttcttgcagccttctggcactacttgaaagtcagttgagcaatagcagtggttcagtatgaccacagtacagagcaaagctatgctctgggcagaatggcaggtgatacagtggaaagaatcccatggaatcatgtcttttagcaccagctctgccatgaattcactaggtgactctgggcaagtttctgtttcactccctcatgttaaagtaggaaaatagctttcagcatttttgtcaccccaaaaaccctttctcatacacccacttcggtacattggctctcataccttaaaacttttatctcctcaagtaaccacatgtgtgaactgaaaactgctcaaggctttctgtcatcaaatgcacttgtttccatgaagcgtttgaaaatgtattgtggctagaccccttcccccccctttactttctaaagcacccttggttagaggacacagcaattcctggatctcagagtctacaggtccatactttaacctcactgtatagccctatccaggcctcattaactcct

SEQ ID NO: 34250 - DNA, 622 bp, Homo sapiens
ccaccatattggaagccttggggtactctcaaagtcagcaaatttatagcctcatgcaagatctgagtagtaacagccattttgcatcttgttttttatggctaataagagaaaaagcaaaaacagggacctataggagatgggagatgtgccctggtgatgcggacaggcctgtcccttccatgggaggtatctttggaaatcccccatctccacggtaatacgagctgccagccggcagagggtgaattagcactggcaccatcagatacaagctggacacagctgagtgcagacaggacaccacatcatctgggacaagagagcagactgctatgacaggttggtctcaggccgacaggacccagcctgggcctgacccactggtgagtcacccaggacagccccagttgactccttggacccaacagcaaaggcaaaacaaccagagagaggaagcctggatgacttggttactgccacctgatgctcttgcgtctgtgccacaggtcagattcccgcaggaggccagctccttaacagcttccggttcctcctggagtagtgttcctacttaccactagctgtgcacagctctctcgtccaggattttaaagcctgc

SEQ ID NO: 34251 - DNA, 4549 bp, Homo sapiens
tttatataaaaatcccaaggacagaattattgctcccactgaagagataagaaaaatgagattcacagagcctcaataagtttcttagtctcaatcttagctgaaggcaagatttcaacctaggtctctttaattccaaaggaggtgtttttttccactgtaccatactggctctgagtctacttttgactcaaggaaacatataattccctgcagaagagtgtttttcaaattctaataaggaactcaaatagttagacaatgcaaaatcacttttctttctctggagttctttaagtgtttaaatttcattttgttctagggtattttggtttcttttgctttatatagtgagttctcctgactagtgaaggagcccgaaagtgctgatcatacagtagggctgggatgtttaaatatctggatgaaggttctgataagacttcatataaatagctataaggcagggttcccatacaaaaaaaaattgagtttgaacttgaagttagtcttaactccatctatactgtctggattgccagtgtaattggcctccaagtagagaactatgcttttttctttatctactctggtaaattattaaaaggctcttctgcccaggggatcattaactacctgggaggtctggcaggtgcagcaaagtgaaccagggcagctctggttgggatggcaggactgagcttcctcaggcaacttccactgctcagccagaatgagggaaagaccagccctgggcagggctgcagggattgggctggtgggcaagaatagaggtaaagacgggatggaggaagaggacctccctgtccagcctgaaagtggacttccaactctttatgtcactcaactcccatttgcctgatggaatgtgtgccgtgtgcacctgcatttacccacattccctccttcctctcttggagggtgaaagtggaggcaaggacgagtcccagattggccaatgcagaaacaacatttgtgtggatgacacaggagagcaggggaggtgagcaggagtgacaaaacctcagttaaacccgtcatcaacccaatatcttcactatccacatgaagtgacacgggaggttatacgacacggccaagcccaccaacttccttagcaccagagatggcatggcactagatggcactagaacccacacctgccacccccaggcagggctttttccttggcactggtgcagtcaccaatctcagtagctttcacgagcctacaattgaaagcacttttctctatggctttacatcttggcctttagggcagtaacccacagcctagttagttctacttcttctgccacccttcccttgtttctgttggaaagtggtgcagctattggaggatgtgcttgactgaatgtgctccctcagcttttcagtccataggatgggccccagctataccctttcactccttccctgctcaaagatcatggaagaattcctgaggtaacattttcatcttgggtgagactcattctttacaattcacccctgtggtgagctcagcctagtgcagcctctcgtttgctctgttcacacacacacacacacacacacacagtcatgcatgtatgcacatacgcacgcacacatgagaaacacaagaaagcacctttaaaaaaaattagcggatgatactttccctttgtggatggttgcacctcataccaatcatgggtttaagcttggtgaggaaagagatggacggagatagaagctggggagaaagatttgtaattatttaaacttattgaatagctatgtgcctgctccgctctgaaaatagcgcctgggttaaaagtctctgtacctcagaaggtcaccatctgtaggagaggtagatcaaaacatatcattttaatcaggaagagtttgaggtgtgggaggttacaaggcccaggcctgagatggaactagcacccacatctgacacccccggcacagggctcactcctcaaccttggagctgttgccaacctcagtaggtatgaagaatgtattgggcacacatgttgaaagcaatgtttttctagggcgtttaggagtgagagaagcaagcgcaattccctgtggtgtcccaaccacaaagcctcttctacctgtagcagacagaggaggtgacacatgagctgagtctgggatgacaagctcacaagcatttggggtcaagcattccagggagaggagtcagcctgggcaaaaccaaggcagcgctctcggtaggcctgggcctctggctagtggtttccttcaacccacacactgcgcatggaaccacagaaggcagcacagcagagcatctgccctcacgttcttcctggtggggggcctcccaaggacattctgcctcaggttcttattgtctgaggtcactgagcctcctgaaagtatttcaggaatgtggaggcctgactcactctcttccttgagttcacagtctgaagttcataaaacctcttccccctttagtcattcttattcaaataccggcccacaagtttcacagatggagctggcaggaggaatcttgggaagcatttttttgctcaggatgtgaaagtatatgaagagtttgggagatccaggagcaatcattcactaagagccagacccctgtggcaggcgctggctaaacgcagagactggctggctcgctcacagagtggagatcactggcagaagagaaatgccatgaaagcatccactctgtgcctcagtttcctcaactgtaaacagagacaataaccacaccttcttcagagaactggatggggagtgagttaatccacataaagtagttagaatacagcctgacacataataagtgctcaataaatactagtttattgttcatactattgcttattgttggcagagtgagttgtctacacactaagtggtgtggggaagaggaggcattcctggaataggactgcgtgggataaacctgaaaggaaaatgtccaatgccgtgggtgagtgtccagatggggaggcctttagacatcacacacacacagcaggaggggcagcttgggagagaagaaacccgagtggcacatctagcctgatgccaaagtatcaattcatgcacttcttccggttggaaacagttataaaaatgtccagggaattaacaaaggggatgcaggagagatatttggagtacgggatgggcatacacatagccaagcatggggtttcaaattggtgttattcaccttatttctcctgctgccgtgcaggcaatgaaattctcagtgaggcaggccacagacagatcagatgctctgttttcctcctttctgactgtagctcagtttagaggattgaaaatgctaggagacatctagcctaccctctccctgctcacaccgcaccttgcctcagagctggttttgacatctgtcctagaagacatcatccattgccttgattcatgggtatgagtctaagcaatcttaaccactgctgggattccatttggacaaggaaaagctttctctgcttttcagaacactctacagagaaaccctaactttagtaaggctctggggaccccaggggagatccagagaagtaaagcacccagcccaatggagcttccagaatgcattttgagggacagtgctttagttcttcctttgacctcagtctcttttggtcattccttgtccccattctactccaactggaaaggctgagtagctgctcctgcatatgtctgttattgcagtgacccaaagtaagaatcttaaatgaatttgaaatcccttaaaaaaagagtaaaaatagtcctagtggaaaagatggttcaggagtttcacagaagggaattagaagaagccattactgactcaaagaaaaagattactgaatagatagcagaaggtaacctctgccctactttcagaccaatgagtagatataaatgacattacactctcgcttcatgaaaagtaactggagagttgagatgaggtgattcttgaaagaaggaaaggctattagatttcttactattaatgattaaggttcctcaattttttattaaccagcctttttttctaatgacaaaatacatccttatggtacataattcaaactgtagagaagggaataaagtaagaagtaaaattccttttctccactccacaccctccttcccacacctccctgaatacttccctgcggaaaccactattaacagtttcttctccatctttctagaattgcctatgtatattccaacctcctctgacaatcctcttttttactcacccacaagaggccttccaacttggcatctcacatcatgataccgcctttgtctgggaagctcttctcctctttgcatggctccctcatggctgctacaaccttctcggaattgtcaactactcagagaggtctcctgtgacttctctatttaaacaaccccaccaccatcaccattctccaccctgacaccaccagtgtctgcccaacccttagcacaatgtccagca

SEQ ID NO: 34252 - DNA, 3115 bp, Homo sapiens
gtaccctgaagaagaaacattaccagcattactagtttcccaagtctctcattttttattccagacgttactcactgtcaccaatggtaactactctcctgacttaacagaatagattagttttgcgtattcctgtagttttgttgttgtggtggtttgtttgtctgtttgtttgttttttagagacaggatcttgctctgttgcccaggctgtagtggcacaatcatatctcactataacctccaactcctgggactcctgggcttaagtgatccttctgcctcggcctcccaaactgctggcattaaaggtgtgagacactgcaccaagccctgttcatgtagtttttatgaaaataatcctgctgtatacactcttatgtttggcacatttcactcatccttacacctatgagattcacccacgtcgctgaccttcagttgatccttaacaacatctttggataggtgaaggcccttgcagctgtggatgagcccagctggcatgaggtcttacatgtcatacccaccttctctcagtcttgccctcacaacctttgaatttctataaagtgctttgtaaatgccttaaagagtccacatgtatccaaaattcatctccagatgtatctaatgatgaaaaccagcagcccggagctgaggtttgtgtaaagttacatcagagtgaggaggggggaaggagcacagccttcccattctgatcagtgtctctgtggccacagctcaataagacttgctttttgaggcctcatccactcagcccagaactcaaatctcaaattccccaaacatgaggaatcatgacaaagcactggtttgcattctcttggcaaatgttactttaaaagtagagtcaaaactacttccaagtaaagagcaaagcagctttaaccaatatcagcaaagggtctaagaaaaaagatgtggctaatgtattccgtctgtttgtttgctttcttgtgccctaagactcaggagaaaatatcagtttgggaaagaagtcataacacatggggcaggaacaaaataccaacagagcgaagttgcacacgctgtccaacctggtggcctgcttatgaatttgaaatcccagaccttcacatgagtccccagcctcaccccatccctagcctggcacagacaggaatatctatttccagatatgagctgttacatagcagaaccaatctgtacatccgtgtggggccaatcgtcagtgctctgattggctcatcagccaacatgcagggctgcattcctgtggttcacccttccagaagggcctttcccaacaccacatgctgcctgtgctgtgtccagcaggagagggggaggcaaatgatgtgtctcatggcaccacaggctctgttttaccagaataatactgttctttggcccactgcatccgttctccccacatgggccttttcctcacgtggaccctaaaagaccacttctctatttacctgccaacctgtaacagataattatagtggctgccagatatcccttcaaattggtcatgatctcattcggttattctagcagcaaaaaagttacagaaaacccaagataatattaaaaaaagaaaatcatcccctggctttcacctttcttgtggcaggcaagaaaaggtaggaagaataagcataggaaaagaaaagtaagagcttgtggggcaagttgaaaacaaaccttaccaagtccagaaagaattttccatttaaatgctttataacaattttctctgatgagtagtagaatgctgaataagacatgttactttttagtgacttttcaatctggcatctattgaaaggtgttttatacccactgcagccaagaggagagggtgcaggggagatcacatactctcccagcaaggcagggatagaaagcccctgtcaccaggggctgccgtttctctggcccaggaacctgtggaggctactcctggataactacacactgttcagctgtattgcatgcaattatatcacattccttcctggaaacttctccaaaaagagagcagagatgagaaacactcatagagaaagctttcactggggcacacaagctgaactggcaggaatctgaagaaggcaaagcaatggaatgttaacctcgaatgagtgaacaggagataagaaaacatcagctgacagagcaaacaccccggaaatgtgacctgcctaccctgggaatggctagagctcttgaactagcctttaaatggaaagttcttcctgactcgggttttgaaaccaagactgagcaaaagcctcagtcttcattcctgagatgaagtttagagtgcaaaagatttcgaatgcaaaagattttgagagttggttagagcccgaggacaagcctcttgtgaacagaagttccaagagtcaacagtagctggcagcagacaacctcttcaggctgaagggtggcagaacccaagatggctagtgcagaagacatctgagagatggcccaaggctgtcctttgcttttcaaatgaggaaaaggtccagaaagggctgtctaaggtcacatagctggttaatgacagagctgggagtagagccacattgagctaagttgtattcctacatctctaccaatgtgtaacccaaatcaaaataattggggggcagaagaaaggggaaaagttatggtctttgaaagtcattagtaatcctatcattagacacataattaatatcatttgccaagatactaatgtcttaaatgtgagaggcaatgtctattgcactaatgaggtgactggtaccatggccatttatggcagatatattttttcaaatttaagactttagcatacacatatacatatggagagagaaagagagagttgatttacatatatatttcccatctaaacacacaccttgaccattttgccaggaaaataaccaaacaacttccattgaggtatacaaagaatgatgacaaagttacgtggcttatagtttaaaaagaaagtttaggctgtgtgcggtggctcaggcctgtaatcccagcactttgggaagccaaggtgggtggatcacctgaggttgggagtgtgagaccagcc

SEQ ID NO: 34253 - DNA, 580 bp, Homo sapiens
aacttagaagtggagcttaggttcttccaggcctgcctaaccctgatgcttttggtagctgatgtagttttaagccaatgtgctttctgagggatgccaaaagaatgagtatggaaaatgacttggtgacaaacccaggcagctcttctgtggggaagggtggaggagtcctcatgcaatctggctcccacccattcccacccaccagctgagggcattgtatccaagagatccaagggagtagagtcaagaagatgacgcatcaggaggtacaaagaaaaaggagatcccagatgaggtaatgaccaaaaaatgccataacccattacataagtgaaagtgaaacctgaggaacaaataaacaaagggtatcagattgatgtaaaaatacaagaagctcactctgtggttgctgacatacatcattgtggaaacaaaatcatgtccaaaatgactatggttaaacttggaaccacatgacaggagttttaggaagttccaaaagaatcaaaaataacttgaacaaagtagcattcttccctgggcttatggctttgagaaaggacaagtgcccctctgg

SEQ ID NO: 34254 - DNA, 1701 bp, Homo sapiens
cacccaggctggagtgcagtggcgtgatctcagctcactgcaacctctgcctcccgagttcaagtgattctcctgcctcagcctcccaagtagctgggattataggtgcctgccaccaggcctggctaattattttttgtatttttagtagaaacatagtttcactatgttggccaggctggtcttgaactcctgaccttgtgatccacccgcctcagcctcccaaagtgctgggatacaggtgtgagccaccatgcccggccagttcttaatactgccaggagtgctttagaaggctgggaatatggggcgaaagattagacacccaagctgttgaaaaccacacagagtttcagtaaatatatgcacaatttgaaaaatatatttgcaaaaatctaggtgtctccggtctagtccttcctattaatcaaataaattaccgagcttcatggcccagtctatgatcctagttctgaccgctgctgcccgtaaaggcctcaatgaattcctctctgagcttccagacttccttggctggtgacttgttcctcttgggacagcttttgcttgagctgagcagcctggcccccagctgtgcagggccctctctccggtgagaggaaacgctttcagcttagtctgttaacacaaacattcaaaagcaaacattcaaaagccacagatcatgttcgcataaataaaataggattgagaaaagctttgccccaagaaaccaaaggggtgtttaaaaaacagctcttgctttccaagtaggcaggcagcaaagccacagcaattccaaaggtttgtgtgcttggtagagctgggtggctgcagccgcaggcctttgaagaggaaatgccatccctggtacaggcaggcggccaacccatgagtcctgaaagtaccagagagaagcagaaagcaggggagcacagttaggaagtgaaaagggagaggaaggcaccaaggagataaatgaggagactcttcttatctagagttcccaccccagacctaagagctacaggacagaggaactcactgtgcctgacagagctggggcctggtgagtcctaggtggcgggcacagcccagagtgactaaggctgtgaggaggggtgtgcgccgtcactgaggggtggagaggggtggtggtgtctgggctgggagatgcctttgctttgaaagctttggaggaaattaactttacaaggtgcctccctgtctcccagagttattaaaagaaaggagggagcaaagaagaaatggaaaaatggtaatacctcaggaagggctgtgtgatcccaactggaggaaatgggaggcagatgaagtgacgaatgtgcaacctctcctaagggaggaagagctctgaatgtgaccttgtgcaaatggaaaaaaaaaaaaacaaacaaacaaaaacacacacaaatccaacaagagccagtgtgactaacgagaaaacacacacacatgcaaacacacacacatacagccctttgaagatctagaaatgagtgactaattaaatagcctaaaaacctccaagtgcataaagtttctgtcagtactcctgtttcaataaagcagcagtgaaagcccatagaatggcaggagtggatgagttactataaatcatggggtcaccagaaggtataaatctgggagtctttgagagtcattatagtttgggctcat

SEQ ID NO: 34255 - DNA, 1854 bp, Homo sapiens
actgatcttttggtccccagaatttccactttcctaacttgaccattacccattggacactactaatttcatgtattttcactgaatttgttgtgttgtcatgtacaacaccctccacttcccaacccacccccgcgaacgccgtctgactccagaaacccaaacttgtgctcatttttcattattccaccttctcctgatagtgtggtttccttcactctagacatgaggactccacagctttattcccctaaatggaatcccccatgccctaccttgacatggccagtttccgcttgcagcccaccgggtgatttatcggaggctcttctttcacctttgtatcatccacgatttctttcttcaggaaatccttctcttcttttacacactctccatgcatcaattcctcttttatgcattgaccaacaaacttctcctcctgttttatctccaagttatccttctcttccttcacttctgaccagtccattacctcttcctttaccttctcttcctttacctctggttcacccaccttcgcttcttttaccactaaactactatccgtctcctgcttcacctccaatacgcctgcgttctcatccttcacctcaggcctatcctccacctcctgttctacccactggccagccaacctgccttctgtacctggccagtctataatttcctgcttcactaccgttaggtccatcggtatttcctctggcctttgtccacttccttcctctccatcccctatctcctttatccctgtcagccctgtcccctcctctccgccgccgaactcctccgcccctgctaagtcccttactccctccctgccaggctctggacttagccgcaccccctcagctacgctgtggagacctcccccagacttcccttcattttcagcagcaaactccatcaactcacgatccttggcctctgctgccactctatccttcaatgtggctgctgcacaccaataggaggaattaccggtcggaatacctacggcggcccacgtgtggagccaagcagccacaaacccggaatagcctgcttgacgcgactgctcgaatcgccgtaaagctacgcttttgcgcctcgccccttcacgacttgtagagctctttacggctctgcggaggccctgccggattctctgggcgaacaagcgtaactgcgtgacttgcccgctggggttctcgtctccttcctggtttccaccaccctcttcccttagagaagcctcctgggccactccctgggccaccctccacgccctgctgggtgtaaagagtgtaggagaccggcagagggagagaagcgaaacccttacactctggaagtgggaaaacccaccctaatctgtgttaaccattaaatccaatcttgcatgaaaatggaggacacacctgatgttattaggcctttccaagctttagtttcttaaagctataaactagggaccatggtattattaatataaatctcccagtgtcattgcaaagattatatgagatcatgcatggaaatcaactagcagtgacggacacaaactcgatatataactgggaatcctgatgggcttcaaaccgcctggtttccaccacccccttcccttagggaagcctcctgggccacaccctaggccaccctccacgccctactgggtgtaaacagtggaggagaccggcagagggagagaagcgaaacccttacactctggaaatgggaaaacccacccttatctgtgttaaccattaaatccaatcttgtatgaaaaaggacacacctgatgttacacctttgcaagctttagtttcttgaagctataaactaggg

SEQ ID NO: 34256 - DNA, 2594 bp, Homo sapiens
ataaagatctaaaatagacaataaatgagaaatagggttttttattatatattcatttttccatatttctggaaaatgaaacagacatggagtatttcaaagctgggagagatcattatattggagttaccttagaaagagggggctgtttctgccaccacaacaaagaatgaaacaacacaaatatttacgttttcttcttgtcctcataatgcttttactgcactcgtctttcaacctttaacatctactgcatctgtgactgttgtttcagtaaaacacggaagcttgaatgtaagctcatttcattgcctgctgcacaaccacacaaaacagcattttcttattcttgaaatatgatagcaacgtctccttccatgcttgtacctgttttaattcctttcaagcagaggctgtatcgtgaaagatgcttaagaagttacttggaacgacaggatttggaacggatgtcacatcatattctcatttgttattaaaattagtcacgcttaattgttaaggactatcctgtgtcgctcgccatctttgtgtcctccacctggcactttgctttcacacagtaggcacatagcgttgaggtcccggaaggttgtcaagtaaccggccaggagcttgagggcaggacattgtctccgacacttgattcagtgcctggcacacaggaggtattcaattatgctgaatgaatgagcaaccggctcggtgggggacagtaaacccaaccctattccgcgaacgtttgctgagcggcatccaggcctcagggaccaagtgtgtcgcgcggtgccataccgtgaccgggacctgttatttctaatgtccagatattgtaattctatgctgtaactcctatatttcctcttaaaacaaaaagagaaatgtgggtcgtgttcgctctgggttctcgttaagtgcaagcatacagaggcgccgagaccccgcggctcgccctcgccgcttcctccacaggagccgggcggagctcccggcgcgccccggggctgcgccgccgcaatcctcaaggggtcgctgttcccgcgataacctcgagaaaggctccgccccgcggcccgcgcttgtttttcccttgggacccgggtccacacggcggggtcgcccgtccatctccggctcgcccgcggggcccatcgtcgacgttagcggccgttctccgagccgactgacccatccttggcgctgccgccgcgcgcttgttctcctccctcgccccgccttcatcctccccgttcacggaaacgacagctgcggctgcggggctggcgccgcctccctccacctaccacgtctgccctcgccgctctagccctgcgccccagcccggccgcggcacctccgcctcgccgccgctaggtcggccggctccgcccggctgccgcctaggatgaatatcatggacttcaacgtgaagaagctggcggccgacgcaggcaccttcctcagtcgcgccgtgcaggtaccctggtgctggggggaaaaggggtggcggcgcccgggaaggttgagggaggggaccgcagctcgacgcggcgcccccgggcctcgccgaccacccagcgggcctgctgcagccagaggcctgggagatgggcgcggcctggtcccctccccgggcccggcggcggatttctgccccgctcctgcccaaccgccgctccctgggaagcgaggcggggtggggacggggccgggagcttcctcccacccctggggaacactaaggctgcactgtccgcctttctgataccacgacgtcagtgctcctgtggcctccaccccggggctggcggaggcttgcgagtcctttgcggtaaccgagacacaggccattcttgcactaccccccaccctttcctttcgtctctcaccctcccctcggagtccaagaagggagtttccttttcctgtccttcaacccagagagctgccaacacagttccctccggccctctttctccctgaaaggactgtcctgggcttggcagcccgcgggggaaatggagatcgccagttggcgttgagactttgccaagaccacaagaaacctagggttggggggttttcactctttttcaaaatgggaagcaccagctgtagatcaaggagagatgcggggatattgttatggctgtagtcacagtagtatgttttaaatatactttaaggggaaaagttgactacctctcgatattctacaatcaaggaagtgtcagtactaaggaacttgggccgtttcccacagtcatcacccatgttatgccaactcagtaaatctgtgaacagatgtaaatttcacaacatgaattataaacaatctggtgtttacggtcacggtagcaacaacattctcttttgtaaaaagaaaacaaaaataattttctaatatgcataccaaattggtgctgaaatgtaaatctgttctgtggctttactactttccttgcctttgccccaattttgttggcacagttgatcctacattgcactatccctggcaaaagagtagtagagctagagcaaggtaatagctgcctatattatgaaaaacctgtcaa

SEQ ID NO: 34257 - DNA, 2967 bp, Homo sapiens
caggagtatttttagtaaaatatgctactagttgcaggttgattttcagcctgccattttatgaagtcctactagacttgctggaaacttggaaaatgctgtatctgctctagtctacagcagtaggacaccaagcagtccattgagttcagttcagccacagttattacactttgtgcacctactaaacaaaagaaaaacacagtatttctgccttcgaagagctcacagattacaggtaaatccagggtatatacacatacaatctcagttatgatggctgccaggctaaccaccttcctagtgatttaggctgctgaaagtcttagaaaaggactgtaaaatctcctaacataaaaagtggctaaaagaggtattaggagttgatcacttggctcccctctctgggtcttgcccaactctagccacaacgacaagcatccaagttaaattctcacttccaaatctaatacctgcttgaagaacttcccagttgcctcttagctttgcttcatggcacattcctggtaaatcaaaattctaaacaaatttatcctgtcaacaagggactatttaccactccataaatcaacccagatttttcatcctgctctactatatacgatgggtaaagtattctaggtgatctttgagcattttatctttttcttgagagaggcagatttggggcacgattctgaatcttctggggcaggcaggtgctctcagactttggttttgatgtagtggtgatagctgtggtcttcactgcgctacaggccagctgacaaggatgttgctctccttccaacctggggctcttggttatccttgaaggagaggaagtgaaatcttcttattttaatgacctaatcagaggagctgaatcaaaacaccatttggcaatacctcagtacatgattctctaaggctcacaaaaaagttttgaaggaaagggtagtttgtactttctatctaaataaacattttctgaagtcacagtacaaagagtagactacaagtcctaatgaccatggatatcatatacaaaacaagattagtacctgagcttaggagggagtatttgtacttacaacatctaaaatatcaaattaatgagtcagaactttggccttcattctatctgcctttgtaaaacatatctcagacttctcagggtaaacttgatctgattcaaactggaaacaaggtatctcctggccgagatcttctcctttcagattaaacagtctgaaaggaaaaatgggatcttccccattttaagagaataaacatgtgtctctgaggggaaaagaaaatgaaaacattctatcaaccagcacagcacactgaggaagagccaggtgcaagctcagggcaacaagacacgttttctcattctccttcactgccaccatcctttcccaacccctgcactccctctgtccccctccatccccattaaaaaacagcaacaaaccgctatgattaatgactaaagaataagagcaggtgtacaatctttatacattttagatttggatcaaattcactcttctcaattcctcttcctaaagccccaccaataatcctttgccatctgcccctcctcccctttcctttctgaggctgctaatgaaagtggggtggccaggactgaagaaggacttgagctggctgtctctgattgactcctagctatctcatgcccccgcttcctgctggcagaaagcaatgcaaagtgactgctgtaggagcagctgctgaagctcatttccctcccccgatgcctgtcacattcttgggcaatatttcagaagcttactcatcctgccactcacttcccccgcccccatacccctgcccccaaacaagacattaggaaggaaacatgagagattttattttagcctaattgagcaacagcccttacttcatcttgagtaagataaatgggctgtccaacttcacttctcactttatctgtaatgaggtttctctctcaactgtttaccaaagtattaaaaagcactttgtagcgccggctggtatattccatcaaagagagtcaatagaacagatgaagacatatgagaaagtcaggagataaggtgccttttatgaaagttcagattccagacctattaaaaagaaccgcttccccctctgtgaattcagggacaaaaaaaacaaccttttcctctttggcagtaaggtggtttctcatagggtaggacagcacctggcaggttttcccagagtctgatcgaggtgaataattaattgtagtcattaatgtccgggtggtaagaaattgccagaattgtaagatcctaataggccattagcatctctatactggatgcactttagtggactcttcctctgaccagcagcgatgaaacactgttctgttcttgctcaggctctgtctccagctattctggaagagtcggtcacattcagatgttgaaaggtacaagatagggagtccgaggagcagaccctgctcaagattttgacactaaatgctgtgtgaccttaaatgagccattaaatctcaccactatataatttcttcccttacaaagtagggaggaactatctcatgctgataactgttctgataggaaatctgttttgatatattgtgatttttacctaagaattaagtatggatattttgttgcattatagcctcagtcctgtttgtagctgtcattcaacagtatgagggcctactatgcctgtacttgtggtagggaggaagacaagacatataaacctgcaaagtgaaataaaaggcacagccctgttggaatgggaagccaaatttctactcctcattcaaaacctcatgaaatatctctccctgactgcctccccagctatcttggcaaacagtgcattccatagaagatcagggcctttatcacctcgtgcagtcatctgtcttttcaacctcct

SEQ ID NO: 34258 - DNA, 1321 bp, Homo sapiens
aggagagggaaaagagggaagttgtttgtaaatatacaggttggttttgcaagataaaaaagttctacagatctgttgcacaacaatgtacatatagttaatgctattgtactgtacacttgggagtggttgagatggtaaatttgtgtcatgtgttgcttaccattatgaaaaagaaatactgcatgggtgatgtgtacttccctttgaaccacatcagaaatcacatgatgccagtttaccctgttattggtgattcattgtttatttagcttatttttaggattcagtgagttaataaagggaaagaacagtacagtggcagtcaaccatgcaataagagacagctgttatagtgatgattattttttttgaacggccttccctgtgcaaaactccttatttcttttcttctgtcactgtggtacagtcttctcaggagaactgcccacaatcttgtggttggatctgtcaaagtccctagtttttagtctgtgcatagaggctctgaatcattccggtaacaagataacagcatgttcccagaataaagatctctgaactatctttggagttagtctgaccacttccctatgggaataattgatctagtaatgtcctcatttatctgaatgctgagtaatttttttaacatgaagcaatcagtctttcttagccatctaaatttagaatcaaagacttcatcagggctagaaaaggagatttcttcattccctcaatcagccaacattacaagaactgaccaggcgctggcactaagacatggtctttactccagaagcttgcagtctcatgagggagacaggcttccaagccggccctcatagaggagtgcaatgctgagggcagttccgtgtgcacggcatggagctgtggtaccggggcgggggacacaggaaaggtttgtgcccaagtcaaaaagcatcattcacaccactgtgctaagatttggtccttgtgtgacttctttctatcccctatttaagtaaatagactcaagtaggaaatagactaaaataaataatatccagttagctaaaagaccactcacagaagtgaaagagttgaattatgtaggtgccatgaaaattggcaatagagaatgggaaggaagagcacagaacctgaagtcaactgaactgtccgactttactgctctctcaacctttctgtgcttcagtttcctcatccgtaaaatgagacaataatggtacccactcacagttgttgtgggggttacatgaggttttatgataaaacactttcccccagcaagcatgagcactagcaatgttagttg

SEQ ID NO: 34259 - DNA, 1020 bp, Homo sapiens
ttcagcctcttttacctaatgtctaatttactatgcaccacaaatagaaataaactcattgcatatttttctcttctttatatttctggtattgccctcagcagttagtaactacagttctagaaatctgtttccaccctcataatacatctcagcagctgccagtggatggaggctacccaagccccatggcaactgttcaaacagctgagggaagctttagggtggagagtggcgccaggccagagccagtgagagccgcaggcaggtagagtggcacgcacctgccacaggacacctggctgacacacagccctgggtacaggaagggaggacttaacacacacaaaaactcatctttgatggcagttcagctccttctctctcctgtcctattgacctcttagactttgtaatctttcaggagccagttgtatttatctgtctgccatggctgagacttgctcatagacaagggctggttagcaagcctgtccctttgttcctaagaggcagagaaagaatctttgaccctgatttctaagcacagtaaacaaaggccttcttggctgccagtaagctcaaagtgttcattaagcaagaagttttctggccagtggttgaaatgacatcatgcttcctcctggaatccaactagagataaaaatcaggtcattcaatttacaaagagagaatgctcccttctgctgccagcattcaggggctgctggctttcaaagagatcaagggcaagaagagcctatttgaacccaggctttgagatggtctctgaaactacctccacttaattcctcataatatgcaaagaaattccaccccaaatgtcctcacgtcagagagcagcttatctttgctgatttttcaaactgagtgtttaaccagatgtggcagtgaggaggtaggtcttattagctgataatggaatagtctttcaggccctctaaatacaagaggatggaagaaatggattatcttcatcttttgacaccattgatcaaa

SEQ ID NO: 34260 - DNA, 462 bp, Homo sapiens
gaaagaaagccttttgtggcttcagaagccatttgcagagggcataagtgttaacacacaccgcttagattcaaaagcccaatttggcccctagttagcttctcaggattgtttctcctcccatgagcgtttccttggctgcagttggagagaagagaaaaagtaaaagcatagcctcagagtgccatgcagtgcagggaaagcaaagttcaccaggagagggggcagctgtgtgcggtgcctcagggccactattgatttgccaatgagattccgttgctggaagctgaacttattttgggttccaaagcaggtaagaagaggagagaatgggagttatcagactaaaggagacagcagaggagttgtgttttgtttgaagcaccctcaatcttttgctttttaaaaactgaaatacaactgttgaaggcaagaacgaggtgctagttctttttgtctgtt

SEQ ID NO: 34261 - DNA, 592 bp, Homo sapiens
taatctttctttcatttttttctctctgtatttttttaaatttccacaaaaatgtatttttataaatagcagaaaataacaattgttttcaagtgacatatataaggaagccgaaaaaagtatagaactcagctttctgactcttactggggaacaaataagtgacaaaataaagtgatccattttgggttatgtgagaacagaggattgtaggagagagatatttggtctttcctaattcaaaggctcatgtttacttttccttcacctggagatagcagggattaacagatgtttattttaactctgccctagacaccctgcaatagctcccagcagatacagtggccaaatctgctctcccactgtttaagattgaagaacaagactgacttcattttgggaactcggggggctcttgttacttaacctaatgggcactgagggtggtcacttttgagagaatgatgtaaattacctgcagcatttctacctgaaacctgttccaccctttctttttctaacatgccatcatctccttttaaactctgaatctctgccagctcctttgttcaagtgcttcttattccag

SEQ ID NO: 34262 - DNA, 2100 bp, Homo sapiens
ctgggagactctcatcactgacttccgtcagtcaaccaacatgtaacattgtttttacgttgtttctgtttaaagatatattattttatattaatatattaaaattgaatggccaatagcactgtaactcatgcctgaataaagctatctgaaacacttattttttctgggaggtcttcttgtactcagaatgccagatagcactttattactaagcttggggtcattttaaacagtaaaaccccaacaaaaaggagaaaaatgtgaaatatgtggcactaaatactgttaaaaggacactcatttgtagtatgagagttgaaacaatggtgtcaccttgttcgacctcagctgggaacatgtaggttgggcactcaaatatttggatgctctgtgcatactgtgaatgactatggaagtgctgtattatggggttacaaagacattttagcaaactggtgaattcaaaaagggaatctgtgaaaaatgacgaaaaaatatatgataaaaaccatttctatcaaaaaaaattttttttttaagttctgaatttcaaggtctaaacttcaacctcttcatacggctggatagataaaatacagtatttgagatacatgttcaggactggttaaaaggaaaagtctgttttagagactttaatccttagttttattctttcagtatttcttcataaccatgtttcaggctgattcctgagtcaagggacagttcaaaggttaaagtgttgtttgtatttcatcagcaaaagtctattttgaatttttgatcacaaatgcaggacctatcctccccataaagagtcctctgccacaacaggatttaattaaaaggcactttaattttcaaataaaagaaatacttacatctgatatgtaagtatacttgtatctggactatatatatctgtaataagttgctcatatctggaatctgtactcttacttcccatgtatttgtacatattttcatatactagctactaccaattttaatgtctaaagttatttgcagtatttggtttcaaaatttttattaattttagaatggctttcaagcctcaactcctcttaaaacagaaaatgtcagttcttgctcatagctccttgtaagaggtttttgccaaattcagaaatttagagataaattaactgcattaggttataagtaacataattttggcagggggagcagtcataaatatcaaatgactattacacatcatgtttgtgattatgaataagcttaatcaaatgtctgactttggctacaaaatggtactttttggatcagtatttatacccctttattggtaatcagcagttttgtttctttaaaaagatgttctttgattataattggtgaaatacaattggaattggctggttaacttgaacttcccaattaaaacagtggggctttggtagacacttttattcatcagcttgagaacttggaagcactaagatactgtggggctcttcagcctctttgatctctcataataacttgaatacaatagactttttaggcatctcttcacttaaaaaaaaaaaaaatacaaactcaatgccagatactcattcaactagctcttcctgcctagaaaccagtccaattagttctctatgctaatcgcagaagttttgaagtttcattcttcagtcccactattcttttgtatgtggtggcaactcctctcttgttgttttttccactgtctgtaactagcttattcttcctcttgttctaaactagtaataaccagtggggattagtggcacatttaaccagggccttgtactatcaaaatgatggccctctccactgctatgggtgatcaaaagtagaccacagtctgccaggatttcttattttattttgattagccaaattactcagggcttatattcattatcttgctggctttaaaaatatatttcttaattttaaatattacataacacaaactgctagtaaatattagtaactcatctctattcaaaataaatgctttataggccaggcgtggtggctcacgcctgtaatcccagcactttgggaggttgaggtgggcagatc

SEQ ID NO: 34263 - DNA, 2940 bp, Homo sapiens
gtacacttttcccattcaaaggtcacccatctattctgccaatagagaaaaatgaaataaaaaacgctgccttaaagaagacaacgaacatcatttaaaaaactaacttcaaaaatgaattatactttggtatagataactccttttactccaacaacattgtttaaaagcacaaatcgcactcaagcgcagccagccgtatatgaatagcagaggagaacggaagttaagagactaacagaagtagtgaaaatgagagagcacgcgcgcgagagaggtaaacacaaactgttcgcctggaccaacgacttgaagacttgcctctaagagttggaagtctcgtcatgagtctcttgcatttctgtccatttaaaaacaacctccacttcttgccaagctttattattcccccctcccacctggtgtggtttacagattgtttttagcaagagccgtataagagaagctacgtacccaagacaatctgaaatcaagagaaaactgctgctagaaacccaaggcggggaaggagaaggatcaaccgagaaattaagccacgttgcattctggccgcagcagtcattaaggaagcgcagtcctccccacccttttcaaccaggaccgaatgttgcgtctttctcagctgcaatcactcctactctccctgtggcagctgcgaaggtgatctacactcaccgcttgaagcacagtcgccaacaacaaccgtagcccaaacgccggcaccagacacccactcggcccagccgccatcgctaccattttccgcaggtttctggctgcctagaaggacccctaagctaggggcgtccactccagagcctgatccaaaacagaacgctaacggccgttgcccttacatctctcatttggaagtgacaggtattaaataacggcatatgaaagcttaaaagtcatcaaatacaatcactgggtgctttcgattacccaaatcaggcacttgcctaaactccccacttctttacttctgcggtctcctttcttttattcacgacacttcgtcaagcagccaagaagccacgccttcgccagttttagccccgccttcttctccaagtttacccaattgaatgtcgtcttgattgagctctgtggcagaggaaaccaaccgtaaaccgaaccaagagcgaagcgcaggggctcttccgtccaataagcggacccgaacggggggaggggcggggcttctggttgccgagcagcgtacgcggatgcgtgcgcgtggtggcggagggggatgggcgggggcggggatgagggcggcgcagccgcagcgccggtggaggggcgcgcggccgcgagcaaaggagggagggaaggaaggaagagagggaggcgggcaagcaggcgggcgcgggggtcggggactgaggcagtagagggaggcgagagcccggcagccgcttcgcgctgtttgctgcgcgggcttttggagggggcggccgtttagtcggctgaggagaagcggacaccagcggcgttggtgatagcgcctgggggagggggactggagaggcgagaaggggggtcgctgcggtggttctctcgctgtcgctctctctttgcctcgctcccggctcggcgggctcctcccggcgtctctctcgcctccggggtcccgctccccgccccccgcggtatgtcttgatcccgagcagcgggtttcatggggctcctcaggattatgatgccgcccaagttgcagctgctggcggtggtggccttcgcggtggcgatgctcttcttggaaaaccagatccagaaactggaggagtcccgctcgaagctaggtgaggaactgaactgccccgggctgagtgctgtggaaggggccgaggaggcgctgccgccggagcaagtgggcgttcatctaacctggggtctggctcgggggctgaaagcggtttcaaagagaaccgggaacaaggggcagcgagagcacgagctccaagaatgggttgaattaagcttgagcggcgtgctgggctcgcgaggtcacggggcagaggttgcaaggttgggcttccctagccaaagggtagccccgaagtaggcattccgcggagagagagcgagagagaagaccgaactcagtggggagcgtgtgttgctggtctccggagacagaagcgcttagcatcgcgtgttctcttggaagtcgtacaggaagccctggcaatgtcagatgaggggtattctaatttgagctatgggcatctggatacgaattcttttgggggctcatgaagggataggtgcgcagaaatgggaggagatgctgggatgacggagagcaacatgtgaacactgtagcgagttgcactcttgtgctccgggcagcaaaggaccttgtaattgccagctgagggaggctggccgggtagtgcgggaacgcgagtgcaaagcttcatcggagtacggaaatgagggtccggagatttaaattcttctttagtggcgctaaactgatgaattggggcttgagaatagggatgcctatgtatgttgcttcacggcagtgttgatgtgaatttcgaagaggagggaacgctgaaggggaattatgtagtgaagtttgtgtttgttaaaggaaaagtaggattatgcggaaagctaaccatatggttaaataccttaaagggttaacaggtgctttaatggatgagggggtctaaagtacaaaaagttggtgtgaagttgtgaaagacaggccagaaaaaagcacagataataggtactttcggattaatagggcactttggcatttggaagagctcagcatggagagcgagagttaaaagaatgacagtgataaattttgatttaaaaatgtacatggcacttaaaaatcagctcaagaggatgtaatttgaatatggaaaagtaatgtgaagtgttttt

SEQ ID NO: 34264 - DNA, 838 bp, Homo sapiens
gttttgtgtttggagatggactgtatttagagacatctctttttcccccagaagttctgttttaaattaatgagaaattgggtgaacttattttcttgctgaggtacacagcttgaagttttggaagtaaagtatacatagtcttttctatatgggaatggtggaattttctagacttgattaaagtactgttgtttaattttttaatgagaaccttctttcccaatacttacaatgtcagtactttcaattaagttgctgtgaataattcctcctgcccattttttcttcagctttttaatttttccaagttgagttttgaatttttgatctcttttgacagcctttttttctttttggctaggactctctacataacttttttgatagttatggaaaacagtgggatagatgttcagatgttataacttctcttttttggctgggatggggtggatgagtaaaaagaaaaaatcaataagtcagtgaatgttggcaggtgttcagagattttttctgtgtgtcattcaccgtggcacagttaagtaactgcttatgattaagtttttcacagtctcagaaaataaggagtttcaaataataatgtgggtaactgattagtatccaactagtagtggtgttggatggattaattgattcttagagagtctaggaaatgtcagaacagtatacattcaaactgctattacgacaaagtaaaagttaccttgaaaaataagtaattcaactggtagaagaaactttaagggacagactagatttggttttctatatggtctttcattctgaatactaattagtacttgaacatatataa

SEQ ID NO: 34265 - DNA, 859 bp, Homo sapiens
gtcagttattccattcattctggcaaattttctttttagctttggttgcagcaggaagagagagacgtctggggggctttttgcctgttggaagggcatcactcgtccacagctggagcccctgggatgacccatcccaaggtcccagcctaagtctgaggttccagggctggtcgcaggccgtccttgcagccctcgccagagcgttgtctgcacctccgacactaggtggcgccataggaacatcctcgcggcccgaggcgcggtcgcagccggggagcactcgccacggtgctgtggaattctctggtttttcacgcaaggtcaggcgtcctgctggcgccctctcgccaccctgccctcccgtcagaagcccggctcctcgccggggaaggccggatgctggcccgccgggacctgggacttgtgccacatggagtgtcgggagtctccattgccgcgagttctacaccacagggccaggctgtttgctccccatcggtcgctgcccccagcaccctgttgttattaaggactcatttgcttggagcggcatcattacaagggtgtggggtactacatatactccctatttttctattttcgaaaggctgcaggcgcgatgcacagtgcgcttgcacggtggggcctagtgctagcccgaggagcggacgggggccgggcaggggcggtgggcgccggcctcgtctcggtgctgctcggtcaggctgtcccggcgcggcggcctcgggaggccctgccgtccttcacccctggaggcgggctggggggcgggtgcggggcgcttcccctcctcagggccctcaaaccgcaagggggtttccgcttcccagtcgat

SEQ ID NO: 34266 - DNA, 1207 bp, Homo sapiens
gtgggggggtcttggtcattggtggagtttctgcgcatcgtacagctcctgttacaaaacccttcattcgagaaatatttcctgagcatctattgtgtgccaaatgcagatgcagatgtgacacaagcaagacaaatggtctctgctctcaaggggcttacattctatgggtgaaacacaggtacagataggcaaaggattgtagcaataattgtagagtgagattgttattaaaaataaaagtaaataatagaatacagggatacagtggtttgtggtgtgtgtgtgtgtgtgtgtgtgtgtgtgtgtgtgtgtgtgtgtggtggtggtggtgaaggaagggctcccagaggagatgactgctgagtggagacctgaggcaagagggaaccagacatatgcaaattggcactgcaggcccagggtgcagctgatgcaaaggccccagagctacgctggcttggctttgaggagcagaagggaggtaggaacacagtgagcatgaggagagtgttcagagatgaccctggccctggtaaggaattaggtttattccaagggcaatgaaaaccttagggagaaatgctgcattttcaaagagcactacggctgctttgtggaaaaggagctgtaggtggggtgggcaagtttgggagcaggaagatcaggaaggggcttttgtggtaatctgttgaactgactggattatttccagaaagaaactggggctttccttgctgaggctggtagtagaaagcggaagtggagtagcagatcagggttcacagcgtgtggctgagagccagggtgacattcctctggacattcttctggactgaatccttgcatcatctacatttaaaatgaacctcagaagccctggccctgtgatgctgatgctattgaggttgaattctcagggagtgaagaaagggcttggctgagaacagagagggaggagtcccacatcaagggatgacttcactaaggagggaaactggagagaggtgggcatttccaggcagaacaacagcgtggcggagagtgagggagctgacggcaggagtgatagctggtttaatagagggtgcgttgcggcgctatcagcagtgtggagtgggatggcgaggctgcatgctggaacttatttaaagaggctattgtaaaagtctctgagccagttaattaccagtttttgttatgtcag

SEQ ID NO: 34267 - DNA, 2796 bp, Homo sapiens
ctaggctgtgcttcggccttggaaaaagactctcaggctagcaccctaaaagcattcctcaaaacttgatttatactagaagtgacatttcttactctctagaggctgtgagattgcaaatcttgcaattacttccattgcttttgggggctgtgagaatttccgcctctcatcctccacagtgaggagggtagtcgggaaaggctttctcccttaagttttcgtcaactttgaaaataaggactgtgctccctacatcaccagcaattgacaaggatccaggaaatgcctgctaggcactttcaaactcggaaaaatgggagtatgagggaggctaagtaggcagtatttagctagcaactattatttcctttatgtttctaccttgttaactaagcttccactacggttcataaatctccaatatcgtgaattaaagaaacaacaacaaaaatcctcttctgtgtgcttgtgcgtgaggggatagaagtccactgccctaagatgcaggacttatcttcccaaacaggaagagacccatttctgagaaagatggtaagtttcctaagggtctcctctcagatagaggggatggcagtccccgaggggcgagcgggcgcgggtcctcagggtccccgtgcgctgagaaggcaggtgaggccccgccctgcgtctcgactccggatcccgggtcgcgaagggcagcccaagcgggtccccggccccaggcgcccgggtcacttcaccccacctgattcgggcccttcccttctcctctgtcggccagctctgccgcctcgctctctctcccgccccccgagtctcgtttcagtcatccctttgtccttccccggattggcaggttttattattccgcctgaacaatccggccgcccagtggctgagggtcgctgacgtcggaggcagagccggggagtagttgggattttgctctgtcagtaacacatgtgtaagagccgcggagggagcgagcgagccggctagaggccagcgccgccgccgccgccgcctccgagccgggcagcaacagccccggcagcggcgcaggctccagcgcgccgggcccggccggccgcagcccccgacgcctgggtgcgcctgcctgccggcctccgcaccgtccgccgccgctcccggggctgttgtgtctgcgactgctcccggccggaggtgcagggagctcagccgagccgccgctgccatcccggagcgagcaagcgagcgagcgcgcgggagggaggaaggcggcggcggaggaggaggaggagcgggaggagcgcgggcgggggcgggggcccccgggcgggggaatatacaaagtgaagccacattgccaaacttgcagcagcgattgcagcagttgctgccgctgcgccgcgcctgaagccgcgccgcgcgggccgagggctcctgcagctgctcgcgcgcagtcggaggcggagaaggacgaagactgagactgacacttctgctcccggccgcccggcacttacgcgggggccccccaacccgccccagagcaacgcgatttaaaaaaaaaaaaaaagccgcccttagccccctcctcccctttcctgcttctgcgagaactccctccctccctccagctccgccagcccaggcgccccttccctggaagccgagcggcttcgctcgcatttcaccgccgccgcctctcgcaatattgcaatataggggaaaagcaggtaagggggcgggtggagagccgcgggccgggaggtgggagagggagggagggggtcgattcgggccagggctgttttctttggcttccttcccctgaccgtcccaaattgcaagtaaacaatacgtcggcttagataaagcgcgagtctgaaactaccgaggccggcctgcgagctagcgcggagggcagccccgggccgccagctttgtagcggttcctgcttacaaaagggctcttcttggaaacggggctggtggggaccgtagagggggtggggatatttctagttcataagggaaaggcaaggggtgcttagatgaggattttaagtatgagaagtagtgtgtttgggggggtgggggtggggatagtcacgataccccccctcccttctagtaaacactatttttgaaacagtggcaggaaggatctaagtgagcaggattcggtattgctggttcttttaaaaaaattcttcttggcttataagtcttttgttccaatccaggagaaatacggtgaatcacctaattaaaatcaagacatgaattaagcatccatttttgtactacaaattgccagcgttacgtttgtccctcccttggtctccattaaaaaacaccagagacgttgttaaaggggggcagattttgcctctagctgccagttctgctttctatttcactgactatcccaggacctaaattgcttggctatgtaattactagagtataagcctatttaacttaaaagctttcttttttttttttttttttccaactctaaatgaaacttgatgagggcccgtccttagttatcaggggagtcagtttctggtcagtcttcttgattcatctcttttagatttaatcagcattaaggtattgcttgtccttaagagctttagctaatggggttactggatgcttttctcagtgtaatgtttccttttcaaaaaaaaaatacatatatatttacctctcactaaagatgggggcggggaagagcttggaatctcctccctcactctccttttaaaaaggaattcggagcgattaaaacgttgg

SEQ ID NO: 34268 - DNA, 1991 bp, Homo sapiens
actagaggaacactaggactttattggactcgggattgaaggcaacaaattaatcggtttaggctaagctttataaattgattcctatattatatcccagttgcatctcttgtggcattcattagagtggggaattcttttttaaagcagtttttggtgacagcaggacgggctcgaatttaacttgtgcatcccttaatggtgccttctcgcacattatctgtaacgccgcccgccccccccccccccccgccctttggaggaacaaagctttagcatttaaattgctgatcaagggcagattagtgagaccaaagtggagagtgtttgtataggaagttaacaggcatcctaaagttcaatgatctattattcttgcctgtgtcctgaaaacccagagaaaacactcattgatcttcaaaatgaaatgagatttggaacaataatgggagatggcggtcaccacaatggcatgtgaaaggtgctgcttaaaatacgaaaaaccagtttcgcaactttacacactgcacccacccctcccgtcaccttgccttccctcccatcaccacgctctccgtctcccgtctgccggtccctccctcgttccctttcggaaaaccgaactatttccaacttgtgaactgcagctgcacttcccggggcagaacccgggagggaacgaggctccggcggggccgccgcctccccactcctctcggctctgtcccggggcccggcgggggctggggaggggccgggcgcggcggtgggtgggtttgaccctcatttgctggaggcgggcggcggaggaggggaggagggggcagtgggcggaggcgggggctgggaggaggtgccgcgaggggtggagcgcgcagcggagcctgctctcggagttttgacagtaccggagctgaaattgtcagcggcggcaagcgcaggaaagttgagaggagctcgtggccccagaacaaagcttgagaaaagtaaacaggcggctgctgccggcgagcctcccttcttccctctccccctcagcctccttcccgcccttgccctgctgtttccttccagcagctccgcggggaggaggggaatgggcttgctctctctccggcgattactaacttttgcatcgcccctgttttgtctttctctccctgtccccttcccgccctctgcagaccatggtgaatccgggcagcagctcgcagccgcccccggtgacggccggctccctctcctggaagcggtgcgcaggctgcgggggcaagattgcggaccgctttctgctctatgccatggacagctattggcacagccggtgcctcaagtgctcctgctgccaggcgcagctgggcgacatcggcacgtcctgttacaccaaaagtggcatgatcctttgcagaaatgactacattaggtaagactttgctgtctttcctggagatggggggaagagcaatggcaaggccaaaggttaacagggttgtgaggaaaggagtaggcgtctacggggagtatgcagccttcacctcaaaaatcttctagttggcggaatttaaggggttcaggaagcatgtgttagtcttccaatatctgatggcaaattcatggcaaatgccatactaagtaaagaccatctggtgggactgggtcattagatgtgcaaaggttgagcaccctctggtcctagagtttaagtaagtggtcagcctctactggacttcaggctaaaagcaaacatcccaagcgggagttaagctgcgttcttaaaacaaggtaggaactcacagaggaacccagaaacaaaggttgacttaaaaatacaagtgtagttagtgagaaatgatttgtctatggcgatggcttattaacgatatttacataagcatcttgaaacttttttgagcggaaggctgtgattcgttctttgtgctccttgagaaaaatgctaattatccatcagtttaaagacttgtaattcttct

SEQ ID NO: 34269 - DNA, 1541 bp, Homo sapiens
ctttcaatgccgcagggaccgctgcagaagagtggagtaatctgctcgcccgccgccaggtgaaggggaccccttggtccgactgagaccacatagcgatttactgaggggcttttaaactgtcttgactttgagttgtggttttttgaaaacaaccaaggtcttgctaaaaagctgcgggagagctgggaaaggccggcctgagcgcgggggagggggctgcaagatgagggggcgctttcaccagtcccctccccctccgcggccaagtgtcgatgggcagagctgggcttctgcctcctctccctccaagatttcagataaagcggctgccttgctgcagcgaatccgcacaattaaaagctttaattagtggctcctccattttcttagttctgatgggctttatctaatgagatctggtctctggcttagatctgctccgaatgacgtgtccgcaatgaatgagagctgcgtcgcaaacaaaacatttaattaacaaaattggcctctaagagagggagggaaagaatgaaggggggggggttgtagagcggagggggagggtggatcttaaagggaccaacgcctgcctggcccccccatcttacaaaaataggggaaccttgggactgccccttcccccacccccggctcccgacccctcagctccacccaagcgccccaagtagcttcggaaactccgtttctcttcctcgaaccgtctttcctccacccccacctcgggcccgaagactggcgcggaaagtgcagcgagaggaggaagttcggagaccggcgggtggggctccaggtccggggagggcgaggaaacgcgccggaagccagggtggcggtcgtcggctggccctcgctccctaggcggccagcacccgggccggcgccgcccgaggccgcagccagagcgcccagccggcgggcggtctcgggcccacgagggggcgagcgcagggcgggagccgggcgagcgggtcgcgctttctttccccgggctccactcgggcggttcacgtggcgcccgcagccgcagtgagcccggcgcggccgggggtgggggcctggggcgagggtggggagaattggtagttggtggtggagggtgtgtttgggtagggggtggcgttaggaatggaggcgccgccagacagcgagttcatttccctggtaatcaacagcaagctgctatattcagagaatgctgtccctttaattgaacaggctaggtaattaaatggcacttttccaataggacgtgctaggtaaatctaatagttggttatttaatatcactttgaagtctgcccactcaagcacaatgacagcacaggagcatgtgaactattagctagaaaaaaaaaaaaaacaggatctcaaaaattaattaaatcgcatgcaatttagggggaacgtttatcttgatttgtcataacagaattaattcaaggcctccaattcacttgggggcagatctgttactctgaattaaccaagcgtaatttggctgattttttttttcctat

SEQ ID NO: 34270 - DNA, 861 bp, Homo sapiens
aaatctgctaccacccaatagctgtatgacatcttgggtagtgttacttaacccctcttagcctcagtttcctcatctgtaaaatggggataactatggtacctacctcataagggagtatttaatggttaagagtatagactctgggagccagactgtctcagttcctaccttacctcggccacttaccacgtggccttatgcaaccacttcacctctctgaccttctgtttcctcatctgcagaatggacataagcatgatgcctgcctcattgggttgttatggggatggtaaagcatttataacccacttgtatgaaggggttctcccaagaagtgggcccctagggaagcactattcacatagcacgtacttttccagtatttgctaaataaataaaaaggacatttgagaagactaaataagaaaaggtataaagccaaatggctagcatagaatcagtgattgagatttgcaaccccagtctgtactctgaccccaacttcagagtacagtctcaggactgggcacatggtcagtgttaggcaagtattgattggtgacactctaatcaactccaaatacctctgggcctccaggtttatgttctttctttgcaagtgtaagctggtactgatttcagagcttgtgagggagatgtgattttccttatttactaacatttacttggattggtgtctgggacacccaaaatatgttatgaatcagtcagaggataacaagatctgcagtactatacagattactcactaatttgacatttggggaatttttgcaaaatgttagggaacatttgacaggatgcaaattgctgtatccataaagtacatttgactct

SEQ ID NO: 34271 - DNA, 1674 bp, Homo sapiens
ggccacaagaagggctttgctttagctgttttacttctcctatttacttcccctcaagcccacttcaccccagtgttttaaaaccatgaccattaaaaattcttttaaaaaacacttaaatagtatcacctccccccttaaaaatgtcttgtcagatttcttcctcttgtttgcttcagaaagtggtgctttgattgtccattagagagttgtttacatttctccaaaagctccatttagtttccttgacaaggtggaataagtgactggctgtgatggatagaggcacctgtcctaatggctgctcacactgtgcccaccagtgcacgttacattgataaattgacaacagttgggacatgctctgctagcagcaagaatgaggctacgaggacaaacacaggcggttagacagtctgctttaatattcctgggaaaggtgtacagcctcctaatctaacaccccaacagctgcggtgaggaattagtgcacaggcagaatttctttgttgccttgacactacctctgctagttagcctggaattatattcactgtaaaagattccttggtcttccagtgatatgcctgcagtacttgggttgggtgatttaatgaaaactataagattttaattttgttatgaatgtatgggtttttaaaaagattccttcattgaatttttctccttcctctgatgagaaaaacaataaggacaacaaaatgtcttattagctatgagttgattatcaggaaaatgtgggacatagccttagtcaacactaaggtgttaattatctggaataaggagctcaggagggcccaaatttccagtaatgaagagataactgtccgtcaggacaccccatgcagccagggggtcttagaaggtgttccgttctctatcctgcttccactttcattttctttttccactctgctggtttcgtgttacctttaaaagaccgtgcagcagtgggtcttagcaactgaatctcccccatgttgacaaagagccgaggcaggcacatagctataagggcagacccaagattttgcagtccctcttcacaacgtcctccctctcagataagttgagagcattcggggaaagtggtgggtggatcagctcacatcgctgggccaagagccgccgccgcagcagcaatctcgacacggtccctcgctgcttcatccattacatgcttatcttaactgaagactaatctaaaggaacaaatgaccacacggaaaatgctacaacttaatacaaagtcataaaaaaaaaaaaaagaatgcaggcgcaaaagaagcacggacataataatgcttccctgagcctcgcttttgaatggcctagttactgattttatgataagacacagtttgcctttatgatttgcatggctaatgaagcaattagcagccatcatatataaaacatgctagttcttcattagacaccaaacaaaatggcataacacgagatgtatagtgtggggaggctcaagtgacttgctcattctgtttactttgtgtggagttttgttggaagcctggtcgctgcacgcatcacatttagaaggctagactgtggttagtttgatgtgaaattctgactggctggcagtcgcctccactccccaccccctaactgctactaaatttcatttca

SEQ ID NO: 34272 - DNA, 514 bp, Homo sapiens
gtttctaatttctgtgtgggttattattattattatcttattttgctgaatcttatccattggcttcttctcacctattttccattctttttgaacttactctctaccccggaagaatgacaacaagctctcttgccctttggctttggttgtgtttggttaatgagaagcccttgtggtagatcagagggagagaagaaagagaggtcagattatgtgttcatttggctcattcgtttgcagggatgagttgcactggctgtgtcactctatggaaggtccttggttttctcaaggtagccctatgtgactctttccttcagggtgttggtaactgacctctttcctccctttgggcaaaggtatggtaaaagcaccactgttttagctacagaacactgactgttcctgtggcctgcttatatcctgcccactgcttttaaaatagtccctttgtaaattgtcttcaaatcttcctaatttgagggtgccatctgtttcctgccaggaccct

SEQ ID NO: 34273 - DNA, 2350 bp, Homo sapiens
tatctccttatagttctcattggacctagtactgaaacactggaagtccttactaagtatttgtgaatttgttcaatttatttgaattatgagattttgcactggtaaccatccatccatccacccatttatccatccatccatccatttaacaaacattaattaaatgcctatctgtgccactatggatgcctagagtgggaacaaatgaaagctgggctgttctggtggaagtgggctggaggacctggagtccggcctagctaacttcctcccggtagcatttgaagcttacatctgtggataggtgtgagccatgtgtgccaggcactatccccacaacctcactctgccaggtacttcctaggccatgtgctggcgatataacagttaacactatacagtgccttccctccaaaagctcacattgtcatgggcaagaccaggaggtaatgagacaaaccgtaatgacttcgcctaaagaagctaaagaagttacacagtggggatatcttttgagctaggtcttgaagaatgagggaaccatccagcaggcatataaagtggggaagcactcctaggataggaattggcatcagcaagggcatagtggtgtgcaagcacatgccagtgaagacaagagggggcttctgtggctccaacatagcacacatggaggtggagcagaggtgtcacagcaatgggatactgtagagctttgttgactatcctgaatgcaaccagcagccaccatcgcttttaaatggggagatgtgatcagccttgcatttcaaagctaatatagaaaacaccttgctggttctgagcctccagagcaggaatcctatacccagattccaaaatgatttgtcacttggtatataactgtggatgtctgccagatgactcatagaagccgctatcacagacccatccctctgatattaattgtacttaatctgaactgtgaaactccaatagtgttgaggaacgagaaagaaaacatgtttgaaacataactctcttattttaaaagttttcaaagaaagtaagaattctggacaaggaactacaatattcactgtctttctctaactgtacatttcttctaaacaattttctgagatttctccattgattaaagttaggacttcactgtgggaaccctagagttttagacaaacatagattacgctttggataatgctgtgcacagtgagatggaatatgcctacttttgtgtatctaaaaatgattaagaagttctgtcctgaatgtgaaagccagaatgaaatgatacacattaggcacaaagcaaagaagtaaagtaccacctggagagcaaaaaatatgggttttgacatgggcatatctgtaggtctatcaaaaatatgataaggcagaaaaagctgcttgcattaagatccatgtctctgaattctcccagaatccaggcacagtcaagtgtggggagattggcacttccctagggaggtcttctaggcagaatgagcagaaacgttaatcattaactccaatgcaaacccgtgtgttaagagttcatatttgtaaatgttttttgatcctcagttaagctgtttcatataccagcactccctaggtaactccaaaactttttcttttttttttttttcagttgagaccttgagtgggggaggaggttgtgtttggggagagagttagagcttctctgcacctgggaaaatgctaattcctgtttttaagaaaataggctaagaaaaggctcaagggagtctaggacatcaaagaactcttttaaaacaactttttttgacgatttaaatgaaaatgaggcagacatatatggattaaatttccccttaaagcagcctgaggtttaaagattaagggggaaagagatggaggtaaaatgtattgggggtttattatcagagtttcaactacccagactgagtgcattaacccatgatgcgtccatgtgcactcccatatgtgtgcttgcatgcagacgtgcgcacacgtgtgccccacggccgtgagacagtccctccgtagctgatgatttatgcagcttgccagaagagaagtaggccacgccagccttgaaagcactttagtttggttgtttttactcatgaaggacatgttgtcctgtaattactctgtcatttcttaagaggtgaaattcttaacaggtttgtgctttatgtgttgctgtgagtgttcttgtcagagcacatctaaccacgttggaatccccattccatatggcctttatggggaacaaagagaaactggacattttaacatgtattaaagcatctaggagaaaaaaagcatgagtcaa

SEQ ID NO: 34274 - DNA, 608 bp, Homo sapiens
tgggtggtcttggataaatcacttagcttactagccttaatttccctatccataaaaaagaagtagtttattaaacagttcagtctatatggggtgcactgtaagtggtgattattattaaagaatatgactttcacttagaaaactactgggctataagtatcaggcaaaatatactaggttaagcaatcaataggcaagtcatcatatatcccagtttgctcaggacagccccagtttatacctgttgtcttggcataattattaacagagccttctttcactctgcaatagatgatacggtcactttggtaataggccaaatactcaaaggtcagacaaggcagaagtgagcagatgcaggcatcaggcaacaaagagagagtcccagtgaaggaagctgagtggtcctagcaaattaagtggatctgatgctaagctttcacctaggtcagtcatctactcattagagagtcagaatctatggaaaaatgtccttatgtgtaaacacttctggaaatagttttatttcatcaaatgttttctggtatctactaggcacctgacattaccctaaaaatgtctaccttcaaaaatttcaagtagat

SEQ ID NO: 34275 - DNA, 1146 bp, Homo sapiens
cttggctccaaaaatcttattttaatgtgtagccaaattgccttctatcccagaaatgatataaatacattttaaagaaaaatgtactagcacttcagaagaggtgtgtggaggtccttttttttttctttttaacgaaaatgatcattaaaactcctgctgactaagattatagctttagggggaaaggcctcacaagttgacactttaaaactgtaaggcagtccagtttcaatcaggtacttactggatccttgggtagattctgttctaagtactcactgtgcaaccaaactttgctttcaaaaatctcaaccaaggattggaagatatttttcccattgacggtataaaactgccctcttatattgtattttaggcattcatgcactcttttcataaatacttattttttttttctatgagccaggcacttttctaggtatatcaagaatacggcagtaaagcaaataagacagaggaataaacaatctaaaatatgttgcattttgtgaagcaaagtatctcaaaatgatgggtgagggggtgggggggcggatttttttgtgtgtgtggactggacagggaaatcctctaggatcgcatgaaatttgagaagaaatgacctgaatgaagtgagccagcaagacctgtggatatttgggggaatatcattttaggcagagctaagaataagttcaaagggccttagaaaggagtagacttggaatgtttgaagaacaacaaagaaggaaatgtgactggcaaacagtgactaaggagaaagccatgagaggtgaatcagagagaaaatgagcaactgggtaaatgtgggtcaattttattttgggtaatgttgaaaacctcagagtgttttgaatagagaagggatattatctaaattatttcatgaaagttagtcctagttgctgcctgagcataaatagtagtggggcaagtgttacagcagagaaacacttaggaggctatggtgataatttaagaaagagaagacagtggcctggacccctcggcaggggtggaaggggcagggtaacagtgaggtataaatggtgaaagggtgattttctgaatatacttgaacataaattggatggaacttttttggtcacttgtatttagggt

SEQ ID NO: 34276 - DNA, 1211 bp, Homo sapiens
ttctcacaatgagaagatgacatatatgagaagccacaaagtaatgggttgtaaatgtgaatggacatgggtagaaattaattaaatacattagacttaagtacagcatattattccagacatggtagagatccccgacattgtagaagactgaaatacgtaaatataggaggagaggtttaaaaccttcacttacaaattccaaatgtatttgagaggcaattgcatacaatttttcatataactgatcaaaagaggaatctaagttttaactttttgagacagtaaaaacaacaacaaaacaactcattaatgttttttcctcacctctagctaaaaaccagctgcattttaaaaccaaatttggcaggctcttgatggcatactttcagcatgatgttttaaagattaaactatggagcaatctttaaacattaatggaggttacatggcaaattctgctcacacaatagaatcatcgtgtccatcttgccaaatgcatgtctcagcctctaagctagaggataacaaaaagatattcttattcttcctcctcttctttgagttctaagagcactctttaaatgtttctgtagcacatctaattcctctctaatacattttgctggctttggtgttcaatttaatttaaatcagcagaataatccaagtgaatccaggttgctgtaatgttacattaggaaggtctgatccatttgcagctaaggtacacccaaattcattaacatttactcagtaggcttccagcaggtgactttatgggaagaaacagatgcatctgaatgtcaccttaccacacatgtgactattatagatttttgttctgtccatataatattgctgcatcccattctaagggaatatagataatagcattagtttaatttatttttcaatacaccaaattacacagaaatgttctctaagaggctttgacaattaaatgaatccaaattttgtacaggcgcaatggggattgacctcaatggctttctaagtgctaattactaaacctaaatgcagtatggctcaaagggctaaaccacagagagggcactcagaggttgtgggttctaatctccacatcagtagcatgacccacagcaagccttcccagaactgaaaagtaaaaagatgcagtccagtgtcaggcttctgcaccagagcaaaaaacaaaacaaaacaaaaaa

SEQ ID NO: 34277 - DNA, 840 bp, Homo sapiens
tagcacctctaataatgcttctgaacctaatgagaatttacaatgtaattattcaattaagcatgtgtgttcgtgtgtgtgtgtgtgtctaagaagggagtaagtaatcctctatttttctatatcaatagcaattcactactgtttattgggagtaatttgttagaagctaatataatgactgagagacttattaataaaacacacctttcctagctctccaccctaacattctacatcattttttttctcaaaatagggcttaagaggaaaaaccttaagtaaaaatgttcttaaagtaaggagaaaaaatctgggtaaaggtagcactcttttgtgcatttaacacagtccctcataaagagtactcttttctctatttgaggcaacaaggaaaaaagatgctctgtcactgtctctcactcactttctcttcctttgctttttgagttacttcatagccaaatatttcatgacatacatcacctaccaaagagaaggccttaggtacatgaacaagctcaaacattaggcaaaggcatttgatggggaatgcagagccccacctgtatcagatgggcaccttgcagagaagcctctgactgggctaacagagccatggtcactgaggcactctttcaaagataaaatgttagttgtcattgggaaaaattggttggcaatagcaaaatgcaacagacaaatattcttccaagtcaccattccaaaatgagtgtaatatgagcatttgttaaatgagttctgattatacttgctttaattaataatcttttcttttagaaatatgattgccataaaagctatataaaaacatgtgaa

SEQ ID NO: 34278 - DNA, 1969 bp, Homo sapiens
tattacaccgagatgaaaaaacagtttgaattataactaatcatagtcataataataatcttatgaaagcaaaaggttctgtacccttataaataaaatatttttatttcaggtttgtctccttaaaatatttgcatatgttctattaggtattaacatacttatgcaatagtacatagataatatataaatcaataaatgtgcatatttggggataagtactcaaaaaagtttacagatatgatacataattttaaaactttggaccactttttttaggaggtttctttttatttctttcttctgttcttttaaaaacattcctcaggtggcatttcagattttagaaaatcaatgaaaagcatgggcacaggaagttctttcctctcgcctctgaaagtcgctcagaatccacctatgcatgaagcaatcacgtcctgcctcacagctgaaccaagtaactgtggtggggttaacaggcatgagtaaaaatttctacacaattgagttagcctcaagtgggaaaacatgacatttctatttattcatttcttcaaaaaacctttcttgagttcctacaggctctttccaggtgctggagaaacagagttgctttagactcactcattcttgcaagaatgagacccagcttaccttccctttgcctacagagggcccacaagaactccaatttagaaataaggaagccatctagccactttgtgaaacagttatacaaattgcatttgctgtgtgcctttaaattgcatggagcagaagtgcacctgtgattttaaaatattcctaacagtgtcctctggatatgctccaccttcagctacaaacattctgccggcgaatgctattccagtcactctattccttcctcagcccttctgttcttctgcccacacgtttcacggaactaccagaagccaccaggcaggcagctgccacagagcgccaagcaaggatgatgattttaacttcttggggtacactgtccaaatgccagaaaacacaggatcaaagaaaatgagtcattctgacagtcacacagtgcagacaagagggcaaattccattctgcccctggttacaggaaagggtaagcgtttcaaggtctgttttgtgtacttgtggttcagaaacacgttccctgaaagtatgctggcaaagttgcttagatctttcacacagtcctgaggaaggtaccccaattctttaaaacaagctttatgttgcacaacacactctcataagagacgagttgcatgatttccattttctctctaggctccttctttctaacttccgaaaaaattcccgtatcagaacctgatcaaaagcaatgcagaaaataaggtacattctttaagtacacacacacagaaagagagagagagagtataagaaaatgcaccaaccaaattcattatcacagttacctcccagagggtaggtagggcaaagccatcagagaggagtaccctctatcagtaggtaagctttgtatcttaaattggggaggtgggtagtacataactgtcacaagtcttgatatctttggaattcttaaatatagtttaagttaacacttttttgaccttattgccttcaattccctatagcattaacattccatataatgatcttctcactacataaacactcaaagtgaagaaactgagccctggaatcagataaatctaaagtcagaagcagttctgtaacttaccagctgaacaaacttagacaatttccttaaacactctaagaattgggtttattcatctgaaaaatatgcaaaaataacagtatctacttcatagataattaggagaaataaattaggtcatgtatgcaaaaacttagtactatgccaagcatatagaaagtactcaataaatgttagctatcatcagtaattattttatgttttctcaatggcctatataatactccaacac

SEQ ID NO: 34279 - DNA, 1815 bp, Homo sapiens
aaagtccaaatcaccttaaaaaacaaaactgtcagaaaagaaaaaatgtagttaagaaatgtggttattcacacagttcttctctggtagccatcttgttttctaccccaatatataaggtcaataattctaaaacaataaagaggggatggggaaactccttactaacgaaacactttaaacgagctccctaaatacttttaactagcatttaatttatttttaatcagctgcttatcatttattaaataaattccaaaggccccaggattccacagcccttagataggctaatctcccattgggaagcaacacgtattaaatagttgctaaaccttggtaaatacacttttaataattaattctagaagtatttaacttgcagttatataccggatatttcagcaatattgtaatccatgggatattgccgagggatttctcagattaacacatttgggtccctgagtcccatctgtatacctctatctgaattaacagcaggtgattcaacacatggctaccagctctgtgtctgagtgaccaatgattttattaccatatcagtgagatcaaatcagtgaaatgcatcagctgaggaaatgctttgtaagggatgagacagacggtggcttacaagtcaacccgggttttcaaaaatgataactactgaaaagaaaaattacttttcctgttgagatgtgtaaatattatgtagatattctaactcaatctctatgatggatggcgctcaattttaaacatatttcagtaatgccttaatttaatagaatgggagatacacaagatgttgaaggatcaaggtgagaataaattttcttgcacagatggtttagtcttgttctaaaaatccatgggattcttatactttcctctccatgaaaaaaaaaaaaggctttgctttctttcctttaaaaagatgttttgagtaaccactttgttaaattctgtatatccagtcccattcctactagccttgtgtaacataactatagttcctccccccaccaatgtggagtaaattgttaacactgaagtcagtagcgacctttgtcttgagcggagcagttcacttccccacccaggctgacagagactgcagattgaccagcagatggtgctacagagcaggcagcagcccagggcctaacatcctggagctcaaggactgcatcaaagactctcaaaaggatctttagtcttctggctagtcagttatctcatcgagtaaggaacttgccatttcctgtcttttctctgctccattctttttcctccctcgtttcataaatgtatttcttgtactcttaaaaacagcgtggcctgtccatagcatgacccttgagctctttccttcagggcaccatgagatacctgaataaacatggatggtgacgaaggccctttcactcaaaaagaagtatacctttcctgcaccagctaacacgaaagcacacaccacgatgatgttttagtagtgataaaaatcaaacattttctggagccattatactctaaaatgttaatgaagtttactttttaaaatgtgatcgatagatgggggaaagtgcccataaattactaaaggcaaaaaacattctattagcatgcagtgggtttcgcaatgttcgttggtctgtgttttactggggggaaaatttttaatctgctgaaagcgtgagttctgtttttgtttttgttgttgttgttgttttaaaatacctgtctttgtctttcatggtacaagagggatatttttaacatgactcatttaggaaatgtaattctaatgca

SEQ ID NO: 34280 - DNA, 508 bp, Homo sapiens
aggcaccataatccctgctgttagctcctcctgaaatatttgtgagctctgccactctcttttcaggttatcaaagggcattaaaccaaggtaaatacatacagacacatgcgcgcgcgcgcgcgcgcgcacacacacacacacacacacacacacacacacacacacacacaggctagctgaagacctatggcacacattaactgactaaaaaagataaactaggcaaaccagatttcattttggagaacactggaaaaacaaacatggttagtcacttagaaatgaagctgaagtgaaaatattcacaaaattgtgtaagttccatggcaggccaaagttatttagaagctaaacatatgaaagaagagaaaaagcaaagaagaaaagaacagaaaaggtgaggaaaacttcatcagtcaagaagaatacagttgctcaattggaagtagatatgctacatggaactactgagatttcctgccattacatcaatttacacaggaaa

SEQ ID NO: 34281 - DNA, 1111 bp, Homo sapiens
agctatggatgtgggtatcctctgtcaggtaagtttctcttgataacaagtaacaacaaccaactctactagttttgaaaaaaacagagaatgtactggaagaatactagaatagcttacaggatcaaaggaaaacttggatcagaaagggtaggaactagggtgtttcctctgcaggaggttgtggggcttctttccagcgtattacaatgtgtctcagctaccaacaactttcaaattatactccttctcttcttgcaacacttccagtacacataagagataaactgattggcccagcttaggtcaggtgacagacctgaatcaattagtcatggttcagggaataaagatcgctaatgtagacacagctatcagggcaaaggtcagcagaggacatgtctgtgcatgatggcagctcctcagaaaaggggaaccctgcactgtagagccacctcgagagatgactactgcaaacaatcactgagcccttgagcccattgtcattggtgagttttgagaggatgtcacagagctaaataaacaaggtaattaaacttttttcccttttttttttttctttttttggtttggttatttctcttcaggccctctggtaccaaaattaaagaagataaaaacctatcttacttagttgaaatgtaaatttccttggaactagagatcagtacttgagctagtgataaatactatcacaagatttacagcacacagaaaaatctttcagaaattcagtacattttatatgtcattgaattagtagcagacacacgcctgagctactgaatcgcaaagagcaaaaaggtagaggtgttgcatagcctaataccctgccaattggctcagcatgcctgcggcatcctgtccttaagttcctcatgagtacacatgccaagaagacactaaaaagagaggaggaacaattggtcagctatgtaataataatactttgcaatgatttagaagttttcagtttaagtcaaattatttctatattctaagtcaaattatttcatatctcttgtcagattttgtaattgagttaaacacctacgatagattaaaacagccacaaaagaaattctttgca

SEQ ID NO: 34282 - DNA, 2485 bp, Homo sapiens
tgtgagaagtacataatgttacacttcctaagaaatatgtcaacgaatgccctttctaagtagcaacgtacctaaataacccttaccactctctccaggtagttttaacaaaggtattgtaccgcagcttcaaaaaatcaaaagttacgcgtttacctatccattcactgctcagacaaaacaaaaacaaaagctacctgtaggagacttcgaaattccttaataccatagtgtcattaaaaacaaacacctagatttactttacttagctatattttactaagtagtcaggttagctttaatgcttaccacgccaaggaaaggtggcttttttcctttcccgagggtaatcccgtcccacctccccctcccttaaataaagttaaaacaacccaaaaaaacccagctaattctcagctctgtacagttctccagtacaagcaacagtagttcaacctcaagaaaaagacatcttaaaggccgtacattaaaagttgccagggatccagccgcttacatttcatgaaaagtacagaccatacccgtttagctagctgtgcaccttaactggtcgagaaggcgcgctgggggctgggtttgagggtgagcaaaaggcaagattattagtttgggttgacgtgggggtcaaggggagagcagaggaataatctgtaagatctgagtcccgaagctctttgggttatggaggttagaaaagggcctgttaaagttaggcccaagtttcggcaaggtggaactgggaaaaaaaaaaaagaaagaaaaaaaaaacgaaacccgaaaaaacaacagcgagcaggctcccgagttctagcgttcacagtgaagccgttaaacgcagcaggaaagtaggcgtgtgttttcttcctcttcccgcctccccagagactcgagcccagtcctttcccctcattttcaccccagccgagtccaatggctgccctcgccgcggagtcgggtcggaagacgccccgccccctcgccgcgttcgccctagggaacccctccgccccaccttccctgcccgatgaggggcagtggctgccgccgtcacgtgtgctggcagccgccaagtgaggccgcttttgcgacgcggtgacagccaaatggtgcgacaggaggagctgcagccgcggccgcagcgcccgcacggagaggcttgaggcggctcctggcgtcgcccagagggagcgactagacgaacagtccggtgagggcggcgagaggaagcccgctacgagtgccctagctccccgccgctctcgatgaaccggacggaataagccgcgcctccagcaggggctgcgcctccatgaatccctagttgtttttttttttttctttctctcccctctcctcacccccaccccgagccccgtcccgccttctcccttcgccagaggcggccgcgtccaggtgcggagtccataccggagcgcaatggcgtccaaccccgaacggggggagattctgctcacggaactgcaggtaagggccgcggccctggtgagaggcgctggcggaggagacagggagagagccccgcgcggcgtcggggaccgaggaaagccctgcggccgccgcgcccctagcccgctaagtgcggaaactccgggatgtcactcgggaaatgcttccctcggggaaccgcttccctggggagccggaccctctcccccgccaaagccctggcctgccaccgctttggtttgattctgcctaccagaggggaccccatctctgcagccctgctgcagcgggagcctgctctcgcctggtccccggagaggccggcccgtcgccccctccctcggtgtcagagctacccgcgaacgcccctgttgccccctcccttcgcgcggccgggccccgccccgcctttcctccgtacaccgctccttaaactcctttgaatgactcccaagctgttttcttgtccctccccctcccctcagactccgcacaaagagcgcccccataacttccagcccctagacaagtttttttaaaaaacgagtctcaccaaatgtttgcttcacttcagcagccctcttcaggtgacagagtttctttcctctattttgagggttatctttttcttttcttttcctttctttttttttttttaaccgagtgataaatacagggtgcctttctctgctacccctgcccagatccgggagctcagatgctgatgcttttcagactttcattttccctctcatttgagcaccagagaaagagctaataagttgtttactaatgagaaagcagtcgactaagggaaaacattgggcaccacatgtctgcaaaagatgagagcaaagtagatcgcttagttaagtcatgtcgagtagcaatgttatttcccatttccagataaatatttgataatgtaggcacgattttctttagatctctatggtgtacatggggacttaagctaccctgtcgggtttttcattac

SEQ ID NO: 34283 - DNA, 1937 bp, Homo sapiens
taattagggtctgcaagcatttttcaggtcacaagattaaaggctgtttctgagggtactgcatgcatttcctgtagatatgagtacactgcattcttaaatatatactaaaaagcgacctcccagcacatataactaattttctttggcaagattttcttcagaagtacacaggcaacgatatttgtaaacaaatcctttagcagggaactaatcaactcttccgatggctctagcttccacttccgaggcccgctgtgatggtaaccaaccaggttccatctggcttaccaatgctgacgttcccaacttcctagctgtcagatcgataggaacctgaaactaactgtttcccgttcctttgaaaaggagaaattacggaccctcgggttgtttgggccgtagatgaaaaaaacaagcgggggggggggcgcgggggaggagaggagggagggtgggaagaagagaaaataaagggagattgaaatattgggaaaagatacgagggcaaggactggggacacagtagcccaccaggacccacatagggtgatatctacataagactccagggcaataacgtcaacagctcggtaacccctgcgacaccctgacagtcctgccgtctggaagtgcctttgtcccggcccgtcggccagtcccgccgcttctctcccatacccctaggcgctcagccctacgaggctgcccggaggccgcctaaaagccggcggcgctcgcgcccgcccctcagctcgccgggctcggcgggacatactaaccggctggtagacgccatcttcacggcgactgcggtgcccgcaacaagacacaacagacacaccgaaagcaggaagcgaatgtggcgaagagacgcgcagagatgagtttttatagacgactcacccacgcagtcgtagcagagcagggctacgggtcgggagaagggccaagaacagtgagatcccatacgtcacgtgctttgcgatttcttacgttcttactccgtttctgtaatttgctatgttgctaagcgagtcaacgtaactacctaggaaaagtctcatgggaaccctgcaaaggggctacaacagagctactctcaatctgacagttaaaacacaaagaaaaccctggcttcgtagtggtgccaaagcctgcatccctaatagtttaaccaccccttcctctcccaccttctcacggctaccttctcacggccaccacctaccccgcccccagccccccaccccgcgtcaggcactcccatttgagccagttcttacgtgccccaagggtgattctttctaagaaatttgaaataaaaggagaaactcacttaggtcatccagaacaggtgtctgttcaggatctgtcatcagctagcatgttgtcttcttaggcacgtcctttatacaggtcatgtaagtttatataggttatggtatcttgccttgcatacccttttagaattggcagaagatgaaacaaaactacgtgaaaccaatgtgtacacaagaggcacgacgatatgggccatgctctgatcatttttttttcacggcctttgtaacgttggctgatagctacatatagaaaacttgcgagaacatctagatattgcaaaatatccctagatttattaattagccaaactaacgtcaaaattgtaataccactattactaacaacaataacagttaccggtggagagtattcacgttcttggcgttttgaacaaagaactggacacaacgcacaaactaaggaaagaatgaaggaataaaggcagagatttattgaaaacgaaaaggtaataccagctcaagactccttttgcagaattttcgggggtttaaataccctctagaggtttcccattggttacatggtgtacaccctatgtaaatgaagtagtggctccacaatcagtctga

SEQ ID NO: 34284 - DNA, 690 bp, Homo sapiens
gcttgtgcctgctcgctctaaacccatctgttagaagtctctgcaggaaacctgcttgggtaacaccttgggcccccaaaaaggctttggcccacagatcccactctctctctgttccccacctgctggttgagtgtgtatatcctggaccactcctcacttcccattggtcccgggaggcctgctgcctcttctgtgtcccaactgaccaacacaccggaacctaactctcctcctcctagagagtggctatctctgtggaaataaactggatacaggtcagatgagagccacaaggatgtctgccagtataaaccagtttccagggatgtctggtcatgggtcagacacttaacatcaggccatctgccaggataaacaagtagcccatgaaaggcacactgcaaacatccaggacctcccctggagccccatcagggaacagctagagtttacagccactttccagagagacagacctgaagaccaaattataggaaaatcataacaccttacttttctgaaatttgctaagatgataatgaactattacaagtaaaaattgctagcatcaaatgcttatagtaagaaagaactcagccagtggctcatgcctgtaatcccagcactttgggaggctgaggcaggtggatcactcattaagctcaggaattcatgaccagcctggga

SEQ ID NO: 34285 - DNA, 2817 bp, Homo sapiens
ggagaggtagtaagagatttaatttgacaaagtccagaacatctgggttaactgcaagttcaagcaagattaacatgaggcaaaaagggctacagctaataatgcgccgcccacactgttacaagagtccgaccactgtaaagatgattttcctttcacactctaccttgttagtttgcttctagaatgtttataaggttcaccgatacaacagagggtatctagacggtgaacaaagtcctggacgggggagtacagtggaaggatgcgcttcaaagccacgtctttagaacaagagcggaaagaattagccaaagttgggcagcatatgctttaaggagacacgagcctgaaattgctgaaaaactgttctatgaaaatggattcgtgtaactataaacttctccagaaggaaagcagtgcggctgcctggctgatagcaggaattcggttttggctcccgaagtcagacttgctaagggctgacctgcagccccagtccccctcaggtggccgccaaggagccacgcgtgggcgaagcgaaggaaggatttctgcgccactcgactccaaaagcaacagactgcctttctgttttaactacaaatgttggattctgctaagcttcatttataaggcaacgtaacagccttggtattcttttggtttttttttttttgagacggagtcttgctctgtcgcccaggctggagtgcagtggcccgatctcggctcactgcaagctccgcctcccgggttcacgccattttcctgcctcagcctcccgagtagctgggactacaggcgcccgccaccacgcccggctaattttttgtatttttagtacagacggggtttcaccgtgttagccaggatggtctcgatctcctgacctcgtgatccgcccgcctcggcctcccaaagtgctgcgattacaggggtgagcctctttcgtatttttaaattaagagtcccaaagtcattcttctcagactgccttctaaaagcccaaacagcgaaatcaagagtaaaagcgccaagacggtgacccgggtctaggggattcccccctggaggccagtcacctcggcgccttcccctcaaactgctaatctagggccgactccctgcagccacccccgcaggcggccccgcagcgactccggcaagaggagcccgacctccgttccctcgccccgtacgccgggacggccctagtcagtccgcacggaagcgccgcgccgcgccgcgcgcccgccccactcacctatccggtgcgggaacctcgcctccctaggctcgagtcccgactgggcttgagggcccggctgggcgggattcggacgcggggggcggagccgggacagggattgactctggggtttgcactcagtgcgcgctttggcggaggggtaggccaggatctctaggctggaagagactggatgaggggtgtttttttgggaggggaggggcgggatttgggcagttccgggcttgcgggaacaagggggcggggcgggggcgagcccggatgtggccagggattggctgtggagtgtgactcacggcgcgcgatgacggtggggtccgccgcgatcgcggaatggatggaaatggaggagggaaggggtgggggccacgggttgggcttgagtgaggaaggggacaagatggaggatggcctggacgtggccggggattggctatgggtgtggactcagggaactccattggctgtggagtcggccgggatcacatgctggttcaggcatgcgtaggtgcgggctcgagttagtggggcggggacttggatatgggtatggaatttggccccagggctcgaatcggatgtatgcgactgatcgggttggggcaggttataggacgaggactggtttgcaaggatgggcaagctgtggggccgctgggcttgtacaagtggagggatcgggttggaataactttggaaggtgcctgagagagggcagggctagagagagtgtgaaaaggggttcctagatgcatttgtcatttgagatgggggtgtggggttaaaaagcgtaaaggaacttcactttcctggatatgagtttgatcagcaaactaagaatgaaagggacatgtgagactgaagaaggaagaaaaatgacactaaaaagcgaaaaagaaaattctctaggaaaacaaggaaaccactggtgacttctttggggagggcagtgtcagcgaaaggagagtttttgttaaaaattgaattttatgtttggatatttttcctcttctattttaagaggatgagaggctagagggagtgggagaggcgttagcattgttattcagttctaaaggagggaacaaaagtatacattgattaaaggaatatactcttcaactaggtacaggaagtttcagaagacggttaggtgcatggagaaattattgtgtacaggtaggggcgagcctggatgtggcctgggattggctgtggagtgtgactcagcgcgcactggctgtggggtcccccgcgattggtgatcatactacatctcacctttaggagggaggaaaagtgcagggctaaagctgtaatcggcaaagaagcaacaatcatattagctgggggaggaggaaaggtgtagggctaaagctgtaatcggcaaagaagcaacaatcatattagctgggggaggaggatagtttggtatttttgtagtttgcacagtgacctttttaaaaatctggttaggcaaaaatagtgtgatcttgtttgttgtctcacttcattatgatcacagaatgacctggtatgatgtt

SEQ ID NO: 34286 - DNA, 2086 bp, Homo sapiens
acataaagagagctacatgggaagatgtgaaaagaaaataaatttccagcaatacagctttaggttttctgttttgttctgtttttccattttgtagagtaggagaaagagaaatgggaagaggagaaatagaagtgaggaggacgaggagaaagggctggaaagatgagagagagagagagagagagagagagagagagagagagagagaaagtgccagcaagggagatgtcagacaaggtgatgagtgaagctagtgttttgccaaggaattcaggggaggagttttcagaaggtgggatctaagtcgtctgagtgcgtgggagaggttaaagtaagcaaagataccggctttagtagtgatgcattacaggaaattctcctgtaaattctccagaggaaaaactaggccaccgccctctctctctctcaaaaaaaaaaaagaagaaaaaaaaggagaggaagctctttagcctggattatttctagagaaacaatctgaaacaaagttcaaatgtgtaataaaaagtatactgttttcatgaatgttcctctttgatgctgggtttcagttttttctttgtctataaccgtgtcagtgggctgctagtactctgcattacctttgctgttctttccttctggtgaaaagaacccatttgtagctctttccatttcttagctgcataggagcaggattcagcaagctccatcactgacaatggaaatgtaatcatgtccctagtcaacacagacaatgtcaacaaagagaaagactatcctagtgcatttcaaactctcagtttagttgctgtctgctggtgcctaattcaacacaagcactgtagtggcacttagagccatggtacttctgataacaccatgattttatctgacctgtgtctcacatcaggctcagctgcagcctaatttggtcctggtcatttttaagaaaatgaactgacttataaattccttcccatccttgccacaacgttataggctccacgtccctgagctgaggtacttcagagctggagaggaagcaataggagttcttacctgtgcttttatcttcagtccaggtaaagttgtttctgtcacttctcttttctttcgctggatcgctggacttttatttcaccccttcagtgttgtgtagctttctggattttcctcagtgatcaaataattagaagttaagcaacctttgtaatggcttcagagcctaatgaaactgaaagtacttctttcaaggaagtgactcagtaaccataaatgcaatttctggattctgctagtaggagggtttaaagtcaagtttcaaagtttttttgttggaagagatcttagagaccatttattgttttaaaaacatgtccattaggtattgaaaaaaatggaatatattttaagattggagatctgtttgagaattgtagaattaggaggcatcacattaattcttagatataatttcctataacaggagacaattcacaatggagctgcctattcttttagaggtgcagtaggtgaggaaagagcatgttttacacactcatgaacacctagtccctggcacttaatgcccagcacacagtcaggagggggctccatgcattgtactcaagttccaggctcagtgctgactgctttacatgaattacactacttaaatctcataacaagtatttccctatgattttatagaaaccaaggcacagaaagactttatcagttgtctaaactcatagcactataactaatctgaacccagggattcctgatcccaaactctcttcttgaaccaccttactgtgctgcctctgtttggtgagtgaataattgtaaaaatatttaatttatagatgtttttcctctttttatttagtatattataatttgatttttcataaattgttttctaagagcgtcatatgttatgtatctatttcattcatgactacttacatgcagaataggtggtattaactctattttacagtaaaaacaaattgtaaaaaacccttgtgagcatttatttgttaatttagttacacacacataaaaaattatacattat

SEQ ID NO: 34287 - DNA, 1190 bp, Homo sapiens
attcttacacattgctggtgagagtataaatgatgacaactgtattaaaaaactatttgatattatctactataaggtgaaaaatgcatactatatgtttaataattccactcctagttatctatagtgaaatattattacagaacccaaaagcttgcatgaattttaacacataatattgagttaaagaagttaaacaaaaaacaaaccatggtatatatttcagtttatataaagacaaaaagcagacaataacaatctgtgatgttccaagtcaggtaacatttctgtgttagtatctgctattgcataagaaatatgctcccaaagtagtgacttgaaacagcactgattgtctcatattttctaaagttcacaagaatcttttaggtaaggtttagctgtgtcttcttggtggtttctcacaggctgcaatcaaagtgcctcctgggctttagacatctcaaggcttttctggggaagaatccactcctcaaactcagtctcatggtcattggcaggattcattttatcattaacttgttagactaaagtcctctgttcctttatggctgtcgactaaaggtcatcctcaattgtttgccatgtgagatttctgccatgataacttccttcatcagtatgagcaagccatgagagagagagggagataaaaaagaaaggggaggagagagagagagtgagagagtgtgtgagctaatgagaaagagagagacacatagagagagagtaagcaagcgatagagcacatgggctagcaagatggaaatttggatgatgctatgactaagattctgagggtatttgccaaaatttagttccttgaattcgttccttacatgatagtgtgagaacagatgtacttctcaaaaatcatccactgtaagattataatttagctattattccttttttatgttgtttttcattttatttttaaaaaagtaaaagtcaccaagactggagtagatctagaagggcaaaagtgaacacagtaaattaggagtctagtgtggaattccaggtgaatgacaatatggacttagactagaaagggtgaggttctattcaactctagatgcatttccaatttagagctaacaggacttgctgttgaattgattttgaggacagagaggaaaatagggatcaaggatggggttaaagga

SEQ ID NO: 34288 - DNA, 2318 bp, Homo sapiens
gcaaatactgaatgtttcctccagataataaggattaaaagatcaagaggcagataaagagagctacctaggaagttgttcaaataaaatatatttccagcgatacagctttaggatttctgttttgttctgttttccatttggtagggtaggagaaagagaaatagaaagaggaggaatagtaggagtggagaggaggataaggggctgggaatgtgtgtgtgtgtgtgtgtgtgtgtgtgtgtgtgtgtgtgtgagagagagagagagagagagagagagagagagaggagctgtcagaccagaggtgatgaatgaggctagtgtcttgacaaggcattcaggggaagactttgcagaaggcaggatcaaagtagtctgagtgcatggagaggttaaagtaagcaaagatattttctgtagagatgcattacaggagaattaaagaggaaacacttttggccctgctctctactaaaagaagacaaaattggaagcacttcagtgaagcagtggggttgaatttcacttctaagggacagggatcagtgggcactaggaaattagtgagtctggactatttctaaagaaagtaatccattctgaaacaaagttcacaagtgtaataaaaagtatactgttttcatgaatcttcatctttcaggctgagtttcagttttttctttgtctttaaccgtgtcagtgggctgcttactctgcttctcatttgctgttctttccttccatgaaaagaacccgtttgtaactcttccatttcttagctgcatagaagcaggattcagtccatcactgacgatggaaatgtaatcatatccctagtcaacatagataatgtcaacaaagagaaagactatcctagtacatttcaaatgctcagtttagcccctgtctactggtgcctaattcaacacaagcactgtagtggcacttaaggccatgctgtccctgataacaccaggatttcatctgacctgcgtcccacttcaggctcatctgcagcctaatttggttctgatgatgtttaagaaaatgaactgacctttataaattccttcccatccctgccacaaccttataggttccatatcactgagctgagatcctttggagctagagagaaagctgcttgatgagaagtagtaaaagttcttacctgttctttttctccttagttcacgagcactggcttctagcacttctgtgtctctcactggatccctggactaatatttcactgttccgaagttgtagggctgggatttcctcattgatgaaatatttagaagctaagcagatttgtaatggatttagagtaatatgaaactgaaagtacttcgttcaaatcactgactccactaccataaatggaattagtggagtgtgccagtgggagggtttaaagatttctcaaccagaagcttcaaattttttttgttgttgttggaaatcttagagaccatttgttgtctaacaaaatgcccattaggttttgaatacaatgatacatgtctcatggattgagtcaatttgagaaacctagaatgaggaggcatcatgttaattttcagctacaatttcctaaaataatagacacactctcaatggagctgcctattctttgagaggtgcagtacataaggaaaggacatgtttaacacactcatgaacacctaacccctggcacttaatgcccagcacacagccaggagggggctccatgtgttgtactcatgttctaggctcagtactgatggctttacatgaatcgcacaactgaaaactcataatatttcctcatggttttatagaaactgagcacagaaagactttattagttgtctaaaatcataacactgtaactaatctgaacccaagcactcatgatcccataccctcttcttgaaccacttcactatgctgcttatttactaagtgaaaaattgtagaaatattttatttataggttttttatttttaaatttattatagtgtgattttatttttatagattgttttctaagagctgtttgtgttttatgtctaattcagtaatgacttctagcatacagaataagtggcattatctctattttacagcaaaagcaaataaaatagtaaaaagcctgagtgaacatttcatttaaaaatatatttatagtgatgtggtttcactttgttgcttaggttggtcttgaactccttccttcaaatgatccccctgcctcggcctcccaaattgctgggattataggcatgagccaccagacccaaccttgtgtgagcatttcttttttttt

SEQ ID NO: 34289 - DNA, 973 bp, Homo sapiens
tattagaactcaaatcaataacctaatcttttaccttaagacgctggtgaatgaagagcaaactaaacccaaagctagcagaaagaagaaaataataaagaattttggaaataaagagtagaaattaatgagatagagaatataagacaaaagtagagaaaatcaataaaatcaaaagctgttcttagaagagatcaacaaaattggcaaaaaaaacctgttttgttagactggccaaaacaaaacaaaaaacccagcagaagaacaggagactcaaattaccaaaatcaagaatgaaaaaggggacattacttctgaccttacaaaaataaaaaagattttaaggtaatgctatcaacaactgtatgccaacaaattaaattagacataatggacaaattcgtagaaagactcaaactaccaaaactgccccaaattgaaagtgaaagcagggacaagctcttcatttctgggaaatagactagatattaagaaaaccactcttttctgtttagtgcaatgtgttggggacagtttttgtgctttttgtttttatgtcagacagctgggaaaaaatatttagggaatttttcatttagatggtggggatgaggaagcatcatttcctcactttcggttcatttggtttgcaggctatggaattcttctagtagatggtcacagatcaaattaattcacagtttagtattattacatgatgcaataattattgtatatatgcctagcagtctcaatatcagcatccaatgaacagactgaatttcaggtgtggaatgttttgatagtaagcttattttcacacaaagagctctatgcagctgcccgtagagtgcatagcaagagggattcagtgattcagctggggtcactgagtctcatatcaaatggatgcaagacctgcaagctagaaaaacaaccatatgcatgtgtgtgtatagagagcaaatacact

SEQ ID NO: 34290 - DNA, 1682 bp, Homo sapiens
ttctggcaagacttctgtttcattttatagcatgatgtaaaccaccttaaaatgggaatcaatcaatgactgactcagaaaagtagctgcacaaagactgtataagctccctaattataataacgtgttccctctctttgcagatcccaagttgcctaccttcatttacctagagctctacaagtggcaataatgaatgtgatggagccctaactttattaagcagatactaataatgataaagttaatttaagatagtgtcaagaaagaaataacaatttagaaacattcccatctctctatgctggagactagttcacagcaggagcagagagcactaaggaacctgcagccacttgatagggccaggatagtatgtggacttgtgtcccacagcaggctcagctgcggcctgttgtgggaatggtcaatttagataaaactgatgaaccctggtaaatattttcccacccctgccccagtcttacccagatcagagatcctttagcactggaaagaaggttgttccaatgtgaaagtcgagtccttttcctcctctcttttcttccgagtttggctgcactgctttctccctcttttttctctcacggtaactgtggacttttactttacccctccaacgtcctggggcttcctccaacgtccaggctctgtcaatgtcagagacctgacgagagacaagaaaaagaggtaacctctgcaaagaaatgcactaatatgaaacaaagtatcaactaaagcagtgactcattcaccataaaaggaattgttgacagctgtgctggtaagagggtttgtcatgatttctcaaccaggaactttccactttatcattggaaaagatcttagagactgcttgctatattaagttttaaaaaccccttcattgggtcatttaaaatagtgctatttatctcatgtttgtgggccagtttgagaagcatgtggatgagaaagcctcatataatattttcttaggtccaattaccttgaatattagcttgagcactgttaagtgccctgagggaatatctatgtcttatatacttttgaattatcagcacctaacccaggtcctgacacttaacatttaataaataataaataatgatgaaggtaactctcatttatggcacacttgatacagacacagtgataacttctttatataaatcataccattgtattcttattttgtatttgtttattttttagagacaagttcttgctctgttgtccaagctggagtgcaatgacaatcatagttcactctaacctcaaacttctgggcttaagttatccttttgcctcagccttctgaataggtgggactacaaatgaggcatcataccagcgtgtgtgtgtgtgtgtgtgtgcgcgcgtatgtgtgagatatgaagtcttactatgttgtgaggctggtctccaactcctggtctcaggcgattgttctgccttgtcctcccaaagtgctgggattacaggtttgaatcactgcacccttcccccttgcattctacagtaatttcaccacaatgttaccaagaaatttaacaacttgttaatattacaaagctaccaagtaaggtttgaacccaagtcttcctctaaaacccatattattgtgtccggaattggtgggttctcggtctcactgactt

SEQ ID NO: 34291 - DNA, 1278 bp, Homo sapiens
agtgaacaacaataacgtttcttatttatcagttactttctaggccagattatttacatatattatttaaacaacacaatactgcttcaaaatatggggtgtttgttattccctttgtccaaggaggaaaaagagaaagagattaagtaatgtttaactaaaaccattgagcaacttcaaactagcaagtcattatgtgagattctaacttgaaaaatcaatttaattaatatcacgttatatctgtgttccacgctgtctctaaaagaaagagaaaaaaataaacagtgagagaagagagtaagatcgtgtgtgtgtgtgtgtgtgtgtgaatactggtgacaatgaaagtgaaagtagagcagggttatttcaaaatagaagcaattctaggaaatcagctgctttttttcttctcaacaataaaatctatcgtttatatcggggaaccataaaatagctccagggacaactgaatctttgtgaattatgtatagtttaagggtaaagatgaatacttgtttattagctaaaagagcccttttttctaagtttctggcccttccttcactatgctaaacattgtaattgccctgtgagccaaaggcagtaacttcattccagggtgattatcataggtgagaaacttgatgaacacaggggccatgtggtgtccagtccctcagagagaacagggtaaattcagacaagtgtgcatgttctttctaattcagtgactcccttctgcactagtttctaaacttgtgtcctttattttgagagctctagaaattgggaatacagtgaggttatggtaaattggggccatactggagggtagcttatgtacttagctcacacctgagcttatgtggtgggttttgtgcttggaactaaacctaagttgatgaagaagacctagctcctgagatcaaaggtggtagacgggtgtaaataggcattttcaatgttacaattatataacatcttcaatggtaggagtgacaagatggtgccatggcaaaactgggaagggcatctcatccagccttggaaatttaggaagtaggacactttaaggatgagcgggggctgagaaataacagatatagtgtgaggaagcagggttttaagaaatctttgccccttttgcaaaggccctcagtcaagagaatatgcccagcttatggacttataaggagttcattcgagttcattcaagtactgagaactagaaagccaaaacaaattcctaaaatgttgagttgaaaaaaaaaa

SEQ ID NO: 34292 - DNA, 1183 bp, Homo sapiens
agaatagcactggcctgtgattttgaggaatatccttcaatttggagttttctgatgtttcctcattgattgaagttatgcatttttttttgcaaatgtcacagaagtgatgttctgccattttcagtgtcttgtattaagggattcatgatgttgacattactttttctggtgctatggccttaactttgatcacttggttaaagtgcttgctgccagatttcgccaccttaaagagttatgtgccactttgtcactaaaaagtttccattttgagaaacagtttggagactatgcaaatacaatctcatcatacttttttttttttcagccactacttttagtttttattgatgattctttttgtggtgtttgactaaataggattttctattatagtcattctttctatattaactggagttctaccgtgagcaagggctgttccttctttatttattttgtttgctcatttaatcatttacttgtatcaatgcagactcagagatattagttttattctgagggtttcaatactttactgtcaatatttgttctgttactcaacttgtcctagattttgtcattgagagcttcttcaagctggatccattttttttttacatgcttccatcatattttcagcgcttctttcctttttggctccacaacgtattctagaaaaaatatctgtatttttcctgctttatccctagaatctaacatttctcccagtatctttggtttctttcaatggataatggtactttgacaccaatatatcactctaggtgtgttcattatttctagacccactcaggggcaaagttaagaaatatatgtatgtatactaggacacatctatatttatttttatctgtacatttctataataaagcttgagattctgttgatatttccagttccaatccaacacatctgagcttattcaagcttttgactttcctttttaaactattttctccaagtaagctagactttggtcttctaacacataatacatttgtttccttgctcagtcctagtatattcatatagtagtttcaaaattgataataagtctgtggaaaaataaatttacttcctatagaaaattattagtgtacagttcttttggtctttagccttatatacacactcaaaacattgcattccaaagttg

SEQ ID NO: 34293 - DNA, 2246 bp, Homo sapiens
catgatacaaaatatataatctctttaagatacaagcaaatatagatgatagatactgcagttttcttttttatcctataataaagagtggtttgtttccactatagagttggttacttctgacttgttcctctggaggtttatattaaattatctggcttcccatcacttcagcagaagatggaaaaaaagccgtttatttttctgtgatcatgacccatttcctcttatagcaatggcctacaggatctgctggcaagcaagaagggcaaaccagaaactaaaaagattgggtatctatggaagatgagtgaaaacagagtatgcgtctgtccaattctgtagcatatactatgctaccataacataggaatcaatcagtcaccggctcagaaaggtggtggcacaaagatgttataaggtcctggattataataatgtgttgcctctttttgcagatcccaagttgcctaccttcatttacctagagctataaatgttgggcccaataaagaaagtgacagagcctattaggcagatatttaaagataacagtaatttaagatggtgtcagaaaagaaataacaatcttagaacactggcttctctgaatatctgttccacctctgctgaagcctaatctgacacagcaggaattagagcacactaaggtacacacagccacctaagaggccaggatttcatctggacttgtatcctgtagctggctcagctgcagcctatcttggggatggtcaacttagagaaaactaatggatccttataaatcatgaaatccttataagtcatagtcttacccagagtagagatcctctggacttggtaagaaggcagcttcaatgagaaagttatgagtctttattctcttctctttagttctgaatttggctgcactgatttctcccactttttttcttgctggaactttggacttttaccttacctctccaatgtcatggggctttccagactttctagagacctgtatttatacatgtaaaaaacaatgcaacctctgcaaataaatagagtaatatgacagtccatgatttagcaacaataaaagaaattgctgacagctgtgctagtgagaggatttgacataatttctcaaacagaatcttccaattttattattggaagagatcttagagacagcttgcgattattaaaaaaacttcaatgaatcgtttaaaataatgacattcatctcatgtttgtgggccacattgagaagtacaggaataagaaagcttaatataatattatttaggttcaattggcttgaatattagactcttaaaatggaactcattatttgtgtttaataatgaggactctaaatgccctgaaggaatgtccacgtcttatacatgtttgaattattagcacctaactcaggtcttggcacttaacatttaataaataataatgaagatagtacccgttttgtttacatagattatcccattgtattcttatcacaaatacttttaccacaatgttaaaagagggatttaataatttattacaattacagagctactaaataagatttgggcccaagaagtcttgctgtcagtcacttcattaaaatacctctgtgtttgctgagtgtacaataacaatgttttctccttatcagttccattctaggccatattctttacacataccattttaaatatcaaaatacctcaagataaaggttgtttattatccccattgtccaagggggaaaaataatcagaaaacgggtaattaatatgtctaactaaagccattgagctacacaccaaggtagcaagtaattgagcgagattcaaacttgaaaatccatttggttaaaaccacattgattctctactgcacattgtctctaaaagagaggaaggtgggaagcggggaagagagagagagaaatggagagcagagagtaagacttctctgtgtgtgtgtgaatattgatgagatttaaagtgaaagtaaggcagggttatttcaaaacagaactattgctaggaaatcacctgcttctaagtaataaaatctattgtttatatcatgcaaacaaaaaatagccccaggcaaaattgaatctttgtgaatcatgtataatttaagggtacataaatttataagaaaaaaagatcccactttcccaacttgtgttttttttttttgagacagagtttctctcttgttgcccaggctggagtgcaatg

SEQ ID NO: 34294 - DNA, 1025 bp, Homo sapiens
ctggctctttcagctaagggagagtcaactcaggttaaaacaaggtagggtatcacatattctagtgggggacagaaaattaataaaacaaacaagcaaaaaatgtgtatatgtatactagatgatggtatttcgcaggagaaaatgccacagctctgggaggaagcccgaggaggagcagcgcatcctggagacaccggtgcgcctctggtcgccgcctgtggaccgtctagagacgctgggccacacggagcaaagcactcaggggttcaagcagcatcagacttccccgcgaggttcctccactgcctttgtcacccgccagtgtgaagtctccaaccctccccgtgtgcagtctgcgcttgggaatttgttgttgtttgttataacccaaatatacttgaaaggtaaagcttaagagcaaacttacctggtgtgggcactgcagcgtgaagagttctctcacccattgctctgtcctcctgcgcctggatcctcgagaaacggactgttcttagaagctgaaagtccagccggatttacagacatccaagtaagagtctgtgagaaccgaaattgaaaggacatgcactttgtggggagttgactgttggggattttcctgtttatcaagacaggaaactaaaggagcttgaaagtgctggttcctccacaccagactcctgaaactcaggtttgtttgtccctcttccacccttagcttaggtatctttcgcctccaaaatgaatatagagcagcagacatgaatgttgtttcatctacctgtctctcaggggtaattttgtcagggaagaaatttgagtttttgtttgcttttatttttttttacatgcttatatgtttctgtttctcatctcttttctttattttttcattaaccataaaatatgtgtgtgtttgtgtgtgtgtctatggatatctatgtatcctctaacgttgttgcccagaggtgcggtggtggcaagtaaatacttctctttcaaaacacaaacatctcattgaa

SEQ ID NO: 34295 - DNA, 1067 bp, Homo sapiens
cacttcagcctgggtgacagagcgagactctgtctcaaaaaaaaaaaaaaaaagaaaagaaaagaaaaaagaaagctgcttcgatgagaacttgctgagttcgaactctcgtcttttactttcactgtggtgatttctcatttattttcttcactcagtcctggggtttttgttcttcccaccccattttccctgctcgaaaaaggagacaatttgaatacaaaatatggaataacagaaagggggatttttgaaagttctctgtaggaaatagaaaccaaaaaggaaattcagtgactaagccagatgacaaagggaattgcccaactgttacctagtgtagataggctggatgtatttgacctgacttctttgaaactgcatgtttcctagaaactgcagagaatcctttcagtgccagccatactcctccctgcttccattgttgttgttactagaagagaaatttgagatctttcacagttgttcaaagtatgtggtatttcaaacctagcttgaaatacgttgacattcatctccagtttgggagtaggccaggggaagagctcatatgatttttgaggtctattgttgtgaaatgttagagctgctcacacaggactaagtttattactttcgcagtaggttcagtagctgagaactttaactcacaggcaaggacaaagtttttggcacttagtacatgatgaatgataacaaggatattatttattagacatttgtaatgccctggacaggtttcactactttgtgtggattattctattttaattctcccaacaaatgctttctcccaattttacaaaagctaagacacagggagatttagtaacttgcccaaaatcacagagctactaataaatggatcttaagactgaaacccaagcactttattgtagtccttttgtgtttgttgagtgaatcatcataataatcatcattattattgtccctttttaataaatggattctaagatctggacactaaatatctcatattatcctggtttcaatcctacaagacaattttttttctatctttattt

SEQ ID NO: 34296 - DNA, 2577 bp, Homo sapiens
aacccagtctccaggacactctgtcttagcccacgagacatgttaaagaccttagaacagtttatgaacagagcatgtagcatcggcctccattttcttccctaggaattcactttcagagtctctttcataggctagttcatgatggacttctttactatgctagatcatttatcagaataaaaatttgtttatctcattcaaacatatcatctcacactacatggcctcacaaagaaaacagcagatcaaggaatgattcctattatttttctgtaatatttgggtggttttcaaagggtggctaagactatgctgagtcattgtctgatccttttgcagtcatgatgatgatggaagtgatctctcacctgttgtatggtaatacaaactgagatagagattgtcatagcagcttctataatctccactttcaaatgcaagttatccaaaaaaaaaaaaaaccatgtgtcagtgtagttgattttacagaggacgagagggtatcttttttcctaagttttatttgcccatcacagctttgaagggaaccaagagctctttactccactgaagctcaccccctttctatcttcctggcactactctctcctctgcctattctattttcttttctctactcactatctttgcttccagaatgaatcaaaatttctctatcaaaacaatttagcatctttttttaattacttagatttctgttgacatgtacatccttgtattctccctttctgttccagcagacatatcagtgaacttagaaatgtgcaccctttcctccctatcaagaattggggatactatgttaaaaaaaacctttgttttatctttttataatatcttgtccatatatttattatgctataagatagaaggggccatgtttggaaaatgaattcaaatagagctcagacaccttcgctttggaaactctatggcaaaatataacattattttgctagaacagaagctgacttcttagaaatgagccaattataaaagtagctcttcattgctttcagtttcaatctgaagtatgtttacaggaaatgccatttcaagtagccttgaatgacctaagggattgtttttctggctggaaaacttttatacaaagtgattttcaaacataatgagtggaaatgtgtgcaatttggagggaataaagggagaaacattatagttaagagcctcagcacctctcattgctgcttttccagaataaatacatagcttttagcattttaaatctttctacaaacagctggccatttaaaaaagctgcagcagggtctattttgggggctgatggcatggccaggaatcattgtttttggccatcttcaattgattttcagtgtagtaatcatggtgtgtgcttttttaaaaacacaaactaagccattcaccttttctgcacaaaggtcatagaagtttcctactgcaggtagggtaaaatcctttcctctctgattgcctgcaagatcttacacaatctggcttttgctcacccctctcctcatcccacataatctcagcttcaccacatgaaccttcattcaggaccaaacacatcaagctctttctcaataattttccttcatttatttcctaattgtgcttttagtaaaattcatcttaattctcatttcctgagagaaggatcattggccagctaatctcaattgggccaacactttttctcctttctacacttactcatggcaccctgtattagtcctttacaatgcagataagaaattcaaatatttcatttgttggtgtttaatttgtttaatattttatttctaatctgaaaaccacattatactcaatgccttcccatgcctttcacagtgaccagcaacccatggtcaatggtcatacctatgtatttattgaatgactcaatgcaattagtttaaaagtgctctctttgagtttgcctttattgttctgtgcctcaaaagaaatctctatttctaagagataaacgtgtaagggataattggaaggatagctgaaaaaggaatgaggccagtagacctaagttcaggcaagctgatttattgtcagccctgctgggctacttcctgacaaaagcagaggaggcagccccacttacagactacagcagggctttatagggcaaggaactgggtcagggtaggggagttgagttgggtgtacagaagggctgagtcggggtcggggagccgagttgggtgtggaggtgtcttgactgcatcctgggaatgcttttgccagctttgttatgcaaggtgaacagacacattaaccacatcctgtaactgcctggacaaacagttactggcggggtcagtgaagggtttttctttagccctgggggagctgtgcagaggtcacaaaggactgcatcataagacccactggaagggaggggaacagtctggttggggtgaccctaacaaaatgtattatataaaaccaagtaattttagaaacttttcttagatttgttttgttacatactagagttttgaattttattctgaataaattgaataaataatt

SEQ ID NO: 34297 - DNA, 2082 bp, Homo sapiens
attttattcctttgggagatgccggtacaaacttgttttttctttctttttttaaatggagatgtgaccaccatagcaactaaaagacataaatcttgcctaattgaatcagtgtgctcaagataatagccagggcagagactgagttaaaactggggtaagggtgagagtggggaaatggatgaggatgataaaaatatttatgtccctagaatttgtgggtttggattaattctgtttcgtaaggaatattgttggccttcaaatgcagtgccacttgggagagaagcaagcgggcagtagttgaggtgtctctgcagttgaatcgcagtgaaaggcaggttatgagtatagggaccgcccctcggccatgtggtcccctccctatcctgaggataacgacatttgagagaagccaatggtattggaaggccagaatcgaacttaagccgcttagttggtacaactgtaaaccctccctcacagaggctgggccctgcaatctttctaagcagggtaaagaaaagtaaggggacttccttttcgaagaggaggttcccgcgtgctgcacccgacctttccctcagggcccaacacgcgttatataaatgccaagttactcagggacgcacacgtgagaaggctggggcccgacacacgcggtgtagtgccgaagtcaccggtgtggcgcgcctgggggacacgccgaagcccatttccctcccgcttctggaaagcagtccccgctctttccagctgctccgcggggcgtatggctgtgcgctacctcctgcggaccccaggctgggcgagggggcagcgatggccacatggcgcgctcggggagatggcagctgcgctttgtttccagcagtgataggtgagtcactggctcccgcagccccagagctgggcaaacactcaggcccaggcagctgaaaaattcacagcaggagcagctaccgaagcgactgcagcctcttcctcctcttcctcctcctcctcctcctccgccactgctaccgccaccaccgtggtagccgcctccgcgccctgcctccgccccgtcccctcctcctccacccgcgaacttagtcagcggttcgcgccgccgagcgcccattggccagcggaacgcgtcgcgtcacaatggagccggtcggaggcggcgagccggacagcgccggggcttcccgctgagcccgcagcctccggcagccgggaaagtgcgggcgcggggccgcagcctgcccgcccggagcggcccaggagcacgccgcggggagcgcgggcgtccggggctggagtcgcgcaggtaggtcggagcgtgacaccccggttccaggagggcgagccgcgccgaccgaggtggtggaggaggaggaccggatacggggacgcagcaggtggggctggccgaacaggtgcggttacctgttcacgcctcacctgcgagccaggctgcgggccggtagcgcggctgcagagacgagtggccgcttcgttgtgctccctgccttcgggagagacggagtcccacgctgagaggacctctcctgtgtgctggggtcatttggagcaagaggtgtgggcggtcgcgccgagacggtcacctctctttcccccgggagtctcggcgttgcacctgagcgtgagtcctcggggcggggcgggaaaggggttccgctttcccaggctggcgtctcgctccagatgagcgcaactcccctgagggtgcccccatttggtcgctctgttttgccccctgcgctggcgctgttgggaactattttatgctcttgggaactattttatgctgttggatacgcgttggttgcctataatttggtggtggtgttgggcgttgatttgtttgagaaagaaagggcaagcgttaccaatttaagaagaagactcaagagtttcccctgagcttagttgagcaggtgctgagaggtcagaagggaggaggctcagtattggctcattaatctgtgtgctcaactgacttcctaaagtccatagattgcctttagttagatgacatttgtggaaaactttttttttctttgtggtcaaaaa

SEQ ID NO: 34298 - DNA, 1136 bp, Homo sapiens
ataatcgttaggtacttataataactctcactatgtttaggttactgagtcagttaaaagcagactaatcagtaaaatacattttctggttttagagagcttataatttacaatagattaaagggaatgacagtaaccacagaaaaataattaagagaaatgtgatttacttgttacctaagaagcaaaagatacatttttctccaaagtaagtcattaaagattgcaatcgtttataccagagttgatttactagcatgaaaatgattgcttaaccctgctccctgtgttcaccaggcgggttggtgaaagcttgtgtttcagatgagccagcctggctacaggaaaagatatttgcatagaagactggggacactgccacacaagaaaatgaagaattatgcttttgaaattccttttattacttccttgattaaattgttgtttccaagggaattggattttcagatgaaattttaataatgcttcagataattccaattgtgttctttcattttactctgctttcacaatatgatcatatttggtttcacttcctggttagtgcacacaagcctgttgctgggaaatatttgaataaaatgtttatgagagaagactattgtttcaaagtagaggaaggcatttttgtttgatttagacttagttcatgtagtaatttttatagaaataaaatttctgacatgtaaattggttaaaaacactctttaaaaataatttaaaagacttatttcgcactgaaattaagttaccttgtggtgaaatcatctcttctacagaagtgtttgattaggtaccagttgtgcaacaaatgaaatgtttgtccataattagagtaattgtaacttgattttaaacagaggtttgattgcatggtgagtgtcataatgccaaatgatttttccattgattcagggcccagtgtattcttaagttgatgtttgatctcagcatgtttaacctggcccagaatatatctggcacccttttgtgtgtgtgttgtaaatgactgttcttctgtgttacagcttcatacaaaatctttgcctattctaaaagtggtatttttaccattaagtatttaattccaccagagtactcaggtattacctagt

SEQ ID NO: 34299 - DNA, 3025 bp, Homo sapiens
cttcaataacagacggaacacatgaagctgagaaactctccatgccaagtagtagttgtgtgtgccccaaagctcagataagtacttctccttagagttggaaggcacttaagtgactttttaacgtaattcaactccccacccccagcgccaagtcttaatatcagagttttagtcgacgggacagcctccttcgcccaggacgggtgaaggctcctgaccatgcctcgcagctaactggcagctgcgcctgcccggcaccgagccctgcccaggtggacgcttgcgagagcattacggcgatggttatgtaggctgccgttcttcccctcccaagcacctgctccgcatctagcagtcgctcgccgccagtctccaaccccgggtcccctccctcgccacacagaccccgtccggtcaggcgctgcagggccaccggagaaagcgctcgcaatcacatggaggcccgggcccgccccattggctgcggccgggccagtcgcggcactcgccggctgcggttggtcccagagctgcagcgcctgcacgggcccggagtccatgttacgctttgtctaattcccctcgttacagagtcatgtgctgctgctcccgtcgccgctgctgccgctgccgctgccgccgcccgtggtgccccggctcctccgccgcgcttcgaggtggcagccgcgggcggggccgcgggagcagggtccagggtgcagcgcgccttcgccgccccggcgcgtcccggtgcagccgccgcccgccgcgggtgatgccgccacctccggcctcagcataagccgtggcttggcggccgagctgcaccccaaggttggtgcgcacctctcccggcaggggccgggggctgcgagggaaggcgacgcgcaggtggagccgcgccgagccggagcgcgcaaccctggcgcaggcgccgcggcccgagctgcggttgcggccgggaactcattcggggacgtccgggggtcgggaggaggtggcggcgagcggagtgggctcccgtttgctgccgccagggcctgggagattgttccgctttctgcagtctgagcgtcggccgcttcggccccgggcggccggccctgcgggaggggagtgcggcttcctggctcctgaacccctcgcgcgcgctcccttctctcacctccctccgccctatcggaaaggcggggagagccggtttcggctctgctggttcctcccggaggtgggtgtttggtgtctggccttgctggcccggcgtccaaaggtgagccctttaacttctccagaatcgcctcccctccgcttccttcctgtgcagggtgggctgcgctgggagcccggcgggcgggggcggggaggtgaaggcccgcgccccgccccccgcgcctgtgggagggagctgggggcccgcaggtgcacccagccgtccgcgggccgtctccgggttgggtaccggtataatccgcttctagcttgtttggaggcgtgggctcttgggagcgggacttctgctcaaatcctgtccaggggcttgaaaaggaggagaattgggggtggttgccgggaggaccagcacctccagttactggagggttgataggggccttctcctttccgtcaccctttactagggggtatcccttgcagataaatgagattttttgatttcttaaaaagccagctgcagtgaagaagaactgctgcaggtcgaggggaagagaggtaggtccttgctggagagggagaggtgggctgtgaggttccaggagcacgcacttggggtgtgtgtggccgaaagtatggaggtagggttgtgggaaggaaacagccgagatgagagggagggcgcactcaggatgtaggcggagagatggggaataggtactggggagtcctagcggaatgtggggcccagctggagccgcttggcttatatttggctcctcgttgcctcgcagatttcctgctcttggatcttcaaaaatatttttttgttggacaaagaaaactctgaggacatattttggaagagctgatttctggaaactttccttggcagctttgatagtaaaattccgtacaggcagcgtttattgagcacctattacgtggtttgtaccggactttggaagagtctggacaggcagggaatccccgtttgcagtaatgatgagggctgtctaccttataaacaaataaggggcccctcccagtgccaagaatgagagtgatcagaccttcctcgccatagcatctgggacctctgcttcttacagacctgtgggaagaaccctgcaccatatcctgtaaatggggtcctcaggcagcatttatttttgcagtccaaaaatagtgaccaaacacctactgtcagctaggcgagagttggggttcttgcttcatctgtcttgacaccaactaactaaatccctgttaaaatccaagtgcaagatggggaggaatctgagatgaaaattaggtggttaaaacaggggtcacgaaaagttgatttggggtgtttggtctctgtaggttacttatggagccccccataaaatgattaggtaatctatggagccagggaaaaattccaaaatcttgaattggcacagtttatttatatatttgaacactatgttagatttgtctcgtttttattgagagtgtatgtgtgcgtgttgattaaaacctaacagattagaaggttggagaggaaactgtccttagatgacccagccttccattaccatgtggagtagcatatgatgcaacacttaaagtattgagccatattcatatcattttctccctgctgtgttttccagcatttaaaaaacatggtcaaaacttggccctttttttctcaaaatcgctaaagtttaatggaaagaaaaaagaaaaaaactaggccccttttcccttaatttttatattatgcagcatttttaaaaattaattttagaaaattctgatgtgtttgtcatgtccaaatagttaaattgttttggtagctata

SEQ ID NO: 34300 - DNA, 511 bp, Homo sapiens
attttatagttgagcgtatccaggcacagggaggtgatgtgcttagcgtaagtttacacatgtagtgacagagtaggcattagaatctatctgccttaaagaccacaataaaggctaaggatcaggatttcttctctgcttagaggtgtgtaaacagtggggtccctcgggtcttatttacataattgatctaaaagaaggaacacacagtggaatttctaggtttgcagatgacagcttttctggattatgaaatgtctaaccactgggtatttgctccagggaaaccacactaggatgtattagtcatcagacgatttgcaggtgagtttcttgtgggcaaataggtggttgggtattaaggggaaattacagaattttcataggatggtgttttgttggataaactcagggaagggctctgaaaataccttcatgttgttgtcctgacttgctgttgcagaaaaacaaaaaccatgaaatgctaggcttcatcaaaaagattttgggg

SEQ ID NO: 34301 - DNA, 1480 bp, Homo sapiens
ggctacagagctaatagtgcagttcttcagtctcttaggagctacatgaaatgatgctcacttttacatttcctaggacccagcctgaatataggtcatttttttttcaaatgtttcagagctctcttactctcatttgttagttctaaatcaactgctaacatttaaaatacaatttttgctgggaggacagatagttctaccaagggataagctatttctcaacattaaagaaattagaaattataatttatgcttaaaaaaataatgttagttcaagttttagcttgcttctctctgccttctctactgttctttgtcctgccatgtgtttgcaaaccattctcatgaccttctgcctgtgcggcatatttgtagtggggccagattatacatacgccactgacattttcatctgacctcctaaactcagcctttgagccccttcttttctttgggttttcctaacgaagtcttgttgaaaggaatattatttcccatggaactttactgatagtgtatggaataatacgatcatgctctgtgaagttcagacctgaagtcttaacattttaaacatgtatctatttgctattgcttacttagttcagtcttggcattttaggtttagaggtggttactacccattggacatccatagccactccctgcaaattaaaggggacacaaaaatgaaactgaacttctgtttttcttcacctctctgctaatttaactaagtcaattggctcgccctcatttgccctcttcacacctcccaaattaatgttatgtgcaaatttgattaaaacagcgtgagtaatttccaagttacttttgaatacggattgaattccgttccttgtggctttttcttcatcatactagtagatgtagccagtgtttttgtttctagcctgcttaacttgtgtggttcttggaacaacataagttttggttgatttaggatcctgatttcacaggatactgtatcaactgctttaccaagatcaaagtacatgggttcactgcattcctttcagttgctaattcagttgtgctgtagccaggcaatcctggagccttgaaatccaggattctggtcaaggtgaggaagcagcccttcctcctggccttttcattctgcaaataccttttctttccttcttaatatttatttattcagcaatgtggcccaggctctgcatccctgacttcctaaagctttcagcctagtgcccctagacaagtggttacattcttgctacaaactggaaagtctctgagcccctcaccccactcctccccacttcttttcttctgctgtatttatggcactgtacctcatgaactttcacacaagggaaagcaaactcaatccaattgggtcttatgggtaagaaaatgtgttggttaaagtagattctggtcagccaggctatcgaagttttagtatttactagcagtgtgactttgggca

SEQ ID NO: 34302 - DNA, 1867 bp, Homo sapiens
gtaagggcaggcaggttacaaatgcgaatccccatagccagcacactctacatacagcagattcttaagccatctgtgtactctttttaacactgtactgaagtccacttaagtcagagttcaacaaaatgaatgaatgtaatcccaggactatggaacttctctgtgattacatagcacagagaactacggaatcattttctggaagaatgcaccatgcgattatgctccatgtggaattggtatatataaatgttggtagactgtgaggatgaggttgacaggttgatctgagtagagaccctaggaggaaccgaggatactatgtagttttgttgttgttactgttttgcagttcctggctgctctgtgttggcagctgtgtgcacgctttctcttttgagccagcgaggcacaagacaagtaatttcccatcttgaatctctcacagctgctgagctgtagtggatatactgggatgtggctatgaactttaaaaatttgcataaatccagcccctactcccctgcaaaggctcagtcttgtctttacaccttccccgaggtaattattttctggggggtaggggtgggggttgggagggtgaagaaaggaagaaaaagaaggccgatcacactgggcaccggcggaggaagcgtggagtccattgatctaggtacttgtggggaggggagaacccgagcagcagctgcaaacggaagggctgtgagcgagcgggcgggcgggtggctggcagcgaggccaccagcagggggggcccgggccgaggccgcgccacctcggcaccacgcgggcagccggtgcggcggggtcgccacggccaggggagcgctgggtgcccaccatggcagttatgcaagcggtgaccccctggtcttgcctccccgccgccctgcactccttcctccccgctgccgacacttggatctctctagctctttctctcccctgtgttttcaaacaggaagtgcacggctgtctataacgtgctgccgggtctcaggatggaggagtgaagtctcctgtcgccgtggttccagcctccggagctcgcccaagccgcgtccccagagagcgccctgagagaacagggtggccgcttggtccaggtgcgcggggtcgggtctgggtccagggagcgggtcgggaagtctgcggcacggagcactgctagtgtcggatctgcatctccagctctgtgctgcagcttcacttgcccgccccccaccactggcttctcacccggggtctctgccaaactctggctgctgccgccctgggttcgggccggcggaaggccctgggcgtgcgctgcggagccgcctgcgaggactccactagggcgctttccaggctggactgccccgggctgcgctggagctgccagtgctcggggagtcttcctggagtccccagctgccctctccaccctctcctccagctgctgctgcctgaagcagcagctctttgttcctcccttactggtctggggtcatacacataaatgtcctgggaggcagggtggtgggagggtaaggggttgggacgtagggaagaggaagaagatgagttgtgggtgaagtgtaaggtggacaggagaaaagaatcttagtgtccatgctcagaaatcagctcttcagctgctgaaacagaggaccccggttccttggtttctgttttgggaaagccaggccatgccaaacagagggaattaatgatgcaggcacacaccggaaaggtagggaccaggaatgaggcacagcagcgagttctgagatgtttagtctggtgtctggcttgttaactccactgtggtttctgagccaggcctcctcgctgagacaga

SEQ ID NO: 34303 - DNA, 2025 bp, Homo sapiens
ttgtagtagtgcttagcacacaacctgtgaatgaatttcattcctttaaagggagttttcaaaaaccattcttgttgattactttgcttaattgtactaaatatgtataaacatgaaattatatatatatatatatatatatatatatactttctgtgcttatagtttttataaaactattaaacattttaaaatcgcaaatacaaataatatattaaaacctttgaaatttaaattaataagatgaatgcttttttgccaacactaaatcacttatgttgattttttaaaatatgaagttgttccattgggtccaaatatgtacttaaggcatatgagtcttttgactgatagtagtaatgtagagaatacttatttgcataaataagttattcagaagcacattatgaactcgaaagccttgcttgctagctcaggactatcagaacttatcagatcgtaaatctgccagtgaatagttctttagttacaattttaatgattttaatgacttacaacttttttgttagagctgtaaatgtcctgttcattcaaagatgatgttaccatttcagaattactgacatcaactccaaatatatatctaattcaactattggcagaatcaggaacaggaatatgtttgtaaattttagttcttagagatatggaaaatttttaaggttttcagcatgcagccaagtgtcagactgttgaaggaagtcaatagattatagaaatgactcattcagattattttgaaaacaacttgaacagaactttttgttatcattgcctcctctttataatttttgaattgctgaaacaaaacctttgctctacaatacctgcatgtgtagcacataccttcatgtcatttgaccttcccttggtgtgtttctgcagattatgtatcaagtctgcctctgtcctttcctcatcagcctgaagcagttactatagtacattccttcactgtttgtcattttatggtgccatgaaattaaagtcttgctcaatgacagtcttaaattacattttatcattgccgtgtgtgcttatcagcaccccaggagtactgatcactgatgaggaatgcttggtgatgtggcaattataaatacacacttgggcatggtattgctaagggggtcattcggatggtccagtgtgcatttatatcagtttcctttagattaacattaagatgaaaacacaaattgaaagattattctggagaagtcatagactcttgaatgtgtcggtagttttttagagatccttagacccctgtttgagaacacttgcttacagcattcatagactgtgtacaaaaatacagccagattattgtgtttctggaagtgttctggcgtttctaggccattcctttagttctctacttttctttagcctttgagcctatccctacatcttagaaaaccccttcttggtgagaggaatgtcaagctttgttttctggtctcacgaaggcccgataggctctctgttggggtctctctctggctatttctggttacctaggtaaccctgcagcccatcccctcaggagcatggagaatacacacctgttgaggagggaatagagagagcagggcagcaaggagagttaagggcggcatgaggatttcaagtgtatcaatcagatagatacttacacttaacattaaaaggaaaaatcggtgtgatgtcgaccccaaagtcgaaggtattttattaagccaaacatcatcagggtagcaagtcacttagtatttgtgtatttttttaactgttttattgagatataattcatataccatacaattggcccacttagagtgtataatccaacagtgtttgtagtacatttagaatcatgtgaccattaccacatcaattttagagcattttatcacccgaaaagaaactctgtccccagttaacatcattctccatccttttcagtctcaccagcccctgaccaacattaatctgtagatttgcctattaaggacatttaga

SEQ ID NO: 34304 - DNA, 2207 bp, Homo sapiens
ctacctagacatagaattcaactttaaataatcctactttaagttggttcctgggatgaggtacttagtaatacagtattgaagtggtagatggtgaagttacttcctgtggtggtgtttcattcatgtctcaggttgcaaagttatgtaagttgtttacagcaaaatactagtgaggaagagttcatttgccactgctagaaggtacagactccccgcatttagtatgatgactatctttggtcttttcttgcagctgtcttgtttatagagtcaaattatcttatgtctatctagggttaaatgtcacagtctcatgggcaatgtaacaaagtttgtattttgtgctttgttaaagaaagctagtaggtgattacttgcggttgaatcggtatttggagactcattaatgattaattgaaaacacacacaagcacttttttggtaaccgcctgcgcatagcgttcttttggggttcagatatttagcagatacccccttccctctcctaaaaatatacattcattttatattgtgttagacttaaagtatatttgaacagaatatgaagtttatgattcttaaactatttgcatttacatatggtataattactcttaggtctctgacggtaatagatgtccattttttttcattaatactcttgtttctttctactgtttacaggaatactaacaaaataccttaactgtcatctcaaaagttaatgataaatgttaataaacttcattataaaactgttcggtgatttacaatttgaaaatattggcaacccatagtacctggtacctacggtttggaacatatggtgaatggatttatttcaataccttcagtggctcttttctgaaaaagtccattgaaaatcttatgaggccttttttgtacttttgcctgtttgtttgtttgtttgttttgttttgcttgcttactcctaaatactacctcgtatttgtccacttttacttttgggcacttacagcttttaccttcatttggcattggggccattatgtttctattgacctagtattgttcagttccttggatgatctcatcctcattacctggcaatctctggcaaagtttcacacttaaattttataaattgggatatcactttcctgagagtgtattccgtctgcaacgtaaatgcaagttcttttgggacaagtgccatagtttaaacgtaaattattcattgacagtagcaagcgttgtgcaaactatgcagtgctttctcagtaagtgctcattgagttgccctgtgtgcatgatgaccagctgtgttatctggatgtggaacatagcgttctgctatctgttttcagaaatgtcgcatatcccttccagggcagaccactcattgccaaggcataaggtcgaaaactgcccagtggggtggaaagcaaaggcagttggttagctgttggtgctttctttactctctacgaggatctttcaatggcagtgaccaggacttcattctgttatttgttatagaacaggcaagacatgaaccaacccagtcatattctgtaccaaacacatctgtggtccattctgctttccccagctttggtttcttcatttcacacgtccaagagaattttcttaaggataaccatcttattagaaatatgtctaattgataatgaaatgtctgtatttagctatttaactttgttctgggttctctctgcttacttaatgtgactgcatttccctgagatgaatgctgtgggtttttgcagtctctccccaactttgcccctcccctcttagatgaaggtgcatcactagagaacctgcaccactgtgtctcctacactgtgtcaggtagacagtacatgattagtaatgtgtgtgcaaagctttcatgaatgcttttaagaagttgaactcttaatattttgcttaatttccacatgtttaggataggattaatgtagagttgaaattaagatagcatcttgggaattttagataggaatcgtttgtgacccaaagtgaataaaaattgatattacaagcaggcttttaatccagaaaatttacttattctgtccagactgtgaacagttgttttgttctcaccaaaggcaattttggtgaagtgttcttagaaacagtgtgtacaggcttctgtaattgtacaggggagagatcatagagatccagggaac

SEQ ID NO: 34305 - DNA, 993 bp, Homo sapiens
ctgaaacaaccccaaaatcccacccctgactctgccttttctattttccccaacttctgttccctttctaaagaacaagattttgtggaatttaaagtagactgtgactggccaggttgctgcttgctcacaatgcctgtcctgtgtgttggctttctcagccaaacttttgggagccagttgtcacccaggacccaaggctggcattctttggaaaaacctgcctgtgtgttgtgccaagttgtgttagccactccatgttattcttagatgggctctggagtatgaccagcctgtgtgcatgcatttgtagtaggcactggataagaactggagtaatgactacagaagtgaacggtcacagctctaacctgctgagtcatctcagctcagccttgctagcaaggcctcccaggctgcatatagtttgcttttcctgttcgttgcattccaacctgtcaacggctattttctgaaggtctgtgggggctcatgtagaaaaggaataggtctgggtggaggccaagaatctgaatttgtatcatgtaccctagctcatcttaattcaagtgttagtctgtaagaaacagaagaatgggtaactcaactcctccaaacaaatctgtcagcatttactcatgcaggaaggctattttcatgtatcacgttcagaacacaaagggtcccaaagggcttcccatctatctttcaggtgttgggcttcctgtcttccactgtgtcttttttttttttttttttttttttttgatactgagtctcactcagttgcccaggctggagtgcagtggtgtgatcttggctcactgcaacctccgcctcccgggttcaggcgattctcctgcctagcctcctgagtagctgggattacaggcacagaccaccacacctggctaatttttgtatatttagtagagacggggttttgccatgttggccaggctggtcttgaactcctgacctcagatgatccac

SEQ ID NO: 34306 - DNA, 901 bp, Homo sapiens
atgcattaatttgaaaatgctttccagaatgcatcattctagatcttatacctttctgcatgtttttactgttaaaaagcactttcccataaaagatcttgtcttaatttttacaacaatcttactaggcaggcagggcaaatatcattgatcccactttataaatgaaaaaactgaagcctagacaggggaatttgcttaaggtcacacagctgatatgaagtgagcttgtgacttcacatcccaggatttctaccagccatcatgcagccccaggtgaaatgccttctcactccattctatttccctcctcagggctttgtgcttaggaagctctgttaatcgtttttgttggctggctaactttgtgccatggggccaagaggaaaagaaagcattttttatttttctgatatctcttcatggaggccaaaacctaaaggtctcaatgatccagagtcatcaagacacaaaaaggcaaaggtgtcaggacctttctttatggaccttgtccctggattgtgttgcactgtttgcataaagttaaactttaaatttgcatatctaacctgtggttaccaagttgttctggtctggataatccttggtttcagcctggagcaagcagagaacaatctcctctcaaactttgtgctgctattccaccttgagaaggtttggttaacaagtcaatcttaatattaaagaaaagtgataccagactggagaaaatactcaacacagtacattccgaatgtactttgataattttggaggtggttagaagctttggtccctttaaagaaagccccttgggacagcttgcagactatagctagaagcaagttagaggttagagaagtcagtttctttctttaaaaaaaaatttttttttaagaga

SEQ ID NO: 34307 - DNA, 1989 bp, Homo sapiens
aggaagaaccatggaagactgaaacaggattccaccgccttcctgtaggcattgtggtggctttgcatccaagccattgcttgatgataatgttgccagtatcttgcatatactggatgagaataccaaggcctggtagcttttgatgttgatgccttcaccactgccatctccgattgtgaaagtccaaatgggtgccgaaacttgtgggcgcgcagcttgcagatcctgggcggtggccaagcaggccatgttttagaattctttccaggcgggtcgcattggctcacgcctgtgatcctaacactttgggaggcggagacggggctgggggtggggggatcgcttgagtccaggagttggagacctgcttgggcaacatggcaaaacccccatctctataaaaataatttaaaaattttttaaaagaattattatttccattttatttcagtgctttgtcctttaagaaaatttattgacatagcgataatcagactccatacgctattttgtatcttgcttttcaaatttgccacaggcttctagaaacgtcccagacttctgtgtctccatggaggaaaccccgtaagtacttacaaatgttatgattagtcatccctagccaatactaagcaaaaggtaggcatgcggttttattagtttgggcaggaagaaggcattccaaccggcttctttcgctcttgccaggttcaaacatggcgggccgcagccggcccttcccgtacactcggcttgctttcccacaacccccgccaatctttagcgctccttttttaccttccttccccgtcagcggctccagagggtcagcacctccgagcgtgacagcggacctgcttcccgccccccacgcgagggcccgcccaccagcccgcgtcagccaatagcaggccgcgccgatggggctggtagcgccggtcggccccgcctccccagcctcgctgtggcctgcggctcccgggctggtagcgcgccgctctcggtcgcgcggagtgatcgtgtggaatcgcgggtcgcggacgctcgccgccggccatagctcagcctagcgccgccaaggccgacggccctcagcctctgccatggacttcgaggacggtaagcgctgcctctggctggtcggcgcagctggcaggaggcggggtggcctacgcagggggtctgtttaccgtctcaagatggccgtgtgggctttgttctgcgggcccggaggccgcccgcccgccccgggcccagcgcccggagtcggcctctttggggacccacgcgccccgattcggcccgctcggcgcccgctgccggcggagacaagagaactcggtgtccggtaggacgcgcctagagcgcgagagcctccgggctggagccccagactcgccttggcccctggtagtggaaattgccccgacgtctccaacttcccggtctcgggcaaacgggcgagtgcggcctcacccacctagtctcgcattcgccccacagggcagcgacccagaccgtccgtttagttaatcctcagcctcgggttacttcttgccagatagaattttcagaggcttgttcacagtgatgtttctgtttgtcccggtttaagatgagttgaaagggtgtctgtaagtgatatgtatagataaatatctatgcaaaatggaaagcaagatgtttcctggttagtaaactggggtgtttatcaccaaaaattacctgcttattaatccctaacttgaaatatttatgtgaaccaaagcacttttctttggatcgtgtgtaggtaggatttaagttaatcagaattttggcacagcaagcatcaaatgtccttcacatttagacctgtacacagccttgtaagtgtttgacttacggattaaataaactgtattttagcaatacttttcagttgtctcagatactaattctttaaaccacttttacagggtcacaaagtaatattaatttggtctt

SEQ ID NO: 34308 - DNA, 660 bp, Homo sapiens
gatagtctcgatgtcctaacctggtgatccgcccgcctcagcctcccaaagtgctgggattacaggcgtgagccaccgctcccggcatgtctaccttaacagacaattaagcaaagataagtttgatattccgttgtggaatttgagcaaggaaggctgcctggagagaagggcttatctctgctttaaaatgagccaagtgagtatctgtagataggtccagagttcaactcagaaaaacagttatgaatctgttctaatgtcaacacaaatgtgtgattgagggcccgaagtgttattccatagaataaggctagcctggggaaatgttaaaatagatttaacttgatatctgactttacctttagaaaaaaaccacaaacgtcaaacactgtaagcatgctcacctttagcaatcctgaatcctggtctgtcataacctccaagataaacaatggtgaaatgtgtaccaatgtcagtgatcaaggctacttgttgcttgagatcttgatttataaaccaggtaagatctaggccagtgatactaaatacaatagatctagatttagaatagacattttgtagccatactttctggcaaaactaacaaccagtaccagttgctctaaggcatcaggtaaatattaaaaatttgcttgt

SEQ ID NO: 34309 - DNA, 656 bp, Homo sapiens
catgggattgattgatcttacaatgtacttcttcacctagaggcagccagcctagtagaataatggaagagcctagttaaggtgctagcttgggcataataccctatggggttgaactgtatactccaacatgcagtatatgcacagaacaaacagtggtgattttctcctagctataatatatgggtccaggaatcaactggtggaaataagattggttcttttcaccatcattctcaatgatccacttgtgaaacatttgttaagcaattgaccccgattcctatgaggaaatagggttgctattacacaatggaggcaatagggcagaagggagtacgtctaggacccagcgatttaatggggcatctcttggtgataactccaaagtccattgataactgtaaattggcaactgcagcaacctcagcccacaggggctaacgcaacccagtccccttgtgggtgaaggtctgagtcactcttagatgactcctaggttgctgggaggcaccctagaccagctgaggtgttggtaaagggtgaggcaaaactagaataggggtggaagatgaaggtgacaaatattaattatggcattgagatcagttgtagcagtgaggactggacctcattacattaaccttcctttatga

SEQ ID NO: 34310 - DNA, 1545 bp, Homo sapiens
ttggactatttggttacataacatctctgttcctcagtttatgtcagaatggaaataagacaaaaacctcctccttcctatagggacttttttgagtaccttgataaatacctacaaaatgataaatgctactacctctttcaacatttgcacgatgttaactaaacacaaaatatttttagtgtgtgaattaaaatgcctcttttactgatggcttcagatgtttccttgtaagataccatgtcaagaactggtttataaattatctgtccttccagaacgcactgacatcacgcttcctaatagcttggtatgatgactgctgtcaaaatcgcctgcatggaaccatccctgacctggactaacagcatgtattagcgtgacagagactaaaaagctaagaaccgccgtgcgatggccggctttgggcaccgggggtgggggctacgctacgcgtgaagggcctcagtcctcgggctttagttcaggaagaaaatgaaagctggaggtctcgtgggcgggactggaggcggccagataggcaagaacccgcaacaggagtagggacattttttcttcaaattccaatcccatccagcgatagacaggcgcgtgggtctccctcctccacgaccaccacacaatggcacacacttttgctggaaactgaaatcgaagtctctgaggcaggctggggcccaggccggcagcggggaggggcagggtccagccacctcggcgtggccttggcgagcgctccggggtcagaggccgtcgttctcgccgcgctccacagcgcgtcacccgctgccctagcgacccccgggcgaccccggcatcgcctggctgcgccgtcccggcgggccggccctctccacgccctctcctggggtttgcggtgggcacagctccctccagactgggtctctccactagcctcctccccaactgcaacgtgggaaccagagctatccgagtcacgagccccaagtgcacacaaagcccccaacggggccacggcgcctccacgcctcgctacctccagctccaggagcgcagaacgcagcgccctgggtcaccgcgtctgccctgcggagcagccccactgaggggaagcctcgggcaggaggtgagaccccgcgcacgcaagcacccccgccccaagcagggccctctgcccgagggagactctcacctcaaataaacgggcgctgccgcctccagggggaggacagcgggcggagaatactcacgctgggcccagccgcgcggggacttcgctgggaaccacgcgcgggctcccgccggggagcggagccccagcctgcagtcctgcgcccgccccagcaccgcctcctcggaagggaggcctctaccgtccggcggcggacctgcagccgccgcgggagacgctgccccgccccccggccccgcccttcggcccatccccgccccgctggcctccttttcccctgccccctccctccgctcctcaacgcccgccgggtgcaatctgctctctccgggagacgaacgcgaagcgac

SEQ ID NO: 34311 - DNA, 716 bp, Homo sapiens
ttaattgacttttcctttatttattctaaaacaacctgattttaaaaagaaaaaaaggtattttttataggtagcaatagatagcacataacattttataggtctttgaatacagctacaccatttctttggacaaagggatgatagcaatccagggtgctgctggtcaattagcaggaagagaaggtaagaatttatctgtagggatccaaggggggagggatacaaatgtaacagaagagttacccaaatggcttttcttccattatcctgccatgtgaaaaattccctggaaaaattctaagtaagagagaaggaactggctgttcaatgactctgtgaaacgaattgttcaaagtccagattccaaaagaatagatgctactattacaaaaccagtaaacatagttccttagtcaaatggcaatgataacagaaatgtcatatagaaaattcaaaaccacaagaaacctaaatctcattgaagccactggtttcagcttcctgtcacctgcctattcaaaagtaaaatctaggacacagtctttttctgtttatccttagaagaagagtctaataagtaaagaactactagaagtcaagttaggtattaaagaatgggtaattcaaagctaaacaaccaaactctggaatagaaaaatcttataaggatcttattagttatctcagtcaagagcctcgcatgtagtaggaac

SEQ ID NO: 34312 - DNA, 1585 bp, Homo sapiens
aattatttttactagctgtctttgacaaatttgcttataagcttaaaatccgtgtttgtgctaggaggaggttggtggtagaaagaaaattaaagagggggaactgataactttaacaccataccagcacagacatatacaaaacaaagtgtggagaggaaaagagcaaaaggaaatgctgtttgggaaattcccaactcagactatccaatgaaaagattatattccacccgcctcaatctagctacctaccagccactcctcactctcatcttgggtttatacgtacattacaaatacgcatagccactcaccttcttctctctactaatagtcaccacatggcctcacagtcaaaaattgaaaggagagtgaagaaattcagcatgttataacaaagacaaaccaatgcactggctgggaaataacttcattaaaatgtactcattcccaagtgtatctactcatctgctgacagtgctgggaatgcattcctgaaatatttaacctggttataagattctgctgctagaatcagagaaggcacactttgatgcctacctctcacttcctctataacaaccttgtctttatcggcatggcttaaaatgggacattagcaaaagtatacaactgcaaatcactcacaggtgaaaatctcaagttaatgtagaaagaataattaaacaatggtaataataactattattactctaacaggtaacacttactttactcagcattgtatgccagaaagctaaggactttacatgaattatgtaatatcaaccctaaacctctttgaagatggtaattactaattccacttgcctagtgctcacacagctaaatctgaaccctgtcaattttacttcaaggcttacactttcaaactttatcatatcctgcctctttatatatgcataattacaattgcaattgtgattctatgtgtgtgtgtgtctgtgtgtaaagtatttagtgagtcagtagcaaacaaaaggcaattaattccaactctgtgaagccttttacccaccttcacaaaccaacaataaattgggaattacccctctcctccccaataaatggtgctctgaaagtactagttttacagtcatacatcacttaagcatggatgtacattctgagagatgcattcttaggcaatttggtcactgtgcaaacatcacaaagtgtactcaaacaaacctagatggtagagcctacttacacacctaggctacttggtatagcctattgttcctaggctacaacatgctcctgtaaagcatgttattgtactgaataccacacacaactgtaacataactgtttagtatttgtgtatctaaacatagaacataaaatacagtaaaaatacagtattacaatcttatgggaccaccatcgtaaatgcagtccactattgaccaaagaacatcattatgctgcacatgactgtatttaatatcttcctcaagaaactaatgaaagagatacttttaagtaaaatattaatcttttcaaaaaattagataaaataattgatagactacaggtaaacatgctttgtaaagtgtaa

SEQ ID NO: 34313 - DNA, 2506 bp, Homo sapiens
caagcctaccaaaatgcaatattactgccatcaagttccctagatacttacacatgcaactgaaggcaaacagccaggtttcctttctttgagaaactttagttgtctattttttgaaatgttttccttctcatgggaccaaaaaatgtttacaactaaagcaaactactgcagggagggaatacacaattaaaacaaatctaccatccagatgcaacaagcgtggaattaggactggacaggatagtcggcggtgttgtgatacttctgttgaaattattaacaagacaagaccatcattcgcccccaattatgtttatcccctcgttgagtttgatgatcacacaaaatctgaagtctaaatataaacgtttttatattcaaagtcaatattcaagaaaacttttccactaatgttgctaaaccatagatggatcccaacaagagttgtctgtagaagtctcgtaacaagtaacctttagctccaccacctaagtttccaatcactgagaagagtctgggacaactcatcttcaggttcacgggagaagtggagcacacctgctttcctctggcagagtaacttcccagggacacaaaggccagagaatcagacctggagaggcaaaaagctttagctggacacccaccaagcccctggcaacccaaacacttcgagcgatttacctcttgctgttacttcccaggcacctagccgcataagatcttgcaggacggggggaggggagggctatgcggtcctgtcccaagtaaggggaggggtgtagacagttaatgccagagccagcgtttctggccacaaccgagcagcctcaacgagaggggttggtgactgctctcggcccgccccgttactcagtgcattgcaatggcgaccgccaggctccccaagccgcctgatctcggccccttccccctactgctcactggctgctcggcttcatgtgactaaacaaaacccccaagtctagtgcccagctcagcccctttgtgtccgctaccggatcctccgacgccgcagcggaaagccccccccccatccccccgccgagtcccgccccgcggcggcggccgccgctcacctcaggctccgtggcccccagcgaccgccgcggccgccgcctccccgaacccggggcccgggctccttgtgtagcaccaactccgcctcctcggccgccgccgccatcttagcctgtgcggcaaaatgcgtccttttggatggctgggacccagcctagggcgtagctccccgggcccgagagccggaggccgggtcccccaagttcttccgccaccctcagtcccgccgctgccacagcccagaggcccgaaacccactcgggtcccagcgaatctgaccaaataacccctgaaactcacagtttggtgccgtgtgcgtcaaaccggggcgacgttgggagcacgcggcgtccccgcgtcacacgccgctctgtacgctactcggctccagcggcccccctccgctccccgcttttcgcctccagccccggttcccacggcgcaggcgcgctgctttcccgcctctgccgggctgcgggccgcgggggtggccagcgaggagctcccgggaagcttcgcgctggtggagcgtctgggccaattagacaaacgagggcagcggaaacagtgcaccactgttctcgggtgccagaaaccaaacaaggtcacctcccccagcgctgacctaatcactcccaaggaggttcccgccccaaagtaggcacgctccaaatatggtggtgcccaaactctgcaagacccaagcactaggcatgcctaggccctttaaggtggaacaggcccaggtttgagttccacgatcacgagcgtgcaaaaatctctgttattttcctcttgttgaggaaaacagcaatatttgccaatcacaactgtggagtaatggcagagggaaggttttaggatcttaagggggcagattgttgggagttgcttgatggccaggcaaagcatcaagtgtgacatctcagttacccggacagcctgccctgaaaggtggccgaggtttgctccagtttgactctctgaggatactctctccctgcattactgaaagtgtcgtggttctacgaattaaagttatataagaagcatgtgagatgctggttaacccttcagagaatcagtccctagagggttctggaaattttcatttttaacaagacttcaccacaggatcctggggcagagaaacactgagtgggctattcttttgtttttcgactgagccaacgagaaactgctaacatgtttaagattaaccaagagttcttgagaaatctactggtcccgccttaattatttggcttctctgaacctctgtttactcatttaaaaatttaaaaataaaaaagttttccttagttgtacagctgtcattactgtggccctccaaaccctcaagatgttattgacattcggaagaatataccataactgcatt

SEQ ID NO: 34314 - DNA, 976 bp, Homo sapiens
aagtgctgggactacaggcatgagccaccagccctggataagactttaaggggtctggaatgggtatgagcatatttttcactgaaaggaacatgaataattttgattatgagggcagcctctggcagattgaagaaatagtcctaatttttttacttctctctgtatctatactttttgccaagtaattttatgatgccttcccaccataagaagagagaactgcctcattcgtcaaaagaagtctgaccatgagatgtactttggccaacatcctggcgagatgtactttggccagcatgttgacaggcatgaaaaaagcagaggcttaaaattgacttgctttcttgtgcctcagccattattgtgagaaaatgcccagactcacctgatagtcccaggaatgagattatgagaaacaaatggagcagagtcccacgcagccaaggtgagcctatttcagcccacagcctgctgactcccaaacgtgtgaatgagccttgctgcattcagtggagccacctagctgatctgcagttgaccccagatgtgtgaacaactaatgcttattctaattttgattctcctctgtagaaaccaccccctttttgttaacacagatgttttttcaagttgttaaatgtgaagtaagttctttaaaaagactactctccaaacatgagaaacggaggcctcctaagtacctaaagctctgtgtctcacccaggaagagaaaacctcctcccatgttgggcaatacccaaagtggtagaagatatttgacatcaagagactatgatatggtattaaagacattaaaatctgcaaaggaacccacactgtaaagaagtggtttttaatatcaaagacaacaaggttcagtgtcttgactgaaacctttgagacataagtcaaatatttaattgttccctgactcccaaaatagcactgacttttttttttttagttagagtct

SEQ ID NO: 34315 - DNA, 1252 bp, Homo sapiens
ccagttttccctgagcatgctcaccaaatgacttatctattcaataatgttgaatgaacattccacttttccctctgtgaaaaaatttttgaccctacccttttcatttgctgtaagagtttcagctacttttgcttattagctctcaaaataactgcactcatgctctatttttttcattatttattcattttgtaaacatttactgagtactcctctgtttccagggctgagctcagcactggggttgggaggggaatttaaaaaatgctcaccatctagtgggtgagacagagaagcaaacgaatgtgctgcagagatcattgctggcagcaagttctgaacaaagggttaagggagtccagctagagaactatgaagtcacttctgggtctggctaagtaaggattagcctgtagggatgaccttttaggctagtattacttgattcattggaaggtggggcagaggtagaggaagcctatcaaagcaaatgggctgagccaggggagcaaatgtgttcaacctctatcaatgaacaatggcatggtcagttaatatctctgtagcttgtggttggactgggaccccaataggtgccaaagcaggcagggtagggatgactgataagaggcaacctttactgactttcaacacatttttctccttcctcctctctgttgcctaagagctcacccagctttgttctgatgctgtgtctgggagctttgggagtgtccagggttcactcctttggtgaactttgacattggctcgtctctgagtcacctgaaggccaaagcccatgggcctgcggggccagacacatggcagcaggagccacagtagagcaggcattgtgatgacagcagctgaccaactgggcataaaatgtgtcccctctggggacacttgggggtgtggacttaggtcatactattaaaaaaattgaggcaatcaagcagtagatgtagacctatgataattataattaccatttagtgactgcttgctgtagggtaccatgccctacatgaattacagccattttctcatttcactcctcaaaagcaagtagctttggctggcacagtgtgtgttttgctgggagctggtggaagtggatgacactgggggaagaaaatgaaggaaatgagtattgcttggtttccagattgtgcgtagctaaaaaacaagaaatgccatataaaccaaattagaatttaaaaaaaaaataaagaaaagaaaaatg

SEQ ID NO: 34316 - DNA, 626 bp, Homo sapiens
gtaaccgttaaggttcctaataaaacattcacatcttatagaataagtaatggagatgacttatccattcaggggctgaagatcaagtttaattagcaatggccagtgatttcatcagtcttgtctatgaaatagaacctccagctcacgttccctattagtgggtgaacaatccaacgcttggtgaattctgcttcacaatgataggaagagccgacatcgaaggatcaaaaagcgacgtcgctatgaacgcttggccgccacaagccagttatccctgtggtaacttttctgacacctcctgcttaaaacccaaaaggtcagaaggatcgtgaggccccgctttcacggtctgtattcgtactgaaaatcaagatcaagcgagcttttgcccttctgctccacgggaggtttctgtcctccctgagctcgccttaggacacctgcgttaccgtttgacaggtgtacagccccagtcaaactccccacctggcactgtccccggaaatgatgagttcatgtcctttgtagggacatggatgaaattggaaaccatcattctcagtaaactatcgcaagaacaaaaaaccaaacaccgcatattctcactcataggtgggaattga

SEQ ID NO: 34317 - DNA, 904 bp, Homo sapiens
cttagccttatggttcaccctgttttttaagatcatccacgggcttcattcccgtaaccgctcttctagctggccaaggcggcgggaagaaaccccaccctcttgcgcaaacgcccagtagcggaatccgcggggtcgagggctttagtgtgcgcatgtgcaaccagagcggcggcgggaagtgttgcgcaggcgcatccgatcgactcggtaggtggggatctcttggagacggcgacccaggcatctggggagccacagaagtcgtactcccttaaaccgtgagtttccgacggtttgttccatggcgcgggattgtgagggattaggaacgaattctggatcgtgacttcggttttctcgccgtgcagttccttttcccgccccccttcggatccctccgacctgcggcgggaaagtcgcgcgcctgcgcactaagcatctggttcggtctctggcccgagggaagccggtccttcccggctgagctcgcggccagcgctggccggcggattcccattcattcacccttctcctcctccgcccagtactcgtggccagggtcgtatcagttctccgtcaacttgcttggggccttggacgagcctcctggcgcttcctgtcagtggcgaaaaggttttctccctcagttcttttcctgacttcaaaccgcccccggcgctcggcccctcccccacgcggtcccgctggctgtgccggactggcagcctcgccgtttcccactgcgcctgctgctgcgcgggtgcccaagccgggaaattctccctgcagccccctgccggtgtttctgataggtgaaaataaagcacatggaattccttagacaaggccacagtatgccctactgtggaggtttggacacatcgtgcgtttgaaaatgttt

SEQ ID NO: 34318 - DNA, 501 bp, Homo sapiens
gaattggttaattaacagaaaattctctattcattcaaggtatgcctaagaattataggaagaaattgaaactacactgttaaaaaatagactagattggggatccctaggaaattccttttattatttcaacacacaaccttagtagccaaagtcactccaactctcctcccctctgagtcactctggcaatcactctgtagttatttcaaagattgggaaattttctgaaggcaacatggcctgtcgatggcattgactttggctcccctcaccatcactctcattgttgccattagcccgtttttaaggccctgaagttggctgcccttgaaataaagtgggaaaacctgcatttgtgggccagcttggtccccagcccagttccccagccaaagaaagtgaacaatcctgtatttgtggcatcctgagcctgcagtgaccttccgggccagccaggatgccagagggaatgcacattctctgaaatgacagtagagg

SEQ ID NO: 34319 - DNA, 1180 bp, Homo sapiens
tttaatggtgctcttctttaaattactccatcagactccttacaattcccttagtagacatctttctttcttttcaccttgtatagagaagtgccctaattgttcctatagacactctgaaagagttatttatggaaggaagatgaaccccctttttatggcaggcactctgctaggcatatattatcttatttctcttccaaaatataaggagataggcattaccattcctgttagagaaggagaacctaagactcacagaagcaacacatgtagctgagaacttacatgcgcaggccctgtgtccagtgctttaggtgaaatatcctataggcccttaacaagtatttggcaaataaatgaacaaacaaatgaactcagctaatgaaccacaaactcaaggtgagtactatcatcatacccatttcacaggtgaccaaacagactccgtgttcatcagtcagactgcacaacatctactaggagtagtaattggaaatgggatttaaatctagccctgtctggcacaaagtcaagattctttcaatttcactatgctgtctctaaaggaaatactagaaacaaggtttctataaaccattgccccctttctaaatagtaatttaaacttttgtgggagcaggtacctttccctcacagcacagtcagaattcacatctgaaacagggaattagaaaatcacaaagcataaactggttgggagaataaaaaagaacatcatgaaacattacctaattgtttagtaatgttgtcatgcattgtccaaaattggcctggaacaagcgtacagccaaggagaggaacataaacagatcttgcactgggatgagcaatctcatttctagcctttctgattcatatgagagatggggacattcaaagtgaactccaggactgccatggaccaggcacacatactcagggaaagagccatcgaagggtcaaggctgaaagaatatttacacaagaactccagcagggaattaaaatgtaccgtatgtttttgcctttcaaagcatgattccctttcctgtttttgttattctgaaattaaaaacatttggccggtgtgccaggcagcaaaagcagcagacagcctaggtcaccaacacccctcatgccatgccagagaaggcaatcaaaacatctctgacttcag

SEQ ID NO: 34320 - DNA, 1933 bp, Homo sapiens
gatatttgttatttcaactatcaggagaagcaaccacctaattaatcctccgacaccccatgtagaattaatctttccctcatatgtattcctcacagcactttatactctgaagatgaaaggtaggaatttgggggaaataaagaaggcagactttcactctttctcacaatctgaacacagacaactcaagtttatatggcactttacagtttacaaagtgctttcgcaaacattatctcactgtgctgagagttgctcaccacctccacccgggaaagtgatgcaagtaccagaatctgaagacactcccacaacggcacatgccatttacacagcacggcggctgatgggatttccatccacgggcttaaatatttcaacagaacttgaaagaaactgctggcagtgtgacagctgggaccagtgtcaaggaagttctaggtgtagcatgcttttttcagaagggataattaatcagaggcctggcactactataaaacagacttctgccttttccattttgaggacaggatgccagggttcaagtccacatggaagtctcactttggagtaaggaatccaaccagggggtcccaagactgggttgatactgtccctccccctccccacttgtgcaacctcccttgtgctgaggtccgcagcacacactggggcatcatggctctggccaccacagcacccccagcaccaccccagaacaaaggggaccaaagcctctgtttgtcggctcgttgcgagagagcattgggtttgcactctgcagtctcctctaattcccctccccctcagagagaaaagctcaaggctccactgactcaggctgctagagcagcctccctccacatctgctgagggttttgccagatgagcaaatgaggtatgcacaccgtgcagctgcagccctgcggatgcctcccccacatcacaggatggaaaatgatattggaacggcaaggttgaaatttaattaagaaagagcgtctatgggccagggacaggacagtctggaactcaagagactagggccctcctgggattgtggccggcatatccagttcataggtgtgcctggcttgtatctggcacatagtgggcatatggtataggtttcctgaattaacaaacaatgatgtgagatttgagacaaataacaaaatattcactcatgtgaagccactaggaaaggtctaattgttcaaaagttgatgttattaagggctctagtcccagaagccattgtcactaagttgaataagctgaccacttttgttgtgtgtggtttctcccccgctccccaatgactttccgaatgcctggcatcaaaacttataccgagtgccaagtagaaaggaaaccacaaaggggaattcccgggtagaaacctggcaagtttgggggcagggggagtcacatgcttatttgtattttagggaaagattgacaaatgactttgagacacagaaggatatactctgagagcaggaatgaacctggggggtaatgcaaacacctcattttcctgctgtggaaactgaggctctggtggtaagtcaatgttgcttgaagcctcgcagcaagaccagctgggataagagcaaaactcttaaattctttcattctgggtatatagatgagagcagttcccaaacgtcagcaagcatcagatctcctaaagggctgattgaaacactgactgctgggtcccacccccagagttcctgattcagttggtctgggttgggcctgagaactggcatttccatcaagtccccaagtgatgcggatgctgctggggcaaaaaccacactctgagaactgctcgggttagagcaaccaggcctcatggcctgcgatcgctgggtacaagaaaggtagagccaggtcggattctgggaagtgggggatgaag

SEQ ID NO: 34321 - DNA, 765 bp, Homo sapiens
acctcttccctttgttatacaagcagatcagcgtttttaagcagcggattcaaggaataatcccaagcctagtcctcccagacaaaggcaaaactaccaatgcaggatgtccctctgaactctgaaagaaccttgtgaggacggactgcattgcacattgagtaatcgtaagaattatcactgctatttccaagaaatctaaatcgaagaccaatcttacaatgaatgtatttcaagtcaagtgggaagccttgatgaatgttctcgtgggcttataaaaagcttcaggatcaagacaagtgatcccaaagtcctgctagcaactgatcacgactttcaggtcttccacagttgcagcatctgccaacagagtcatcacaatagggaaacagcgagagtcctcttggtttatgttcacctcagcactgagataaaaatggccaaaggttgccagcctttctatcacattgctctatttcataagagtgagatgaatgtttgtaacagtttattgtgtaagacccccaaattcccatagataatgaagtcaagaggctgttaaactgatctaataaaactttcaggatgacgtatgcaagtacctcattcttgctgaatgtatttagaccactgctgacctagcatatcatggtatatgtgtaattaacacatccaaaggaggaaaatcatcatcttgttgctgtgctataatcaaatttagttgctggtgaaaatatgtatgccatttttgttggctagcattta

SEQ ID NO: 34322 - DNA, 918 bp, Homo sapiens
tctaaccttgttttgacgtcgcctgaataagaaaaaaatcctaggtcattttcctgccaaaaaataaccatgcccacctaagtgtaacttctctgaggcttagctactcatcaacactgaacttccaacaatgtttatctaattttttgacttttgcactgtagtaaaatcttcctttcacttgtactaaaaaggcatttttatcaaggctgtcaccaaaacccacaacagtccagaggcctttgtcccactgccagcacagttctgaatgtttagacgagaaaccctggatgttctgcttcttgtttctcattcatgttgtggccataaactacagcaaccctatatacattatacacagagtacgtttttcagagcggaaagcgggatgtcacactggtgcattccagaggcaagaaagcaaacagcacaaatacagaagatatcaacggcaactccgaattgtgtcctgaagtaattaaagagcgatgccgtgatgaagctggtgatggggctgattcgtggaggaggaacaactccctctgctccctccaggcattgttgtcctcacgggccagcagcaataagcttcatacactcagggctgaggaatttggaactggagttaactgccactcctcaggcacattccaataagaagaaagcaaagctgcagtgaggtgtccctgactgcaggtcagtggaaattttcagcttcagcaaggagtgagctagcactcccctcctgactgccagctctcctgaccctgacaaggctacagctgagttttagaaggtgttgttttagaaggtattgttcagatgttatttccatctgatttgcggaactgtgaggcaggctacggtgacctctacagcagaaaagcggaaacctcagagagtctaatggcctaccca

SEQ ID NO: 34323 - DNA, 1346 bp, Homo sapiens
tcatgggatatccccaaggtatatagtcactattttttatgtgtaattaataagtaatttgtatgaaagatattttaagaatatctaaatatactacttcctgaactccctccatctctgctagatttagcatctgttgataattcttgcctggtcaacttttattatgatggttgcaaaatgatcattttctaactcctttgctccttctagattttctagttggcattttactataaagatgagcttttccttttctcccttttattcatttatgtacttattataataattgtattgactatggattcttacattattcaacaagaacctttgagtttttagaagtactcttcaaacacaggggaaagaaactacagatctggattgagagacattaactgggcaaagtttattcatgaggcaagaggaaaactattaactggggactccacttgttttggatgcttgtgggcaagagaggtttaaggcctcaggcaccgcagttaggacattagcctgcagctctcgtaatagacaatgtgagttacaactaccaagttgcagtgctgctcatcatcagacatgatatcacaccaaaaaaattccatccaaacaacccatcgatttctccacaactagcacacttgaatgttctggcaaactcaaagggacatgatttacaaatagtaggtaatatttggatctttcgacaagagctgagttccagcttgtttttttaataaaatacaaatgacttcattttggagctcactgtgtcactttctcaacaaacagatcctcatatcaggaattaggcctgtgttatatacaaatagtatgggtccgtgcatattcattttgtggtcagggaccacacacccggtagccagttacaatatttacagggctcctgatgccacaaggggggtttcagagctgaaaccaaagctcaggccacacagagtatgacgacaggtcctgctctaatgtgcgcactagaccccagcctctgcccacagaagatgggcaggtgtgtctgctttctgtgaatgcttatctatgtcatcatccaaatatcactaagtgcatcctccaaatttaacactctttggactctggcattatttcagtgaaagtaagcctttatgaaaagtttggcaaagtttaaggaccattatgtccttgtgctaaggatcagtttgggggaggtttaagcacttaccaaaaacagtctggagaccccagtggcaagtctctctgtcttcagatgccacaccagggggtgtggggagttgagcaggaacacaacagacttgtggtggatgtggactgaggagatggga

SEQ ID NO: 34324 - DNA, 426 bp, Homo sapiens
gcagaaactgagtcacactcatttctgcatccttaggcctagcacagggcaggacatctagtaggcagtccacaagttctctgaaagaaggaataaaagaaggaacgaacaaaagttattaatgaaatgtgactaggataataattacagagtcatattgacctgtttttctggccagaacaagggggttggggtgtatatagtaaacagaacattaacacacagtcaagataagcagattccagctactgaaacaaatgacggagatgcttcctggaaggtatgctggacagcatgccaaggccactcccaggctttgtaggacaagccaccctgatcatcatcctctctgtgtgtaagacagcgtagaatggcacttgggccatccatgggaaccataaaaggcaaagaaaagaaaatagaaaa

SEQ ID NO: 34325 - DNA, 659 bp, Homo sapiens
ttctaagctcttcacctatagatgacagcccagctattcacatttaactcttacctgatggctgtttcattgcagctcaaagacttacctgcatatgattaagtcaacacgcaacactgggtgcaacatctaagcccacatttaagcaaagtaaagagcttgagatcatctaaatgggagcgggagcaagggagaactcactatccactgtgtttttgttacctttggcaaattctcaagggtagggggtcaggactgccagtgcctggcactgtgcctgacacattacaaacaggtgcttaataaataatgatttcattattgaataaatgcctaagccttgggaaagcccaccttgcccagagccactcagagtgcatgtcaactccatctataggaagtgtgttgtgaattcaaggttaggttctaccaattatttcccagctcatgaccttgggtagaatacttaacctctcttagcctcaatttccacacctgtaaaacagagctaacagaatctcccttccaggggtgttgaaaaaaacaaataaaatgccaggttttgtaattctctggaaagaagcctaccagcgtttgactttggctctgatcagtgtagtgccattacctcctgcctacaggtccctggattttcaagc

SEQ ID NO: 34326 - DNA, 982 bp, Homo sapiens
tgttacttcctttccgtgatgtgacagccccaaaggatgagcagggagagacaggcccccattatcctccacttcttaaggcttctttgtatgcacgccgcatgagataattcattaacgaagaaaaagttactggttatgataacacagtccctggcacacagtaagcacttggtaaatgtttactgaatgactacaggaaatatctgagtgctggacagaggaacaaagcctcaactctcccaggtttacttttttagccaacctgttaacaacaataatagtgcatgtcatcaaagagctggaaaggagctggcttcagtaaggctgcagtcactcactactcagtgaatgaatcgatccattcagtttctctgacccccatccagaatacaaggtagttatggccagcacaggcataactcccaacggacttgttattaaccacactgggtaactatgaatggatgcagagacaccagttcagttcagctgcagactgtccggaacattatcttggttaatcatctactccagggtaccggctcttcagatcacgctgaggtctgcttctcaaagcctgacaggatcagaactgtacaacctctcacagtcttctttatcccttccccaagataactcgtcatgatcgctatagaataaacctgaaagggtttacttactaccctaattacaattactcagggtgaagcactggattctcctgcaccatgaagaactttcaaatgtaaccatgcacacctcctcttcccctaactccacacccccgtcaatattttggcttcattaactagtcaaaggaaaaagagtttgccaaatggcaaactcatatttcacacaggtatctcagccaagacaggaaggaaacatcaaatccatagcccagtgtataaatgttcagcactgaaatgaatgaaaacgaacaggacacttgtggttacgctttgacttaaatccttag

SEQ ID NO: 34327 - DNA, 2130 bp, Homo sapiens
taattctaataagacagacatgatgaatcttgttcacatttggacacactagagtcttcaaaagaaactagtgaaaactacaaaagcagtgctgaaagaaattaaggaaaacctaaacaaatgaatgggtgtaccatgttcatgaatagcaaaacagatactacaggcaacaaattatgagcacttttcattctatcacttgtaatcctaacttctctttctccctttgaaatatttttaaatgcaaataaccatacttattttagaataaccttgaatttagttttatctttttgaggaaaatcatttaaagtcttcaatttaactatcagttgtaatgttattcatgatatctcacaacctaactgggatatacaagtaggtcttgttatacagaattacctctccaaaataaaagcataatgagaccttttaaccataataaagcagcaaagaaaaatcatagtcttttgtcagtacaaaggctttcataattcctcatagctctcagatctgtgtttctatcaactcaaaaagttggctgggagtcatatgacagaaagggttaaaaatactaagctgctactctagacctgctggctgaggagcaggcaggttgcccagggtttcaggatagcccgcctcacacagagtaaacgtaggggatgctgtacacccaggaataaattcctcaaccagtgcatactctcctgaggcattcttgtaagctttttccaagttgagtaataaacagaaataatagatttttgggggcctttcctgagttcagggagatctgacaacatcacgaaatgtttcggcacagtcctctgaaatttttcattagaattcttttcttctgaatcatgttaataaagtaagatttggtctgggatttgtacataagtacttactcacatgttgctcaagcccaaaaggacaagaaaaagacgctgaggcctgtcaacaggaggcagggccaggctcaggaactggaagattactggatggatgttttcaaacagagctacacacagctcccttatataacactcaattggcttttagataagtctgaaatatccttctatactttgatcttcagctgtctccgttgccttcagagtcaacagaaactggcacttggctccaaaagcctcaaatctctctcatctataagggacagggacttctattatttgtctacaatttgtcaagctgagttaattataggtgttatcattctatatgtcaaatgtagcaaaataatgcaaacctgtttacctgtttcttcctttcctgcatgtagtataccctgaccttaaattggcatgcacttgatttcaaatgaagatttttttaaacagcatcttccaactgcagtagcagttggaaaattcactttttgctgacctgggccacctaaacagaggacatgaggaacctgacttgttttattttaagaagaaaaaactatttaaagccctgatcctggctcctttgaacatttaacacttaaaacctgaattgttacactacaaactagagttccttttcctctatttaagaagaggcccttgcgaagaatttatttagttaatgaaagttaaacaattgtgtttctctcacaaaacaaaaataaacaaaacctcttgaagatggtctctgggctctctaggtctgcaagtgtccatatgagctccctcacggagagcctagagcagtacactggcagtttagaaaacaatatagccacaagcacttctccaaaaagaaaagcaactcccctcttggcccaattccaaaacgcaattgagccgggtaaggtccaagctaatctctgtaccgtctctctgccaactttctcctgcaggcattaggtttttcagcatgggctttgcaaataatctaacaattaattagtgcttttgaattcaccccataccattaatggaacactgccagacagcctttgatagggtatttctagagctaattaagcttggcaaaacagaggacacaaacttcctggcactcacaagggccaggctgagacctggcaggtgacagacagtaaagttgtccttacagataatcctggggtgatgaaaatggcaggctgcttggatc

SEQ ID NO: 34328 - DNA, 1129 bp, Homo sapiens
cccgcaggggtcagaaggacccgcggagaggaagagtgagggcgggcgtggagaattcctccccagcactgcgcatcgccgggggcactgcctgccccgtgcggccgctgcccacgcaccgctggccaccggtgcctgctccccggagggtaaacaccgccccaccagcgcctccctcccaaggccggaggtcctggcggctggagcgaccctggccggtaagtaggcactggcagcccgcgccgcgccgacgggcacccgcgcagcctgcagagcccacagcccgggcgggctgcagcgccgcggggctgggccggcacgtacctcggaggcggtgtgtccagcggagatccacccgcagcaagttggaggaaagcggcggcaagtttccccgcccagcgctcggcggcggcgagctccggcagctgctgcgccgcggcaaaactacgccatccggacccgctggggactctcacctcctgcagggagctccgggaatcgcgcagggaaagtggccggggcgcgagagccgccgactgccctccttcactcgctgggaagaggaaagtgccgctcggcgtccccgaaaccctcgattacccccatcaggccgacccggcgcactcgccctccctcgcacacacgcgggcggggacgggcaggacgccacagcaatcagcgcgcggggggaagggcgctcctccgccggccccaccgggggctctcggccgcccagaaactcctcctcccgcctcccgcctcccgcctcctctctcctccccctttgcctccgcggctgatggatgagccccgaatgctgctcgagcctgtgcttcccttcgggacgaggaggccgagagagaaggggctaggggcgcggccgggctcagcgtgcccgggttggggcggcccctgtcctgggggaagcgcgagggagacgtgggcacgagctgcggggactcgctccctcaaacgaggtcctttgaactttccagggctccctggaagagttggattttcatttggttccttggtctttatataaaagttctgaaacctcagataatctgatcacagcctcttgccctctccccagcagagctcccccatgcacacattcattctgtcc

SEQ ID NO: 34329 - DNA, 545 bp, Homo sapiens
attatggggtaataggggaatggtggggagtgatggtatttcagacaaaggaaaccatatgaagaaagtcataaaagcaaaaaccaatatctctatttgttcacctatttcaacctagtgctgcagaggcagtataacatggactctggggccagactccctgggctggaatcctggctctgctgtttgctgactctgtgacctttggtacttcaattaaccttgctttccctccatttcttcatctgttaagtgaagataataataatatctacttcatagtactgttttgaagatcaatattaccatacaagaagcacttagaattgggcctggtatgtagtaagaatggtatagatgttagttctttttgttataaagcaaatgacagagtgcaaagtaatctggctggaagattgggcaatagtcaaatctttcagatttttttctgctagaataataagctagaacttcatgttatgggtaatagggagtcaagaaaggattttcagcaacgaaatgacatgagtttgtgtctttgctac

SEQ ID NO: 34330 - DNA, 1660 bp, Homo sapiens
aaatgtaaagttttaaagttgaaatgttattactgaatcttagtatgtttgcctaagaaaataaagtgtttttttagaagcccttattgcatgttttaagttttctaggagcatagttttgaaagctactttgaaggaaaaaaaaacaaaaaaaacctctcgagcactcccaagaggcgaggcatatacgaactaaagggcttttaaaaagcaaagcacttcttttctgaaaaaaaatttccaaaaggtggacctgaaatcaaaattctaatcatcaggggatttttcatttttaatgtctcacctcacaaaaattggggtgcaacacaagcttatctatagggggtgaagattcagatgccctccattccatttctctctaggagttgcagtccccaaagtgatcaatccagctagtgaaatcactgtatcacacggagacaagacaacggcggccttcaggaggagaccatcgcttctcctggcggcaaggctcggccccaagccctcagtaggggcgcgagtcagcccggtcctcagggcagcgcgctggaaggcgagtgaacaccccagcgcgcgtgcgggctgcatcagaggaagccatgtcttccgattcctgctcgcctaggtgggcaggctccaccacctcgcgtggcctagtcggcccgcagcaccaagtccgccgcggctcacggccaaccgcgagccctggccaccctgaacctctccacaactccacttaccggccagaaccctcgcctctcccagccgccgccacctcctccggcgtcttagcccgctcttctggccccgccccgcgctacgcgtagggaggcggggcctcggggcgagacgccggagcgtgtccccgtccggcagactactctcccccatggcggacttcgctgggccgtcttctgccggccgcaaggccggggctccccgctgctctcgaaaagccgcaggtaggagcaaggatctcttcccacttttggaccctgaaagctgggccccgatctcgagttatagaccgcagcgcgcgggcgctcctgaaaggctgcttcaggggaggggttctcccaggtagagtaggccgaaagcttcccaccgccgtccgcacctcctgggaaagatttcctggccgcccctcacccctttacgccagtgttccaagatttccctcacgcggactgtggccccagcctctgagacaaaggacagtggaggccccgggaacccaggcctggggtccccgggtttcggggcaagtgactagggcagcgttggcagctggccttgaacctaggaccggtcctcctttccagattgcttgggtgcccagttctttaaggtgccggactcccctcttcccccagagaggacgtttggcagacggagagaggtttcccctaaaagtacccagatctcagattttcaggagtggttaattaagcaactatgatacagaagaaaattcaatccccaaagagatacattttaaccaagaaaaattagacagtaatcaatttgcaaaaacaaattgctctcccttcctatttcattttgatttacacacgattggacataaaatatgtggaaaagaagaaaaggtggtctacagtttgttatttgtgtaggaatctatcttgtacctaatgtg

SEQ ID NO: 34331 - DNA, 1065 bp, Homo sapiens
gtgaactgacagtcagttcaggaggagttaaaaagttctctgggcctggtttaagatgctcattttcagacattcttggtaaaatctggagtgcaggagagatgcagctatagacccagttaggtgacatcagcaggtcacctctgagcaggtcatagggtaggagagaatggggcgtggtacataaaggttgtggcagggtcacgggcaccatcctgtacacagggtggggaatgggcagggagggggtagggacgcaaaataagcccctcccccaagttgaaggtaacctctgaattcccacggcagtgcttctgttctcctgtatctcttgccccatgcatgagggtaggagttggtctggttcatctttgcttcctcaacagtgactgatctgtgccttgtgccaaagcaatattgtgtaattagaggactctggagctaggctggctgcattggaatcctggactttctactgatatttgtatttcacagatgtttacctcgtttcaataatgaagacattgaggtaaaatgacttcttcagttattcatgcattcattcaacaaatatttattgagagccaaggcactgctgggatagagataaaaatctctgcactcataaagcttgcattctggtgtggagataaacaataaaccaacaaatatgtaaaatgggtaggatgtcagactgtaatcactgctatggagaaaagtaaagctaggaagaggctttttcaacggaaggatcagaaaaggcctcctgtgcaggttgagcagagacctggtggaggtggggagctgccttgtggtatttagctgagcatcctaggaagggcagggtcctgatgggagtctggtgtgtccatggatcagcaaggaggtcataattttttgttgtttgtccaggattaatcaatacaaagcttgagtcccagtctagtgctctagtgctagaattttacgcctaaacattttcttatttcatgggcgctgcaaattttataaccgcaggttttactttttttccttctaaatatctttatttgaatatctttagta

SEQ ID NO: 34332 - DNA, 2002 bp, Homo sapiens
atgtaggttctttataagtgataaagaaatctgtgccgagaaaatatgatcacctgggcaagtgtctgtgtggctagaggagacaatgtgctgtgtgtctgctttcttttagcacatcataggacactggtaacttaaaaaattacagttgatttttttttacacttggttttaaagagacgtaacaagttatccttcaattttaacattggggtaatggaattaataatacaatcttataattatataatgctttacagttaaaagtgctttcatgcatattatttcaacttaaaaaaaatttcccctgtgtgtgactggaggttgcactgtgcagacaactaccactttctgagattcaaaagaataagaggaagggctgcattgggtattttgaaagacaatcaatccacaacaaagtggaaaaaagtcatccacacaccaaaaaaaacccctaaccaaatgaactttgatcactactagacagggtttaaaccattgaagtgaatcatgtgacaccaagtgaactgcaaaacagttgcagtaagtttccaagactgagtcatatcagattataaaagctcctattcgtacatttgagtttgtataattaatctttataaaacaaagagctatagctttttgagctaaatgtagcatttctgtaagtgatatgtaatatatacaattttaaataacaatgtattttacttttcatggaaagatctaataatcacatagtttgtatttctaagttctagaggctttacttttttttccatcctcagagtttggtcagtaattttgttggattccttatagaatacctttaatagttttctgttttcaaaatctaaaataaatgtaatgggagatgatatgcaaaatttattctcaattatcagcttctttaaacactgaattgtaaacatgacaaaggttagactagtaataaccacacaaacaaaatgatttccagagaatcagaacaggaaatcagtaaaagtgatcgactggaggtcatgatttcttcattactttattacacagacaagagccaaaattctaatctacagtacttaaaaaaaaaaaactaaaaaaaattcaagaattttattgaaataatactaggtacataatgctgaaaatgtttttggttttaagctaagtaaatcataaaaaatataaaatttagaatgaaaaaattgtagatttcatgtaaaactgtatataatgcaatagttaaagctgacgtttttagaaggaaaaaacatgcacccacattaataagtaaaaaaggtagaaaggaaaggaaagtttggaatagaagaaacttacaactgcacactttttacctgagaagaagagagggggagtcatttacagagaattcttagtctttctacagtgcatacttagatgtattcagtattgtgggcaaacaaaatgaaactgccactgaatgtcttcttcctggcagctgacacatcttgataaaattgaaaccattaacattatttagaaggtactctaaggtcaacgctgatgaggctacgaatatgtgaggttctatgtaaatttatgaccaattacaggaaataaatcacttcacacttgtttcactctgaacttttaaagctacatcaaagtaccatgtagatttcctttgatttaaccttcagcaaaatgaagcatttaaaaattcaaacctttagcaaaacaccctcatgaaaatgaagtacttcttttctatttggattggattctgttcagaggaaattcttgttctctaaagctatatcatgtgttttttcagtccatcaatcaattaaccaaatatgcacctagtgtttaggtgacaagtgttgtgatgctggaaaggcaaagacaaatgacaaggctcctgccctcagttaaaaatctgaagggcaagacaaaaaaactaaacagctgattccaaggtggcacactgttaagtaaacccacaggagaagcaatacac

SEQ ID NO: 34333 - DNA, 1874 bp, Homo sapiens
ctggtacactggtgaaattctactaacaaaattttaaaacaaaaaaagttacttacatcagctcagaacaaagattaaaaactaccagcagatcacttttctttaacttcagtaagcactggaattcattctttcggcaaagaaaggagtttattattcaacactgtaacccaaagaaaagataccacttcaagaaaatacttcttttcgaaagcagctctaccagcaatagataggaggaaagcgaggaaaccattccaaaaggcttggtttaactcttgggtgaaaggatgccaaatgagatgatctaagaagccccaaagacagacagacagacagacacagggaaatcacagcaactcttttgagtggaaacaccaacaccacaatccaacctaccggaaatcctgaggttaatttgaggcttgccccactagtcataaggtgattcaggaatggctacaaactcttctcaagttcattctggacctggcacatctgtcttgcccatcagcagcctggagacacgccatgcgcagaatcccggaggccaagtaaagacgccaactttgcaagtcaggggggcgagtgctctcgcccctcaggtccccaaagggaaccgacttctggcctcgagggtggggtgcagggtcagtgtcctccacgggatttacgaggacgtgcccccgaagctgctccgtccctccaccgccctgggacgccacagttagacccgccgacgagtttcttccccagcgcccacgagaaggagggctgcgggcggcggcggcggcgacaggcgaggaagcgagtgcagggaacttaggccctggcggggccaggcgcgcccgccccgctcccacagcaaaacttgcggcggcccccgcccgccgcgcctcggcccagctgtgcgccagcggaacacggactcaccgcccgcccggcctcccggcccgcccggcctggcgcagcgcccctcaccttggaaacgttgagtagacttcgccgtaaacattaacttcccatccagccggcagccgcgccgccgcgtctcagcgcctcggccccgctcctggctccacgggtcgcccgtcccgagttcccaaaagcaccacgctcactcagaagctcagggccgcctcgcgaccctcacctacccctcccggcaccgccgctgtcggaactgcagccagccccttgccagctggccagctggttcctccggggtccggcccggccgcgtcaggagagcccaaggcgcaggcgcgggagggccttaaagagacccggcagcctctaccgcagaatgggttggagcaggttaggggccgggcgggccggccgagaaaaggagaaggcgaagggattggacggagtgcagaggaggcggggaaatcgctctcgccctccgcctctctttcaaagcaccagccttcagtcctgcaagtcgccgacttccccggccactggaaccgccccttccatgttaaaacggtagaagacacaccccctcgggggcccgaagcgaccccgagcttaggactgcaggcctcgcgctgccgcaccgacgcggagcctgactttcagggccctggcacgcggtgctgacgcgcatgcttcggaaggcagccccgagctcccccagaggtggccttagggcactcgcaaaaacaataatcaacgcgtaaatgacacttgtaattgtaatgtactcttacacgtgtcttcgcattgggtttatgcagactactgcagggggcagaacatgggcacgaatacgtaagattcagccgggcagccctccagcgtcaacgaagacattcttagaaggaaagtactttgtttgggacggaaacagcctattaatttctggt

SEQ ID NO: 34334 - DNA, 1138 bp, Homo sapiens
atcattgctactgatgggtcaagagaaatgaccattggattcagcaacatggaaatgtcaaccaaaggaaaaaaacactagagaaaatgatctctaaatatgttgagtttacgcaggaatataaataaggattctaatctggaatgcacagaatggcaagccaccagtgcattccgtgagagacgagtgaaaggagcttttattagcaaaatagagatttacataaactgcctagaaacagagttcattggttccagaggttcaaaccagagttattgtcagttctttggtggagatgccgttgccgggcaagtgttctttcgagaacatcttatctgagttactgcagttctaaagaatgtctagtgataaaccttatcgaaacaggatgtgctggctggcctagtggctcacgcctgtaacctcagcactttggaatgctgagatgggaggatcacttgaactcaggagttcaagactagcctgggaaacatagtgagacctcatctctactaaaaatcaaaaaaagtaggagatgcataaaggatcagaaagggtctttagaaagtactagaggcctgtgtggtggtttatacctataatcccagcactttaggaggcttaggcaggaggatcctttgagctcagaattttgagtctgcagtgacctgttttgccacagcactccaggtttggtgacagaacaagaccctgtctctcaaaaaaaaaaaaaggggcttggaaacagtttttgtctcagacatgtaggcatgaactgcctctactttggggcttcccagccctagtttgtttggatataacaaaagtgatttcatcctgctatctgcaactttcacagtagtcattggtgaccatgataggacctattttcgtgcaatggtagaggcaaaagcctgactggagtgaatccaggagaaaacaggaggagagagtagagtccaaggaacagacaaatctttgaaaggattttgttgtacaggaaaagagaaaaatggaaggttagttgtaaggaagagtgttttttgttggtttgtaaagtgggataaataacagcatgtttgcatgctgatatggtttggctgtgtccccacccaaatctcaacttgaattgtatctc

SEQ ID NO: 34335 - DNA, 1797 bp, Homo sapiens
gtagcccagagaaggcaagagggctcccaagcaaacttgtcctatttaattttttttttttttcctgcttagaaaagcaaaatgcgttatgaacaaaacaaaacaaaacaaaacaaaacaaaacaaaacaaaacaaaacaaaacgctgtagcaaagaaagcgaaaggctccagtaatcctccctgctcctcctcaccgcacggatcctgtgagataccccgagcattggaacctggagagcttgggcaggcattcaccctccttccagcagggggcggaacgtaaaacgccttgtggccgacgccctctctctttcacacgtcactggcgtgaccgtccgcgctacatactgcgcctgcgcaagggctgtggcccttttcccaccccctagcgccgctgggcctgcaggtctctgtcgagcagcggacgccggtctctgttccgcaggatggtgagtggatgcctcggtctcggggctttagatgcatggaggttcccttttcttgcccgtatgccagcctagggcccgtctcgcgcgtcgcaggggccggatggcgttagattgctagctctgacttggtcgaggtgcagttcccagcgtggccttaaatggctgccgcccggtgcgcgaacttggggggaggggttggcgaagaagggttgcgtgagcttggacggcggattggggagaagggtgagtttagtagacagcctgagtgcggatactgccgtctagtgtgagggggcgctggcaagcggccgggcgtgagaggtcgcaagcagtcgacctcagcctagctggggaacgccagaatggaggggggctgcaggtcctcgggtcccactcgacctccgagtaccgagtacttcgtgggttttccaggagaatgtcggagccggcaagtcttagatttaggaagcttgtgcccgtgggctgagcaagtggcttttaagccaaaattgtcagtggagcttggaggccgaggggtccctgggccccggaagctcctttaacatggaatacgtgcctcctgcctcttcctctagagtccgtcgccggatgagtttttaattattggggtagggccccaagggtgggatgaaatgttgctttagctgatggggaacagtgctgttttagtgggggaattactgctgaatgtgctcttgcccagttaagctttgtggcaggtaatttaggcttttgaaaaacataacatgggaagcgagagaggtacgtagttgttatttgaggctaggttttcgaagtgggacatagcgtgttccgaacaaaccgacgtttggcatcactgattgctgtctggagcagtgcttcgcaaaagtttggcacaattaccggtgctggtccttgaagaaacaaatatggaaattgaaagcgtttaaaaccttttgaaagcaatataacaataattttatacctgttaaatgtaataaattggggcctgcattttgtatgtttcttttattccatatttctctaaggattcatttttattgttttatgaaactactagtctgtgacatggaaggtagaggaaaaagattcttgaccctagttgcttgtgaaacctgggattctacaagtgacagttgtctgtttactcttgaagttcaagtgttactttgttacatggttaatttatgtcaaaagtatcataggctaagacatcaaagttttaataacattcttttttctttaaggggtttgttaaagttgttaagaataaggcctactttaagagataccaagtgaaatttagaagacgacgaggtact

SEQ ID NO: 34336 - DNA, 920 bp, Homo sapiens
tagtgataacaaacaatattaatgaaagccaatatttattagtgctactctgtagaggaatgttaaaagcactttctatatattaatatacttaatcctcataaaaactctatgagctgatgtggtaaattagtcaggagttggaaaactatgacccatgagccaaatccagtctgctgcttggttttataaatatagcttattggaacacagttactctagttgtcgatacattattatctaaggctgctttcatgctataatggcagagttcagtggttgtaacagagacaatatggccaacaaagcaaaaaatatttactatctggctctttaccgaaatagtttgctgacctctggactgttcagcaaatactcattctctcccaccgcctcaccttccctgcctcattggtgttgggctcagccatgtgacttgctttagtcaatgtttgctaagtgcaaacattagatgcaaataaaagtatgcaattgggccaggtgtagtggctcacacctgtaattccagcactttaggaggccaagcaggaggatcacttgagcccaggagtttgagaccaactagagaaacataggaagaccccatctctactaaaaaaaaaaaaaaaaaaaaaattagctaggcatagtggcatgtgtctgtaatcctagctacctgggaggctgaggtgagagtattgattgagactgggatgtcatggcagcagtgagctatgatcacaccactgtactctagcctgggtgacagagggagaccctgtctcaaaaacaaaagcaaagaaaaggaaagaaaaagaaaactatgcaactggacttgctctctttcatgtcagatactgccagtaaaacagatccctactagtctactgatacacacaaaaataaatgatactgtagcc

SEQ ID NO: 34337 - DNA, 1592 bp, Homo sapiens
cagggtagtcagtaagatagtgaaagcaagtcatctataaaaggtacaaggaaagggaccaggagttctatcctcagcccttggctctccacctaaagaacaattacctggaaagccctcaagcttgaaggtcatcagaatgtgctctaattgtttgcctcagattggaggttactgcacaaagaaattaagacctcacatttatttatttatttttttttcctggtagagcagtcacaaagaacttaacgtctgtttttaaaatttaagaattttaaatctaaaaaggttagtattttaaatgttcctttttacattgtttaagctaatactactatttaaataatatttatgttctctagtttaactgtttaattaaaatcttaattgtttttggctttcgtttcactattttgtatgcccttttgcttagttaacagcattttaatcaattttcctttatctatagttttattgaaaaatacatgctcatttcaaaagtagaagatttgaaaatcacaacttagtagtcatttaattttttaacatttgaaatatttcttttcagtttttttggagaaatttttcttttcttttttttttagcattattgtactgtaatcttatttaattgaacttctggatcttgtggtaaataatgcctcagggagagggttttccagacgaattatttgcgcccaactacacaatttcgtccggggagaataactcatgagggaactgtttgcttttaagtgtaatccagatgccaacacgacacacatttctgcagactcatccatggacacggttcaatcaatgcggtttgctaagatgaggattctaagaactcgggagggccctatacttgctggcagtcctctggaagtctgaaggtgtttagtaacataaatcctattcttaagttcattttgatttgtctttcagtcaattaaaactttgttcatttgttttagttctccaagaaggctatgtgcacagcatattttgaaccctggcatacatgaatgtctgtaaccttcgagaatgaaacaaaatgcagccagtacaacactctctagtcacaaccttttcccctgaaaactttggctcacaagttctggcactggtgctgtagaaaagtctgtcatccatagctaccatctccctcacagttttcatctccttttttttttttcctctgcattctgagaaaatttctcaaatctgttttccacatcattgcttcagtacacctcagggtgaatcctgcttttaacactgtcttcagtttatatcttcactgctatttcatgtccagtttacctgtagctttccatgcttattgttcccttttcatctcagcctatttgctccttatactttttgtgtatgtatgtttgtttttgtttttttgagatggagtctcactctgttgcccaggctggggtgcagtggcacgatctcggctcactgcaacctctgcctcctgggttcaagtgattctgctgcctcagccttccgagtagctgggactataggcgcccaccaccacgcctgggtaatttttgtatttttagtagagacgggat

SEQ ID NO: 34338 - DNA, 1517 bp, Homo sapiens
ttctttttcactaaactgtgctctgcaccacaaaattaaacagacatccctagggatacagatttgccaagagagttcctggcaaaaataaaacctggcccttctccagactgctatacatggacaacaatggaagttctacagatggagattgattgctggctggctggcgggcctgtggttacttactagcgtcaagatgaagaatattaggcacagatcattttcatgtccaaagacttctgacaacaaatgtgctctgcctgacttctcacattcagcaacagtgagagttatttactgaagagatagttctaattctagctctattcctttatgtatcagacaagcaaactgaagcccagcgaaggtgggtcatttgctcagaatcatacagctagttggtgacaggacaaaacacaggtcttgagattcccagttcaatatttccacctctctattgagcaacactactgtctaaataatactaaaaagaacgtgttgctcacatcttaaactcttttaatctaagtcatttcataacttgacattcccgttcagtgttttgctagaaattgcaatatacttttattttgtgagatactatatattaatataacagttttttaaagaactatgtattttaagtcccagagtcaccaaaataaaatgagattagaaatggttttaaaactattaaaacacaattaataaattctgaatctttaaacttggggagattctttaaaaattacggctcaatatatttaaaagcagagaggggtactggaatcaaggtcacaagaccaggatttaagtgctatccctgctactgactagctgcgtgacctgaacatgtttcgtccttatctataaaatcaacagggtcaatcagggtcactgaaattagttttatcatttaaaatacagttccagacaactcaaggataagatctttatgttatccttattatattataacgtgttcaagtaactgagcaaaaaaaaaaaatccctcactattctataactaactaactaaagacattaaaacacaggaaatggctgggcatggtggctcatgtctgtaatcccagcactttggaaggctgaggcgggaggatcaggagttcacgaccagcctgggtaacaaagcgagaccctgtctctacaaaaaataggaagataaaaattagccaggctggaacatctactctggtggctggaacagctactcaggtgtctgaggtgggatgatcgatcacctgggcccaagagttcaaggctgcaatgagctatgatcacgccactgcattccagcctgggcgacagagagagacttcatctcaaaaagaaaaacaaaagaacaacaataagaacaacaaaaaaacctcacaggaaacatcatctctactataaaaaagctgtagatttggctctgcatagagtcagcaagaaaaacaatgtcagaaaaatgcagtacagagttgaagttatggaaatctggatcacatctt

SEQ ID NO: 34339 - DNA, 2010 bp, Homo sapiens
gtgcacaaggtggtagtggcaggaatggaacgacaatataggaaggggcaagaaatgaagagcggtgctcagaactctgcatagactcctaaaggcaatgggaagccactgaaggatttcaccagcaggaagggagacctgaacaaattactttggaagcaatgtggaggatagatctgaaagggttagactgggctattacaatgggcctaattagacaaaaggagatgtgaattacagtaacagcagaagaatgaagatgagatgatgcattcaaaagttatttgggaggcgggaggatagcttgcttgagcctgggacgacgctgcagtgagctatgattgtgccactgcactccagtctaggaaacagagggagagcctgtctcaaacaaacaaacaaaaaagaatagtgtttatggtaaaaacaagtatttccaaatgtaattgttagcagctattttcattttccttcctttaataaacatccaagactcctttcatagttattgccagaaggattaatataatcatagctctcttataaaaatctcttgctttggtaccaccgttaaacctaatactaataggaaagaaacaaagtattttaagaaataattacttttttttactattagaattcaattatatcttcctgtggaggcagaattctatagatatccaccaacatttccaccctctggttatttcaaatactaatccaagtactgctgtgaaggagggactttgcaagtggaactaaggttactactcagatgactttaaaatagagattatcctggattatctgagtggatccaacgcaatcatacgagctcttaaaagcagaagaggaaggcagaggagttagtaagatgaggcagaagagggaggcagagagatgtgaaacaaaggactccacccatagttgctggctttgaagttggagaaagggaaacatgaaccatgaaccatgaaccatgaaatgcaggtggcctctagaggctgagaacaatcctcagccagcagccagcaaggaaatggagactcagtcctgcaaccacatgtaactgaattctgacaactggaaagaatctggaagccgaatcattcccaaaactctagaaagaaactcagccctggtgacactgatttcaaccttgtgaaacttggagcagagaaacagctgagtcacactgtgccctgacttctaagttaacaaaactctgagatcagggtacaaacaaatgggcgttgttttaagccactaaatttgtggtaattcgttacaggagcactggaaaactaatactctttatttaatcactgacttcaaatatgctctgtcaaatctcatttttctattaagagatgtaactttgaacagagttcatacatttccagtcatactcaattactataaaatccagtctaatttactttccccaaactaattttgaaaatgtttaaacctacagaaaatttaaaagactaatacaatgaatactcttataccctatacctacctatatttatcaactgctaacattgttctaatttatttgccttttcactcttcctaaatatacataaatactcccccgccccccaccctctccttctctgtatcaggcattctaaactgtagatgattttgccccccagaggacaacttatcatcaggaaaatgaaattaaaactacaatgaaataccaactcacacccatgagaatggccactctttaaaaaaaaaaaaaacacacacaaatgtctggagacatatctgatagtcactactgggggaatgctactgatatctaacgggtagagcccatggatgctgctaaacatcctgcaacaccaagtcccacacaattatccagcccaaaatatcaataatgctgagattaagaaaccctgctttctgtatatgtatatacaaacatttttttcctgaaccatttgtaagtaaattacagacattatgatactttttaccctaaaggcttta

SEQ ID NO: 34340 - DNA, 3049 bp, Homo sapiens
ggctcaagccatactcccacttcagcctcccggagtagctgggaccacaggcacccaaccaacttttttttttttttttttttttttgtatttttagtagaggcggggtttcacaatgttgcccaggctggtctcaaactccagagctcaaggaatcagcccgcctcggcctcccaagtgccgggattacacgtgtgagccatcgcgcctggccggtaagcttttttttaaactcacataaaagattacacagaggtacctggcctgggttgaattctagaaggggttgtgacagtgttactcaagtgcacaattactattggtggtgcttgctacaaagactcagttttattcgtacacgcttaatatcatgggttgtcaaatcatgcttccaatttgcaatacgtcactcatttcagggtaatgacttacacatacaattttcaaacaaaaatgtaagatttacttgcctcatgatggttaccttctcaacttttttcataatttataaaagcaccagctgaccccaaatcatctacctcttggccttttaatgtaagcggtaaaggaatactgtcctctgaatgcagcgttggctaacactgctgacccacgcaaggcattgatttgtagttgtttttccatcggagtgatggatttgcgctcagctactcgcggtgtctactaggtccccctggtgaccaaacagtacacttaggcagtagtagggttccaaggcacagactggcagcggaacagagggtggaacgggaaatcatgaaaaattaacacgcgaaccgtacacacgacatgactgagaattacgtttgcattactagggtatttgggatccacagaccagccactagcccctttcctttaaaaagcaaacacccatccgcctggttcaggcttatcggtctccacctcccatttaaatcttgggtgtgatggaacgacccaaccaaggggctcggcacgaggcacacgctgctttttggagcctggggaaacactggtgtgacaaattgtcataattttctaagacacggaggaatgctacaccacctttcctaccaccgacttaagacccaagacactgagtcaagggcaaccgacctgcgggggcccacgggggaggggggaaagccccgaaaacaccagggagaaggcggcccgtcgagctccgcctggagcggcgcagggctgcgggcaatgcccggagcgcggggtcgtacccaggtcacgtctcggggctctcaggatgcgagggcgtacccgggcgggacgactcgggccctggagcccggctggccgcggcgcgggagccgcgagggccgcggtggggggcgtcggcagagccgctgagggggctggggagggcgcgccgccaggtgccggacggcagggggcagcggggttcgggcgggcacagacccagggagggaggaggggagcgggcgagtcctgcgcggcgcggcagggcacacggccgggtgctcccgcagctggtggctgggcggccgccggcctacctggaggtaatagggtttccttagccaggcccccggacagagactcctcgccatggtaatcacacatcgccccgccgcgctgcagtcagaggcggacccgagcgctggcggccgggctccccgcctccccccgcctccccgccccctgcccggccgggcccgcccactcccccgcccccgccgcggcgcgcgccgcgctcccctcggcccggctgcagtgaaggcggcgagaggccagaggcccagcctcctgccctgttcgcccgccggccgccgcggctgtcagagaggctgctgccgactccgccataaaggggagtcgcacctcgcctccgccgacacaaatcgactgcgcctggagcttaaaggggaggcgcgcggaggcgggagggggcgccgcggcagcgggggtgtcgcacgctcggcgcggattggggcgtgcttctcgctggctgatgcggcgacccccggaccgcgctggcctcgcagtctgctccggcttccggctccccgcgctgcgcccagctgcgcgtcccgccacccgccccggcagcaccgacgctccccatggactcttctcctggagtcaggacgtgtctggacgggttgtttggaaattcaagggaagcttggggctccttccctggggactggctcgtcctccctcgcccttggtggcggtcgggggaagggggtgtctgccgcagctggagacgcagaccggggcatccccccaggactgggctcagcttcgaacgcggacagggcgccccactgctgaactcggtgccccccttaccacgctccagttcgcctctaacggcctacaactttttttaaaaatgtacttttaaaaaattccgacttttttggtttatattgtttttaagacagcttcagagttttcctggccccgtccaggaacactgatttcaaaagaaaacaaaaacaaaaacaccgaattaaatacagtcctgaaggcagggagcctgggacgtggcctgctgcttggttaaggctacataacacagggtgtggtgtctttcttttgacaatgagttccaaataagggaaaaaagagccaccctagtgggagaacagctgttgatccaagtgacttgtaatggaagaagcagcttttttttttttttttttttttttggctgctttttaccccacctaccacgtttaagcgtgatgctaacaaagtttaggtggcccgttagagctcattccggcctgttgctctgagaaggggtttccccagaagcaaaccattactcattctcacttggtttttgcataagccttgttcaggtgccttgttctgaagagataccttcatgtctgccccttccctcaacccacacacagacacaggttttaaacctaggtgatttttgttgtggtggttgttctttctgtttttgagaggggtcttaccatgttgcctaggctggactcaaactcctgggctgaagccatcctcccatgtagctggaactacagctact

SEQ ID NO: 34341 - DNA, 612 bp, Homo sapiens
atgacctccatgaagtgctgatccaatcccaaggctcagttttgaactctttgagtaggaagtaggcggtctaaatgcagattaacagaattgctttgactttctttaggaaacttacatggggcagagtgaagagaaagttgacctcattttattactttcataaaggaaaagcttggtgctctcccattctattctgaattcctatcatcactcattcttggaattgtttaggtaaacaaagagtcatagaggtacagggaaaaaatgcagtgtgctggatggagacctgatccctgattaagacagaggaggttgctggggaatgcagcaagtgataatgccacagattttctaaagctttgggacctctagaagaggagctggagtgaggaacgggtgaaagcggctgctgcagccagagtcaaagggcatgtgagacagcatctctttcatcatcctcacacacgtgaacagcaactccattcggagtgtcagcttccagcaggaggtattatagagtgcttctgcagctttgcatgtatgtgtgttacaaatgcacatgtgtaacatgaagaattgtgaggaaaatgtgtgtgaagtgcccagcac

SEQ ID NO: 34342 - DNA, 2110 bp, Homo sapiens
aaaagattaggactattattcaggagaagcagaggagtggaagggtatgaccacaatatttaaagtattgaatggtattggataaaacgaatatgcttatttgccaaattctgagatcacaggctgagggaaccccttttgaagtatgagccaaatgagcttagaccacaaaaggtactttttcagagacagaaaaaatatggtgttcactatccctgtggcataatatgggacaaaaatataaaatggctttaaaaatattttgacgaaattataaataaagattccacacgtggctactaagaggagctgggttgtatctaggtgtaagttaaagagacaagcatacaatctcacagcttgtcagttgggacccctgtaggcagcagaatctgggcaggctaagggtctgcactaataaacaattctgttttcttaaaccattttgcaggggactattctcagatttcattacaactaggaaggactgcaaagcgggtaaacagaaaacaacctttcatcgttaggaaaaaaatcgtctgaaagtctttcataaaagcagctcctgataaggagtttgggactggacagtgaatcgctgaataaaatttaatctcgacatcctgggtcttctcccctctgaaggaaattctaacagcaggccttaggatgaaagtagaggaaacgtgcttcagttaaggttttctccagggaaaagaaatcggcccagcaagatgcacagagcaccgttacgaccacgcacaccgaaggtcgcacacgacccttttcctgtataacagtgccagcctgccgacgatcaggagcgcagctttcactattgtgttagccccggcggcggaaggactgagcctcactgcaacgttaaagagtccttctttgttcagccccagtcggggacgcagggcgcggtgttcctccgcgctcgccgcgcagtccctgcccccccgcggctttggagagctgccattcggcaccggagtcgctccgcgctcccagaatgcaccggcagtccgcgggaaaccaaaatggcgaggggctgtattgaagtgggctgtgtttgaggccggtgtaagaacgctcattctacccccaacccttgtctccaaggacctcggtttgtgcgtgcatatgtgccgggtacccggtggggcgggtgcccagtaagtgctcggactcgcaggggaagcgcccacggggacggattggttgttttttcctgtatgaagcggttggcaccactgaagtgaccgaatgaggtgagagaccttggcctgggaaccgactcttccggaggagatgggggttgggggaaggaggaagaaaggaagcaagtataaaagggaaagatggaggaccaaggtgggggtgggggctcctgtatgtgggtgcctttgcatttatgtgtatattgaaaagaatggatgaagaggagtagtcagttgagtgttgggagaaaatagggactaaaggagcgaggaggtcgttgggggagtctgttggaggaacaagatgaaacgttgagacggggaagctgtgtttggagggcaggaaggaacctgggggcgggagacggttggaggggcaggatgaacctggtgacgagggggtggggagccgagaggaggagccgttgggaaatgggggctgagggaaatgtggggagcagagtggagggctgcctgggaccttagcagtgcgcaaagggaagtagcagcttggaatcggagggtggaattgtatggaattggagtaaagggggtcgagtgtaagtgctggtaaggataaggggaacacactgaagtggaggttggaagcacaacctgaaagcttaaagggaagcggtgggagggaaagtgagatgggggaaagctaggtagcttatatttggagctcaccaaaaatatgaggcttttcttgtgtttaattaaacctaactcatataatctacgtctaggatgtagatttgtattgtattcatttttacaactgaggtaattacggctcaaggaattttaaccaatttgccaagatttcttaacatatttcggtagtgccagaactctaactctgtgttttacaatctggtgtc

SEQ ID NO: 34343 - DNA, 956 bp, Homo sapiens
aaaacctactcagcacggcaaacaaggctatgattcatgcttaatgaccccagccttctggcctctccgatgtccttttctgctactcccaccctagactttatatgtcttaaagtctaatacaaactcagtacttgtagtgtccactacacactaaccatccccacttacactatgtattttaagaactatggatctttttgttcgcttttctgaaatgccccttgttcctggcattttcgtctcaattaagcatctttctggattaaattttattttctccaggaatcctcttctgaaacccttagaagtgaccctcctctactggtacttagccatcctttattgaaattacctgtttatgagccagtaacctttattaagctctttgagaagagggattctttctttctcttttacctacatcccgcacaacccagctccccctccgtctcccccacctccatgcacaattcctggcacgtgttaactgttcagtaaatgttgaacttttgaactttactggaaatcaagaaacactgagttttagcctcagttttgctcactatgtgattttagatattttattctctgtgcttatcgtgtgtatctatatacaacttaatcctaaagttccatcgtataaaaaattctacaactttttattttgctctgtatgtgacagtacctggtatttaaaaacaattctctacatcaacttaaaaaattaacatttgatgattataattaacttctaaaaaactgaaagatgaaacacatcaatgccttttctttcccccctgtactgctacctgaaaacatcggaatttgctgtggaacgaacaagatttcttctaagaaattaccccctaccaccatgactacataaaataaggtaattcccagcaagaatattatgcagatactaaaaagaaaacatgctaggcatggtggct

SEQ ID NO: 34344 - DNA, 1577 bp, Homo sapiens
aaaaaaaaaaaaacaatgacacgagggaaatgcttacaatgctcaatgaaaaaatgaaaagaaaggttataaagttttaatatacgatttgatcttttgaaaataatggatatataacttaaacggaaatgtatcattaaatatagcaacagcgtcttccaaaaaatttcaaaatcgggcttaatgccaattacacgatcataatccaaaaacccttaactgaagcaaagacagtgatttgtaacatctgaactgtgtgaaaggggtgggggtgattcaaacaagtgtcatcaccttgtccaatgatgaaggagaacgtgtatcagttctgcattgtgaaattctcagtatgagagcgtgtagtggctaagaaaagcagtgggcgaattaggaaacaaagagaaaagccagcgacatcaccagttctggcctccttcccaccggaggaaaggggagaaggcgggtagtcatcaattccaggtccagcctaagttctgggtccccggccccagcgagagcctcgcctcgcctcgcgcgcctgcgcggagcgggctggcttcctgaacggccctcgcctcttcaccaccagggccgtccaccagaagtttctaaacgggtgagaggcgacaacgcagtgcagctgggttaaaggaaggaggctggtttatcctccgcacttacttggtactcgatctccagcgaggccttcaggggcatgggctggtagaagcactccttctggccggcgggaagggtaaaggtgaagtcgctatcgagggaaggtgtgaagccggccgccccaggcagcagcaccggaggcagagcggccagaaggagcacggggaagggcagccagatcttgtcgcccatccctgctggggcgatcccgggctgaaagaggcgtcaggtactgttgtctccgctccgcgtttcctctctggactcctcgtggttgacagggaaatctggagtctgaagaaactccaggtggcggccgcggcggcggcgaacactccctccgaaagagaagcgcagttctccaaagggtagggactctgggcggggctagcagtcctattccgcaaccgcctcagtctcggccccctcaggccaggcgtgagcgccgcccgcctctccccctgacggcctccggttcccatggcttcccccaccaatgggcatcatggcggtaattgtgggaaatgtagtcccgggcgggctccgctagtgggctcgggcgcgctcgccgaccacgatccccggcaagccccgcgccttcggcggcgcctcacgcagtctgcgccggggcggggcagtgaccgggtaggcgcgtcccaacggctcccgcggcggttcgaattctgtgctgccggggttcgctggttctccgagttgtgtccgaggcttccacgcgcaggggcccgggaaagggtcagaggcttcctaacgcagactcgagtgcgaagcgcgcagtcgccgggtgggtctctccccagcgacgatttgggtggtgagcgactgcgccttggcgtggggaaaccggcttacctgggggagttctgttcctttccctcccg

SEQ ID NO: 34345 - DNA, 780 bp, Homo sapiens
ggagtgcagtggctcaatcttggctcactgcaacctctgctttccgggttccagtgattctcctgcctcagcctcccaagtagctgggattacaggcacctgccaccacgcctggctaatttttgtatttttagtagagatggtgtttcaccatattggccaggctggttttgaactcctgaccttgtgatccacctgccttggcctcccaaagtgctgggattacaggcgtgagctaccgtgcccggccgaagagtcagctattaataagatacagtgttttgtctgttaggaactccatcaaaagaatggataaataaataattgtacattgagaccaagtgcactgagttgccagatgaagtttgatgacttcatatcatcagtatgcatgtgtgttgactggtgaattcattcctccacttgctcttttaaaaagtgaatttagggtcaggcacgatgactcacacttataatcccagcattttgggaggccaagttggcagaatcatttgagcccagaaattcaagaccagcctgggcatcgtagcagtgggacccctgtctctacaaaaacattaaaaaactagctaggtgtggtgatgcatgcctgtggtcccagctacttgggaggctgagatgggaggattgcttgagcctgggaggtcaaggctgcagtgatttgtgatcacgccactgccctccaatctgggcaacagagcaggagcctgtaccaaacgaagaagaggaagaagaggaagaagaggaggaagaggaaga

SEQ ID NO: 34346 - DNA, 608 bp, Homo sapiens
tccatggtttaattcaattccataggaactgaattaaaatatttttacctttaattttggttaagcctacctatgttgttattcacatttctggatggttagaccagtaaagcatacatagagaatgtttattagagatatattatacatttggggttctaggaaaaggaaagctatctacttttatctcatttctgcctttatcaatagtgtcaaagtatagtacaattggtttttatttgataagctaagctcactttaaaaagtgaattaaagttaggaattttttaattgacagtgttttaaatacttattttaacccaaaactaaatatatattgatatgtttttcctttgatgtagggccaaaccttggttctttttgtatgagtcatttgattagaattctacctagtctttctcacataactagactcctacctggtctttcaccacactatattccatcatctatagtttccaattctgctttctttaaagtggaggaagaattaattaaaagacattaattaaaattaaaataattaaattaattaaaattaaattaataaaaattaattaataataattaattaaaagacatttgta

SEQ ID NO: 34347 - DNA, 1736 bp, Homo sapiens
acatagttttcttgattgtcaatgatactctactgagttttaaatgcattgaccactgtcaatactcataactttaagctcacatggaactcctacagcgcatgagcctcagttgcattacctgtggtagtgaccacctcatagtcatttatatgtatgttgcattaataaatatatactactctgtaaaatttaatgaaagagatgtatttttatttttttgaggcagagtcttgtgctgtcacccaggctggagtgtagtggcacgagagctcactgcaacctccgcttcccaggttcaagcaattctcatacctcagccccctaagtagctgggattacaggcgtgtgtcaccatgcctggctaatttttgcattttttagtagagatggggtttcaccatgttggccaagctggtctcaaactcctggccccaagtgatctacccaccttggcctcccaaagtgctgagatgacaggcgtgagccaccgcacctggcctgaaagagacattttaaattgggatgtagagccatgatctgtagcctagttcaggtcctcggcttatttcacctgccacttaagtatgacattgcattggtctcctatttaaaagcaggattttaaaactcttttaaaccaaataaattattatttaaataaagaaatccagtatgtcaaatagattcaaaggtagtttatctgattgggggtaggatatgtctgacctttacccagttacttaaatctactcatggctgctcatgcaaaagctccagagcagccctggattaatcattaaggaaaataagcaggagcataggggactaaggggaatgccacagagttgtttgccctagctatcatcctcttaattcgttcactgccacacttgactttagtagaatttttagtaactgtctttatctgccagttcaaatttaatctgcactattaaaaaatcattttctttggtatgatgagtgacaaaagtttaaaagtttgatttgaaagtgtcatcaggtattacatttgtttctttacacatggtgtgagtttcaaaaccagctacctgggtctggatagcatttgactcatcagctgattcgtctaaaggactcttaagcaattttttaaagcagtggtagggccaggaggcgccattgttgggctgtgcagagggtatcagctggcctaaatccagctctgcttcagaaaagtgcagttttaaagtccactggtacaatgaaaagaatgtggaaaccgatacatgagaagtgtttaataagtgttagctcccttgtgttgcagcccaaatactattttcctaatggttaagtacgttggcacttccattgagagtaaagcctcttaacactgaagtattctgctttcagactaacaaaagcttcagaactcaaaaaattacacctgtacacaatttagaacacaatatcagcaagttcagagacttcatattaactcctattctaatcctgttttggattagagcagtggaagtgttgtgaatactgattaattagctaattcaccatttattaggaatttataaaaagttattacttctatttctcttatttgtaagtagttttcaagatatggtacatatatcatgcagtaagatgaaaaataagaaattaggaaattagctatagggaaaacaaagatgaaaaaaaaatgttaaaccaggagtacaggtaatacctagagacat

SEQ ID NO: 34348 - DNA, 1209 bp, Homo sapiens
agcttcttctttccactagtctcaacttattacagtccttccaccccaaccaactcctacactcaagatcttgactacagagctctggaatattaaaagcaaccaccactagcatactgtgtgcagaaaaaaaaaaagtttggaacccttggatttaaatgatttagcaaagacagaaaaaaaaaatgtatgctttggaggcaaaataagtaagattttcaaatcagtattcaaaaatactttttcattgtctattaattgcaaacaaaacaggattttagtttgtcaccaccataatccaagcccctatcatgtcttgcctagactcctaaaataattttcctacttgtattctttccacctcccaacacattctccacacaatatagtgctcttttaaaactaagtcatgtcacttccttgtttaaatccttttgatggctgcccatttgacacagcatagagtcaaactcctaccataatcgtaatggtagtaattaataataataatagataagaatagtagtaggttacccctattattccctatcattggactttgttacttccttcacaacattaatttcattgtatttacttacttgtatgttgtttgtctccccagcttgaatatgagctttccaaaagcatcagcactgtttgtcttatgttggatccttatctcccagcatggtgcctggtacgtattaagcaatcagtaaatgtttattaagagaataaagttttaggatttaaaagtaacttagaaaccatcgaatccatctagtccctttccccaattcagggcttaattttcagccctctgtaatgcagaggctacttggatagcagtgtttatgctggtggagaacaaaaaagaacaatagggaggagctgttccctttccctaattgattttaccttacttgttcctacatcagctttgctttttaccacttagacaaacagtcatatgagtcatttattcatagccaagcagcttaatcatgcatgtgggcactcctttttgtgtgtatgtggagggtggagagttatagttgagtagtttccaaactaatgttcatctagctatttgtggaatcgtaaagattttgtctattagaggcatgagccaccgcgcccagcctatgctccctctaacaattctttaatgtagtattttctaaattataagctttgactcatcat

SEQ ID NO: 34349 - DNA, 2793 bp, Homo sapiens
gaatatatatttatatatataaatatatattatatatatatatatatatattttttttttttgtagggacgggtctcactatgttgcccaggcgggtcttgaactcctgggctcatgtgatccccctgcctcagcctcccaaagtgttgggtttacaggtatgatgagccacaacgcctggctgacacactttttttttttttaaatgcaatttctgtttagaccttgacacctgttgatattactagtcactatggaaagaagtaaaaacagttgcttaagatgctctaacacttttttcccctgtagaagccaacatggaatacaacatgaaaactgtctaaatgggaaccttctaatatagctcattgtatgccatgcatttccactccatttccactatgttggaactgacttctgctttcctacttagccattaggcgacttagttgcctctaggcaagtaacttctctgaaatgtttcatttttcatgaagtttaaaaaaaaaaaggtgaaggactttagagagctttgaaccgaataaggtctatcagacatcttgaaaagctttttctccagacgacgcagaaacaggcacacggggttctgctttccccacctcccacccccaagcccaggtcccattcttctcactttcaatcctcatttgggctcctaaaggaatagcaaagagagttattttatcaataccagcgctcctctgtccccaaatccagctagggaaggtttcggaggcctcagctacttgagagagggtagagacgatccttcctcgcctatctacccagccacccaccccttcccagatgtagcgtccgggccccagaccaagcgcgtgcttggagctctccggtacagtgaggcgcgcgcttgcctggctagggtccctgtgaaggaatgggatcccgaggtgcttgccaggaccgtagcaggcggaagctgctggcagcgcgaacgggcggctcccgccggcgtgggtgggggaagggcggcagccacacccggaagtcggtccgggagggagggggaaatctgagggaacgaggcttccggtggcgcaaagggtgtcgggagcggcttcctgcaaaccttccctggcatctggagggaccaccgttgccgcgtcttcggcttccacgatctgcgttcgggctacgcggccacggcggcagccactgcgactcccactgtgcctggctctgtccatattagttcccaggcggccgtcgccgttccagcagcggcagcggcagcggcagcggcggacatgttgtgaggcggcggcgcgggtgtctgaaggatggtttggccgaggcggcggcaacggctgctggcggcggcggcagcggcagcggggcctcgggctctatagagccgagcccgctgggtacccgcccggtaccgcggcgaggccagtgcccctggatcttgcctctgctccgacgccgttggggaccagttaggcgacagcgcccgcccctctgaggagacacgaaggtggttccccagccgctcaaatttccggaccaccgcgctttcccctcctcagcctgggctgtgctctctctagaatcctcgggcccccactttcttcccaaactcatcctaaatctctcacacacgcgagtgttcccagccctcaagccagctgctcctccgttcattttctgcaccctcttcgcaaagcaccccccgggatcactctccgagggcgactttttgagaaatctcggtggagtagtggaccagagctggggagtttttaaaagccggggcgcgagaaacaggaaggtactatggcttcctcgtctggcaacgatgatgatctcactatccccagagctgctatcaataaaatgatcaaagagactcttcctaatgtccgggtggccaacgatgctcgagagctggtggtgaactgctgcactgaattcattcaccttatatcttctgaagccaatgagatttgtaacaaatcggaaaagaagaccatctcaccagagcatgtcatacaaggtaagtcgtgtgtgagagctggtttgaatgaggttctagggtagcagtctgctaatcgcgtgaccctttcgtgtcaaagcctccattcctcttccctggtaagtaacttaatgaaaaagccagactggcatgtaggcagccggtgctttaaaaacaatccctttgtagcatttttgcagtacttttcatccagcgaatacatgtaaggagtgcaaacatttaggtcagcgtccccaaaacgtaaagaataagagtgatctcactttacagccaggtaagccgaagcaacaagaattacttgcctgaagttgaacttagataataattaaggaacgcagaaattctcctttggaaagttaaaattcagacggaggaacttcaacgtgggtggagacagagcacccccttccccacctgacctttcaccaatgtagaggaaaagatttattttctgaacacatgagttaaaaaattcttaacatacaatgtgttcaacgttgtcaagtttatcgttgttaaataaaaggtgtatgttttctgctctaaaaatggtttgatggtacgttcatgaatgagttaccaaataactcctgttccattctgtaagaatagggtgaactttaaattttcgtttttttcttttcgtttgcttttatgtcgtttgctttgttctattctgtggagataagttttgaaatctttgattgaaagtttatgcaagttttttttttaacggaaaatttccccgtcctttc

SEQ ID NO: 34350 - DNA, 2594 bp, Homo sapiens
tgctttaggagacaagctattaatactaaagcatatgttagggagttgctcagcgtacttgatatctagtagcaccagccaaactagctaacagcctttccatggagataggccaggaagtagctccatagagaaaaaaggaagtagtggacctgcctccaaggttccgatactgggaggtgaaagagatctgaagttccgaataagctgtttacactaccagagaaaaatctggctcccatccaaccctcacccacgaggtgcccattccagacatggggcaagctgccttctcatcttccgcaggtgacagctcggctcacatttgtccacgtcttccatctcgtgcgctggcaacatacctaaatgattactggaagagctgcctctttttataatttcctgacagaatttataaaattaaaatatttaattaaagacagaatcggggacatgttgccttcacatttgctgttcaacctgtgcacattttggtggttcccaagaatcgtcatgccaaagcatcaggcttgaaaggagagatcaccttaagcatcaagatttaaaaaaataaaacacaactctcctcagtctaaactctaggatttggatgacgcttccctgtcaaggtttctcccgagtggaggagacaagaggcaggaaaggcaggtaactaaaattgcctcatgtaaaggggctcagcgcagaggaggaatgagataatagcggcggtgggggtcttttcccttctctccctttctatcttggaaacaggggtccgactggcagcggagtgggggcagtccaagctccggggtacctgcaggaggagactcgaccagcgagaggggccagcgagggtgaccaggtgcccgcttggggaccccgccggcggtggccaggctagcccaggtcctccccgatcccaggatgcactgcgccccgccccctccccgcgccgcgttccgcctcccctcggccccggccccctcccgcccagcgcggggaggcggggacgcgtcggcggcggaggcttctccagtcgcgtctttctcactcactggggagcccggcggtggcggcacctttcgaggtagacccgctgagctgctagcccgccggccagcgagtgagaggtcggacagactgtggagccgacagactgaaggacagcggcaccgccagacggccagaaagttccgccatgagctggggcacggagctgtgggtgagtcggggagaggggcgccccgcacggaccccggcccctgagaagcgcgggttgggcgggcgccgcggaccctcggcggtgaaagcgcgctccgccgtcctcggtccggcgctggcggagggtgagggtcccgctcgtctttgtgtgcagactcctcttcccttctcggccgggggtctagggggccgctagtccgtgctcccgcctttgccgccgtggtgcagctcgggcggcgcccgggacggccgggggagcagcccgcgggctcctgcgtgcgccgtgatcccctcttgttccttctccctcctccaccttcacttttcccgacgcctggcttcgcgcccggcggctcctctcttcctttgtatctctcctcccggaggcgggggagggggcccattgtccccaaggggcgctgttcgagggcggggaggggaccggccgcgattcctcgcccgggccaggtccgcggggctagggcgtcgcccgtctggggcggcgccgcccagagccctcgccccaggtatggggacccaggcggctttgttcggagcccggcctcgggccagccaggcccagcccacacgcacatttctctctccctgcctcagtgcttcgggcgggcacagcttcgagggactccggtttggccacccccggctgcagcctttgggctggtgggttggttttgggggctgaattaaatcgagtgatcgatgaggaagctaattttaccaaaaggagcgtacggtctccctgttgctttacttccctttccgttctttattctcacttgttctttctccttcgttctctcctttcctttcctccttgcctttctttggcacaggaggctccagacaatgcccagtgtctggccaaggtacgggcggagggtaataggtcggagaatttgctcctggcgccggcgcggaagggtcgaggtgtggagggcagtgatttctcaggtgcggagggcagtgatttctcaggtgcggccgggagaactgggggcgtgggggcgctgtcccgagagccgcctggcctcagccactcccctttttattccacctgtgcctgttttccgtgccttttgttcgcgaggatctcgtgaaatcactgcagagaaaggggagaaataacttttgagtatgtgtgtgcccagctagggtgggagtgaaagccaatgggttaattgaaaggcaaaatgttttcttatttttcacgtctactcatagattgggaatcttagaactgtgagactttagagtccatctagtgaatgctttacttagccagccaggaatctcttgtgcaacattctgtacaagtgcttacccagtctgaaaacacaccacccaag

SEQ ID NO: 34351 - DNA, 597 bp, Homo sapiens
tcattgcttctctgtacaaataccagaagctgttaaaaatatctgtggataaaattttagacttttgaaaatgcatttttatcttccttttccaggatcagttcgacagcttagacaagcatacacaatggggaattgacttcttggaaagatatgccaaatttgttaaagagaggatagaaattgaacagaactatgcgaaacaattgaggtaagttaatttttttttcagtttttagaatgaaattacatgtttaaacagttgaatattagaggaatgtgatagtccagaggttaaattctatgtttttcatcagaattagattgaattaggtaaccggtttgttttaatgattaattaagtcattggctagtacagtaccacaaggaatattgactagctggatcacaaatagctttcattccagaaagacacttaaaaatctgaaaactggggagcaaaatgccgggaaaaagaaatatctgcgtgttattctgtgttttatacttttattcctctctaactttttgctttagtcatcttttcaaagtattgaatatttcttcagagtttttttcttcagagtttgtaagact

SEQ ID NO: 34352 - DNA, 1690 bp, Homo sapiens
attactgatgggacgattaatatatgactgtgttgtgtactccatccccctgtccccatgaccaatgcagcagctgagtcctaggatgcctcctctgggctgttccatcctgttgaacagagtagggtaaaagttttacgatactcccgggaaaatctgatgaactggaatgtgtacttttaacagagcctaaaattacttacaggcccagagggaatggcttgcctaactaacatgcattttccacatgctccatagtgttgcagttaggaaggaagctgtggggaaacttccattttggtgcaaatctcagcatcccccaaataacctgcaggactgcctggggaggctgccatccccaacctcctggctgctctcgggggacccccacacagcctcctcctgctgagctgggaaaaggcaccggcacggtcaccaagcagcagttgggaggcacactgtgtaaccacacaaggaaaaggtggaaggtaactttcaacacactcgctgttattccttctgtccctttccaattcagactgggaatttctccagcaccaagcaccagaatctccctagctagagacagaggcactgcaccagccaagttgttatgaactttaattggccttcccataagcataaaacattgttatgttacagaaatcacgaagttctttcctacctttacaagcaccaaagaaaaaacaaatcaaaaaacccccaaactccaaggaacagagaaattccagcaacctttcgaagataagacaagaccgagggcaaattacaaaaggaaatatctcccgagaagtgatatttaagcagtgaccactgcggctggactccaggggccagaacggcagggtgtggaatgcaacctgcctgtgagcacacaccttcgcccagggcaggccaccagccagccaactagcaggcccgacgtcagggcaggtggcacctggccagagctgcataagggagccactgaaggacactggggcagggcagcaggccatgagccatcttttcccctcctcccacttaaacatttctgggcgtgctgcgtgtacaaagtggtgacaagttctaggaggatctgcattccaaagggcaaacagaaaagtggctctattaggcctgacttgttgacttaagagacttagtctttttttcatttcttatcttaaaaagtttttaaaccaggatcattcagggccaactaggaggccttccctgcagcagtggttctgttatcctgccgaatacactcccactctgtgcatgacattaattccctgcttcgaccattcagcagcctatccttcccaaaggaaacagaagaaaaggtaccccttctaacactgtaaggcatctcaagtccaatcctattactatgaaaaggaggatttctaaatatcaggtcttgcctccctccttgcaattgccctgagtttttttgtttgttttgagacaggctctcgctctgttgcccaggctggagtgaagtggcatggtcatggctcactgcagcttcaacctcccaggctcaagcaatcctcccacctcagcctctcgagtagctgggaccacaggcacacaccaccatgcccagctaatttttatatttaaaaaattttgtgcatacatagtaggtgtatatatttatggggtacatgagatgttttga

SEQ ID NO: 34353 - DNA, 1951 bp, Homo sapiens
gctgagattgtgctattgcactccagcctgggtgatagagtaagactctgtctcaaaaaaaagaaaaaaaacttacgacatgatgcccttccccccagcccctgtccacacacttcctgtcatgttgtccttggttaatgattggccagatcaggtttacaataaaaacccaagggaaattctatgcctcaattctgcagacttactctatttttcaatttttacagtattaaatgaaaaaacattatttatggcaatcacccaaatgacgatcacaaagtatattctgggccatgagtctgtggtcatgggtttaattccccttttttcccacctctgggtcacaggatccagtagggaagtgatggagagtgtgaataactgccagctcaatggggcagaggcagccttgttgatctgggccacctgccctctctcctcccgaagctaagccactgccttgagaaggaggggctgcaaatggtctgaggctgctggcagctggccaagagttcaattacctgggccacagcccgccctcctagttcttccggttactgactctgtggctgctgcctcccacaacgctgtgcttgcagaccccaggagcgctggctgtcccttcacttcctgaacatgtggatgtgtgctttgggttcttgacctcagctcttcccaaggtcttcttagagaagggtctaaatgaagtcatttttagagtatttgtttttggttacacaggtgcttccgcccatgtggcctcggagtgggaccctgcgggtcatcaatctgtacattgcctgagagcagccgtgtatgctctggaagggacaagaccaggtacctgtcgggggatgcggccgtggtaccaggcatggctgcgcaggtcctcgctgctcaggagcagctcctcctccagctccttcttcagtttctcgggggtcctgtccatgatgtgcctctccttggagaactgcaacacagagtcaaccatgagctcaccctgcccaggccacaccaggccatgccagctggaggtgaccgcctgcttcactaatccaaccagttatgctacagcctgcattcaggtaggggagcctggataatgattacaaagagctgtgacctttcgtttctccggccgcaaccatgtaataaaattttcacctgcacatggggactatggtaggagagtccaccaagaggttccttttaccagtctactcaagcagctgggcaggaagggccagagagatgtacagacagcaagacacagcagcccagcctgctctcttcccagcggagagcttcctcattctccttcaggactgtcctgacatagcgtggggagggcagctgttcccttctggccttagatcctgggcctctgggcagtgaggcccaaagcacagtccttgggctggtagcgatggccctaacttctttgctgttggtaaactcatgttcaggaattgagtcagtctttagaaacttttagggcaaatggacagagcaattttatgtctcttgaatctaataacagaagtctgtctttatttcacatttctaatatttcatttttatgacagataggaaagtgaaacaaatttaaaaagacaaccctggtccttcacctcagatgtttgagaatcagtggtctgcggcgttgcacagtggccatggcagtgagtgctgggtggacagcggtggctccaggtttaatttagaaccatgcctgcttacaacatgtgaactgaacctggaaacctgcccagttcccagcaagaccaggcatgctgaccaggaaccgcttgctgaaagtcccatgaacagaaaaaggctgtgtccctgtggttctcccaagtttcccagcttgtccttcaaacccccatgggagccacaaaattattacttatcacactactttttaaaaatgtttatttattttatt

SEQ ID NO: 34354 - DNA, 5664 bp, Homo sapiens
ggttctctgaatattttcatcaaaatagtgtattgacatattatacaaagctcttggcaccggtgtcttataacaaatgttaaaatgtgagcagtaaagacaacaacagttctgaaccctgagatgttttgaaacctggctgcaatttgaaaggaaatattgtgtggcttctgtacattatgtacattattgataagtaatggaccagcaggataaacagagaaaagggctcagctaccttgtgttcgttagaaatgaaggaagagagacaaagagagaaagaagaaaaatagctctgtcctattgagctactttagtataaaatttcagcctacagagaactgaaagtgtcctgaaaaacagcttcagcccaaaacagacaaggagccctgttctgtgccactgggttctgcttccaggggaggtacaccactaggggctcttgaagacccatcagtcaaagaaagcacctctgttttcacaatcagcaagctgcaaacttttatctattgccctttaggaaactcatgctttcagggtcccccaaaagattgacagatgtactttatttccaaaccaaacctaccttgactccaatgaaagacttgcggtgatagaagcagcacagagctgctgagagggcgtggaaagcactgcattccttaggcatctttcggtcttcagtcccggggaccacacactttctttagggttaaaagaaagggggcttcggacgttaaagccctagcccaccacagcagctgtgctgtttctgcccagaagtcagggaagtcggcagccgggggagtgagtcggctccttctcccaggctagtctgggacttttcccctctgctgaagccaatacgatccactcgctcaattctcgcaggctggtgtccagcctgccatgcacacagtgccagaaattctcatgtgaccagacttgctttctgatgaaattctaacccctcttagaagaggccttgggctttagctgtcccctcaatttagagaccaggcagaaatcattagcagcccctctcccccgacccagaatttccttctggggctgaactgtaccatgcgacctgctcctagtggttctgtctgcttgtcactccagcacccagaggtttaaggaagcagggtaagttgtacattcacaccaccttgttatgaacagaggctcctttgaggaaaggaggtggcctaaaagtgactttccctaggagaaatactagatgtactaagtaacccaggcaggatccctgtcctcactctcccaagcccacctccagagctgtttatttttaattaagatgctcctggcagccagtttgcagctgataacgttggcacagccatcactactggcaaagcaatattgccttttggtgtttaattagcaagtctgtcagcaaacaccctgagcgccctatgccctcccacctggctgtgcaacctgttgggaggatggggactgtgtacccacttctgactcaactgtttgtcctataccttcctttaaatccttcactttaattactcatcgccactctgattacccactttgcgtaacctagatcctgcacacaaacctcgcatccaacgcagccaagcaaggccctcctggattccctgcgacctgaggcctctacccctaccaagagccacataacacctttagggaaaactaactgcttttcccttcattccagttatagcggatgctcaacgagttctttttttttttttttttttttaatcaaatccagatttctgcctgtagctcttcctctcctatcctaccgctccaaatattaactttttgtggcttcggcctcaaatatggaatgtgtcctgaagctttctaaaacttcacacaggcagaaacttgtaatgaggaagaaacaagatctattcagtccagaaaggaacaataccagatgaggcatgagggaggtatgagaaatatccaacgggattagcgtcaaatcctcgggagaccttggcctttggactaggtcaagtctgcccacaaaaataggaaattgctctgggcccagtgagcaggtatggagagccacagtctcacacccacgcaagggcaagggcccggcctcatcaacgtgtcaacatggggatggagctgctaagtgaggcgctattgccacagcgagtgtgggcgatgacttcctttctgctttcctccctcactcattctcctctctgactctggaggtctggtctgcagtcttgacggctcccaggccacagaaagtccaccagagaacctagaaggaagcaccaaggtggcagaactcagaagggttttctgagctggaagagcccttgaagactgtctggtcagtgggtccccactgtcctcgaaggtccagtaccgcacctgtgaggaagcgttttctggcttgccctcatttccgttagatggagttcaaagggtaagtccgtgtgagcagccaggcccaggccccagcagttctgtgagcatgactcatcaatcaggccattagccaccacagaatgggccattttcacctggtattctccttggagagcaaataacgattccttcaagctaaaaacctccccaagaggctagacaggcaccatcccaggcctgagaaaagggaggggggcagtgactgaaatcctgcacagaaattcgtgagattagtcagccaagagactccgaagcccagacacccttcccccagaaatcgtgaatgaaatgcattcctgaaagtaatatgcaaataactcagacatgtaaatcacatagaattacgaataaagtgctccacagccagggtaaaaacaaaaccaaagacacttaggtcactgtggtatcacagctcttgttacctgaggttttctctgtttattctaagaatatctccaaaatacccaaagaatttgttccaccgggattaaataatgactaatcttattaggtaactgtttcctaagcatcttttatttttatttcacaccaaaaataatttctgaagcagcactcaaaggttttaatcaattttctcctgaaacggtcaaggagagagactaaaataacgtgttgtttttgtaactaaagatgataattgcatacattctcaaagtgcccttcactgacttgttaagcttttaaacgctgcctatttacgctgatcaattcctcccattctccccacaatgattattctagttacaaagaaatagaggaccagacctgtgtaccactcagcagagaacaaagggctagggactccaacctcagactgcagaatctggtatctgatcacatagaaacacaaatagattttttaatgtcttataattaaacctgttactcacacagccccgtgaaagggctgtgacctggggcagtgggccactttctgatgatctggtgtgtgggatttgggactcatcaaatttggatacagggctttctaaacaccatgcccctttcgggataggggagggcatttctaaggaactcccagggactgaggaagggaggggcccagtcaggcagctctgagctctggaaaaggtcctacagggtgaactcccatccaccgcccttctctggctgcctggaaggctcactcctttgcaccgagggaaacacttgtgattaaagccatggctgggaagccaggtgggtccttgaaggaaacctctattacctcaggccaaatgttgcccaccctctaattcaaaaagggggttaaggcaggccggaggaagacccctgcataagcactgccctcaatgccagtttttccttgggcagccctaatactaacctgccctatttagtaaccatggaaacaggagctgcctgccagccatattcagcagacacatgcttcctgttggcagcagcccctcagctgagaagggccaagagagtgagtgcagagtccttttcccaaagcaccacggtccctgctagaagatcaggctcccagtgaggtaggccctctctccaacagggcatggagggagatggcaggagaaagatatgcctgctaggtacctgcttttcactgtttcagcacatctggaacgtaatactgcccatagccccaaaccctccccaaagcagcccagaatcagggcatcaagccttacactgaggcactcttgggctttgtcaagcggccccatggacagtgactctgcccatggctagaggacagtgactcaccccaggcttcaaggcctggcttgttcctgcccaaagggacatcggtcaggggtgaacaccagtaatcgtgatcagaacagctcaaaacatcttgtggcaactactaagaccctttatcctactccctctcccctaaagatcaatgctttctggctttttgcttcccctaaacccaggtgatctggctcttgctgaacaaagacagctttaatgagccagggcatgaggctgatgcaaccagctccatctttcctggtgccctgggaagtaggcaatgattagcctggaccttgccccactcagcaccagcctggcgtcacggtgaggacagcctctgcagactcggctctgtggagagcagtgtggcaggtgcctgggaagccctaggcagataaaggggcaagttgatccgcagccttgcttctcaagacttccccagcacccaccctatctctgcctgattctgaacaaataagccagcagctcacacaccttcccacaaagagccagagggcctgagggaggagagctgggaaaccagggaggacaggaggaaaggactttgtgcaaaaggtcagctcctcttccagccaggctcagtagctacagaagctgccaaagacagttctacacatttccctatatgcaaatctgattgatttcttgctccgaaagggaatgcaaacaagacttagtgggaggagggcaggcaacaatgcctgcgccctctggccccctttgtgtattgctgtggacaagacgttcgcctgccctggtgaacacagacagtacatttaggagtgcgtgctgtacatatcctggtctaacagtttccccagattcctcaaggggatgaaagagtatggctgttaaatggtctctatccggaagcaatattgatctgcctagcacataaacaaagagactaaagtacagtcttcacagcagatttctctctgctgggccttctgtcttcccttaccaatttctgtttctctaactagctattaaaattgtataactgagtaatgcgaagcaaaattaggcactgtgccctgttttgctttcttacgctatcacacacaattctgccccattcacctctctaccactaccacctagttcctggtgtcaccccagaaatcttatattacacaagctcaattttctgtttttagcgttcaggcaaaaagaaagaaaagaaaaagaaagaatacatacaggacataatcccaagctctcaaatggcagactcactatctgatgatcttggccttctctgagattctatgaaagtcatgggccctccttctagagcaaaagacacatacttgcaatgctttacaattagaacttgtccaatccgctttactatgttgttccgttttgctctgttttaggcatttaccagcctgaagccgtggg

SEQ ID NO: 34355 - DNA, 1157 bp, Homo sapiens
ggagtctcactctgtcgcccaggctggagggcagtggcgcaatctcagctcactgcaacctccgcctcccgggttcaagtgattctcctgcctcagcctcccgagtagctgggactacaggcacccgccaccatgcctggctaatttttgtatttttagtagagatgggctaatttttgtatttttagtagagacacagtttcatcatattggccaggctggccttgaattcctgaccttgtgactcaccctcctaggcctcccaaagtgctgggattacaggcgtgagccaccatgccaggccaggagccagcacttctacagagaacttttaccatggtgtcctatttcatagtcacactaggagaggagtattattatctccatttcacatgtgggatcaaacagctcttaaagttaatgattaaaacaacaacgaatcagaatggctggctctatctggtgtgatgagggaagcacggagaacacctggtcaccagaagtgctttatcttatgcaaatctgaaaggcagacctccctccaacagagggacagatactcttggcaacacaggcagcagatctcatctgcaatagtccatcagaggtcctattccgctcacagctgaaaggaaagtgcagggctgggagagatggatgctgacatcagaatctgagaagaaccaggaggcaacaaaggcttgctgcacaagaagggctaagggaccgcttttgtcacatggaaacacaaacagtaccccttcctctataggaagaggccaattcagagggttctgtgcatggaaggacctcattgactgccggccagtttcttcacttcctaacgtagtcaactgccaagcataatgctgtctgcaggagtgacatccagaaggtcaatatttgcccttcctggtgccaaggtggggacaataaattcctttgccagtggctcaaagatttgggtacgccttgcagtgtatatccaaatgggtggaagggctgggtggaggaagggagaattactagggagagcagcagaaacccatctgggtaactatccaggaacaccaggactcccggttgggtcacttgtgataagatgtgggaatccatccaaggacaagctatagatgggctggggatccacagcccct

SEQ ID NO: 34356 - DNA, 1015 bp, Homo sapiens
gctggacttacagacatgcaccaccacgcccagctaattttgtatttttagtagagacaaggtttctccatgttggtcaggcttgtctcgaactcctgacctcaggtgatccgcccacctcggcctcccaaagtgctgggattacaggcgtgagccaccgcgcctggcccagttcctacttttctatgagtcagtgtctatcttatctgaaaacattgcaatgcctgatgactgtgttcatgaaaagaatggcaattcaactcctttttcaggcagtttccctaatcatgttaaaacagcatcatttaaatatcctgcatattacactatggtgagtctatataggaatccaagactaatacacagtggtactggttgataaaaacttgacccagtcatgggttaacctgggctcagcagaattctagtgacagcatgaagctaaaagccactgttgaaattttaacttggcagcagtcagtcaaattgaatagggtaagaacaagaaaaaccgtatcaaggccagtatgtctcttggcaggcagagaggatctggcatcagtgaatcatcaggcttcaggctgtctaagctcaaacacagcacttctgataaaagcagatgctttgtttggctgctatctatctgcccttcctccaatcccaccagtcccatctaccccacccccacccattccctaccggcttctgaaagagtgtgtttgtaaaggctttttctaactaatcgagaggcagaataaaaatgctatggttttgagataatgtcctcaagcctctaagaggaagggcttctgcctaccagataaaggaacatatccccttgacctgtcttcccgggcagacacccatcctcaacgtggccacctacctaaaccttgaaaaagcagccatcaccctttaggcaaaggcagacactgcagtgtccatgtacctcctctgtctacagggtccttggggaatgtccaggaccgctgggaagaaaccacaggagtataat

SEQ ID NO: 34357 - DNA, 2008 bp, Homo sapiens
ctgaatgcacggctctactttccatctcagctaacagctttaagcgaaaacagatatgaggttaggaaaatggtttttctcctttgcaccttgcttcaagcgagttaaccccaaccatgacccgacccgccgccccacggaacacgccgccttgccagatgcttcggagtccgctcaacctcctcctcgacgagtgtctacacctgattacaccgttttaaagcggcggcgccctcagcggcctaagtgggtaaggacagttgggctgtacgatctatcggaacctccttcccaccgtccctcccttcctttgccttccctcgcctctccccaccgcgacgcagagggagcaacacaaccaactattcattctttctcaacaaagggagagagggagggagatgttgtcaacagttacagggcaggctccttcgctttctttgcaaacttcccaagagattaccggagaaactcgcctcctcggagccttgggcttccaccagagcgctctgggccctcgcatctgcccgaccccggccggcttctgcgaagaggggacgggcgggacagggcggggtggccggcagagcagctccgacgggcagggggtcgggcgaggccagcgcccgggaagatgccgctcgagtgccaccgagcaagatgcctggccgccaatcgctgagcgctccccgccgtgggccacgtctcggggagtcccagcgcgctcggagggcctggagagcgcaagccccagccccacttcagtcacccccgcccccaacgccaaatccgctggcgggggtgggtagggaccaacaaacgccggctctactttccccagagcctaactttgtccaacaaacttcctagcgtgtcctcaccggggtgggggaggcccaggcgccccgggaggaacagcaccccgaggacgctgggcgcgcggcggagactcacctcccggcgcggcgctgggcgctcgggctctcaggatctctggacctccggctggggctcaaaggcgccgcgcggccggcctcgcaccgcccgcgccgcggctgctcccggagctggggacgctcatggtccgcggggcgtgcccgccgagaatcccgcgcgcgtctagccggtgcgccccgcagctccggctccggtcccggccccgtcccccgcccggccagcagcaggcgcagctctgagccggcggcgcgcactccggccctcaactggtgatttgcggctccgcggccccaccccggcgagccgattcgcgctgccttgcggaaccccccgagacatttacattcggtgacctagccaggccctcctctgcccggattttagagtttggctctcttcgtatctccccaaggagccagtcctcaagtatagctcgatcacttcctttctgaagctctctccagagacagcctcgtcgaatccactccttccccttccccgcgttatttaattacccaacagatctgctttgctcgtctgcagacacctggctggctttcaatgtgaagggctttgatgagacaaagccccaggtaaccacaaatgaaccatccacgggaacaggcaaatcaattgcactcgtatggacgtattgaaagcaaagtgcgagttggcggtggcacttcagcactagatgatttggtggggtgaaaaattggagcccactggaaaagacttaacactatcttatatcaagatccattataaagtcatagaaatagtagaaggatagacaaactgaccaatggaataaagtccaaaaacagatttacaatatgtggtcacttgatttatgtcaggtgctgctgtgctgtattgggggtcagattagctctctctttccagtaaatgatgctggatcaactgaatccccccatccccagtcaattccagatggaatttttcttttcgagacagagtttcggtcttgttgcccaagctgttgtgcaacggcatgatcttggctcactgcaacctccgcctcccgggt

SEQ ID NO: 34358 - DNA, 6364 bp, Homo sapiens
taggttaaacagagattctgcccctctcccctccttggcagatggatacaaacagaagccaggaggaacagcagcacctcacacatctagtagcactccggcaacgactctgaatactccctgcaaggccggcaaatattttgataatctttcccctacaggattctcctgtggagaacaaatggacacagtcgggagctgtctttcagcggaattccacaggaagaaacatttcatcagtggagagggttttgactcaggccttttggggagggaagcagattgctctgagctactgcggagggtaggctctgcccacaggcgtctgccgtcccctcaggacctagcgcagggcaggcatgtgggcaccctcagcggacctcaccaggtgggaggcagatggtgtgctgttaaaagcacagccttcggggcagccaaacctgggttttgagcagtggctctgctgcttgaagctgtgtgaccttgggcaaattccttcacctctctgctcctgtttccccactgtaaaatgggcgtaatgagaatatttgcctcttggactggcccttgagaattagacccaatgatgtcaaaggagcatggagcacagggcctgccacacgcaggcactgaataaccacagcggtcatcgtgaggtccccacttgccttgaagggagctgtgtggctgagttctccgctgtcactggttcccttattgagcttgccttagggggcccaaggcctccttccaacccaaaacgtgccttcgagaggggcagagaccggccaccccacgtgtcttccattggaatggaagtcagggttcaccaggctgggggagggcattgatgccctcatgtgcatcggtctgttgggccctgagaaaagccctaaagatgcctggcaggggacatctcttcacaatgacatattattattttgaaaaagatgaagccgaattagcaagcatttataaaaagtggaaacaaaatgaagccactgggacaaaagagacactgcacagaccaaccaccgtgtgtgatgaggggctgggcaggcccacaggggcctgttttatgtggtggccctctttgtccccactctgcctgcttcccaggcctgcccctgggcctctctccaaggatgattctgtctccatttttggtatctacaggccttgtgggactgggaggactgaactgggcccagcattctccaggtgactcaccaggcaggccatgcagaaaagccacttcctgcatccctgagtggccagtcatcctcctggtacctgccttaagaacatgtgagccaccctcaggggcagggtgggactgggctgtgctccaggcatgggcaccacatagagaagggctgagtgagtgtagtggaagaacccaggccatccaggagcctgtggcttggggtggggttgggggtggacacagtgttcctggtgctttctccacaaaagaaacctcaccttcctaaagctatcgatccacccactggcgctgtggcaatgaaattctcacgggggaaagtctcagggccagcatacctacccctgcacacttcatgcccccaagcacagcacgccattgcagcaggccccttcctgaagctgcgcccccatgaatacgccctgtacccattctgagaatcaggtctgatattatgggaagaaaatgtgtgcctaggcatggcggggaggggcaagttaggcaggtcaggagggagagttttgacaagaaatccaagcacatgggccacagaggagtcttaaaaacaacctcagcccaactgtctcctgactgttcccccaacttatcagctcaggcccaggtcagaggaggtccaggctggcctggcacagcaagttgagcctggttcccagaccctgcagctggttttgagcaatggaagtggcagtgagtctgtgctcatggagttcctgggctcaggcccaggtgggggtggggatgggggttggggggatgtcccctgtcttcgatttgactctgctgctccagtcacagagctctctcagaggcagacatgaagccaaagcacttcattaagacaggaggtcagataacagccccagccctctttggaaaccgcacaccgcccagtggcatggaacaggccaggtcccagccctcccaggagtgccaggcattgtatttcagaactgagcttcagctactcccacaggaaggagacgacttgctcctaccttgtttttaatttccagaatactgcaatccccttaggaaaactcatgttttcatgatagaatggcagctgcccacgcatgtcagaggcttcagacctgatcctgatcctgatcaagcctggaacagtgatctctgggcagcagatgaacagcccagggaccagcaaagagagcctgccctctgtggtccaaggctggccaccgcggcctgtgctaggcagaagagctcacaggtgtgtcctgctttacttaactcaaagacagctgctcagaagttgcctggaattggaactgtgatcaggccaggccctccttaggtttccagagggactgcttatcatatatactacctgtgtggtgaggggtctcacttgaagacataaaaaatgcactccaaacaggaaaacaacttttaaaaattattgacatttaacgatcagctgtgtgtgtattagggatttttaaaaagtgaaacacagccaggcacagtggctcacacctgtaatcccagtactttgggaggctgaagcagaaggatgcttgaagcaggagttcaagaccagcctgggaaacaaagcaagactctgtctctatttaaaaaattagcaggtgtcgtggtacactcctgtagtcctacctactcgggaggctaaggccagcggattgcttgagcctaggagtttgaggctgcagcaagctataatcttgccaccacactccagcctgtgacagagcaaaaccctgtctcttaaaaagaaaaaaaaaaaaaagagataaccctgcaggctttcaaattatatacacatataatgataatatactacatttatattatgtaatttggtttacagagtgcttctatatgcccattcatttatttatccaacaatattattgagccccacaaagacccagatattctcctaggcacagggagatacagcggtgagcaaggtgcataaggccctctgccacttctgttgaccttactgtctggttgggggaggcagacaaatgacaaacaacagacaaatgaatcagcaagacaagtccagggagtgacgagtgcacgagtcaggtaatggctacagccagactatctaatacaggagccacatgtggttatttacatttaagtctaaatgaattaaaattaagtgaaattaaacattcagttattcacactagccacatttcaggtgctgaatagccaatgtggctagtggttagtggtatataggacatttccatcatcacagaaattgccatagggcagcacagggctagtgagagacttaggactgatttggaataggtggtcagagaaggcctctttgtggaggtgccttcatttggaatctgaaaatgagaagaaaccagcagctcacaggcctgagtgggagtgggtgtgggcagacagtttcactcactctagggcaaaagtccacatttagacataagtttggcaaatttgaggaacagaaagaagtctggtgtgactggagtgtaatgaggtgggggtggggaaagtagagacgatgaggtcaaaagtaataataaaaacagctgtgatggctgttgggtgctcattacatgcatctataaggtaggtactgctattctcattttacgaatgaaaacacagacacagagaagtagagatacttggccaaagttacacagctagtgagggacagagctaggattccagctggtgccatagccatggagcacttagctattatactacacttcaccacatctccagagtcaggggtgcattatgaatgccctgtgaggagtgtggaccccatcagggtgtgaaaggaagtccttgaaagtttttaggcaggagtgtggcatgatctattgtacttttaagtgatccatctgttcatggtggggagaatagatggtagaaggccaagtcaggggactgcctcattattcgaggtaataacattactgtggctccaactaggagagcagcaattcttcttctttttaaaagcctatcagacattgcacttctatttttcatggtttacttaccttcaaggactatggcaggttttgtctttttcctaagacaaaagtacacacacattcctaagagttagttgctccaaaactcaataggtacatgtcagcatgcatttagctgcaggaaagccagtttttgccaagccttacctagttctgtttaaagcatcttttctatacattgttatcaagttagaccaatgatcttcctagactgggaggtctgacttgagctggttctagctccacccggggttgtttccatgtttaggagaagggggtggagtcctgatccaggtgggaacccaacttgtggggtttctgcgtggaaaagaacttcacgggctgggtggtatgtaagcatctccatctcgtgcatttagagtggcaggtcttaggactgcagtaattggtcctccctggaccaatttaccctgtgacattgactttgaatgtagggtgtatgtgttccgggctcccttgtaaatgcggaaataaaggaaaactgacagacctcccagggagagagcaggaatgttatgccatataaacccactaccagccctgcaaacaactgccaaggtgcttcaataaaatataacttccgaccacctccagccctaacactcccctgtcaaatgccaattgtttgtttagaacttctcctcccactagggttaagaggagcaaggtggttcaactgcagtttcccctccagccactgctcccttctcagggtctgtttgggatacaagtcaaggtcacaactctgtggtgctcccagcacctgaaaccctccccaccttacggcaggttattcagcctccctgtggctgcctttcttcaccactgaaatgaggataattatggtaaccatcattctacctcatagcactgttgtgagaatttaatgagttagaatgaattaaatgtcagacagaacaattatggtcagctatgatatcatattgtcattactggaagggagaggataggaaaggaggtggctgaagccaaagcccggtctcaaggctgcgatgaataaggatcctagagtcacccagaaacaactacgctggagcttctgcaggttaacaagaggattctcatacactccaggtactgccccagaagtcactttgtaggctggatcaacaccaccccacagctccagctgcagtttctgccctgcactctggggcagagcagcagggggccaggccacttcctaccttgcctcttcctcctttctccaggccagcttgggtcagatgaagcagctcctgtagtagaatgcaaaggaaagaccatctcaggtgggtgtgaggcaattacagtagcttcaggggaggcagagtcacttgggttctgccagtgggtgagtaacctggacctcagcctggttggattcaagtctacagcccctcctggagtcaccttctctgggctgcagagctcacaccgcccattctgcctagatgtttctttgcctgttgtctcagcaggttacaattaattacaaataacagtgactcacaggacagcagttcccttatttgccagggaagtcttattaagattaagctattctcccaggaaagaaaggtctttacttttcaatagaggtagagggaagcaagcagaggactgtgattacagcacagactctggagccagatcgtctgggtttgaatctggccccatcacttacaaagaggtgtgccctgggacaagctagtcagcctgtgactcagtttcctcatctgcaaaatggggatgtaaatagtacttacctcataaagttattatgagagttaaatgagttaatatctatttggagcttagaactatgcctggcacatagtaagtgcttatataaatgtttgataaataaaagtccaataatggagaattacttatataaatctacataattcaatattacacagccattataatttctatagcaacatgggaatccattcatgatctattactaaagtaaacaatatacagtttaatagtatacagtttaggccgggcgcaggggcttacgcctgtaatcccagtactttgggat

SEQ ID NO: 34359 - DNA, 1447 bp, Homo sapiens
caggagagttccagtgcagacaaagagttggtctggaaaacacccctaatcgggagccagttctatgatggtctaaatctatgacactttcactagattctcaaaggtgattacaaccttactctgctttgcacttcctagtgtatgtcatttttaaagcatagcagactcataggcactgggtgaggagaatagctgagaaatgttcttgggaactgagaaatactgaccaaagctaggagtgatgtctgcctatcagcgttcaccaagtcactttatcaggtccagtgtggttctctgctctgtgttcaccccctgggtatcactgccacctatctttatttttctattgcatttgggaggagggacagtgggtggcaactgaggagaggctgttagagaaccgaataggagaaaagtccagctgtctgcactgtgaacctttctcaggccatcagggggctggttggccagatgccagggaatggtggaaggttctgggcctgcatttcctagccaagagcattcagtgtataactcttagcaccctgttatccctctcccaacactattgtgcaaaattaggtataaccccagccagtcattatccccaaactaacctcacaagcatacatcacaggctgatgcaacccacatcctgcggcacagttagccggcccctgacaacaatgtttaaagtgtggccaagggtgaaatattgcctcactggtctgaaaaggcttttgccaccaacaaaaaaccattatgataacaggaaggcgccgaaagctaagcatagtatagacaggaaagatctctctttctctacccttcacaaaaaagagagaggtttttaaccctccagtgtccggctaatttcctaagtaacactggccaagggtaactgcagcaccacactgagctgggcattcaggaggggcaggagtagttcttggctggaaggctgtctgccagacagcaccagaggtggcacctggctgtgttaccaagcggcctctatgggtgctaggggaaggagtgtgtggagcagagagtaccattggggcctcacaagcaatttttgctttttaagtttcctgttttttcttcattttcatgccaactgcatcaatcaaacatttaaataaccaaatgacaaatgttgctggaaagcccactaggtacctgtcaagcaccacactaaatgattcaggggagagaaggaacacacctgcccttgcgttatttggaagaagataatacacataagaaagagaaaatgatagcctgatgagctgccatgagcacaccagaaagccacacaggaggtgctgctgaggtccagggctggaacagaccagtggctcatttttccttttaggtcccactgtctaccatggtccacgtggaccatcagccacatgccttgcccctcgctggtctcaaa

SEQ ID NO: 34360 - DNA, 639 bp, Homo sapiens
ggggatgctggaggcctctcatttcgtggagataaggtatctggcagcctgtaaaacaaacagggcgctgcctgggagagatgcaggtacccctcaagccataaaatccctcttctggtccccagcaagcactgattctgtggtaggtcacccgaggggactgaacagtcacagatgaaaataatccctttagttcaaaggtcatctctgccaccctgctcaaggacagcaggcttcaagacctgagatctgagtgtcgccctttgtccccaagggcctttgagcgctggctggaaaaggtcctggagcgtctggggttttacagggtaaagagagcagggtctataatttcccaaccctgggggaggagacagaaggagcagcagacgatataacttcccgaaaagcacagctggcaagcacacccacaccgttaggctgcaactccctgaactaattaaaaggcagagcaatgggaatttctggattgctgcataagcagctcttggggaaaatacgctcgtggtattgcaaacacagagctccctcttcacttccaagagccaagttggacacaggtgattacagtttaggactaaatatgtgggtaggaatgtgtgtgtgtgtgtgtgtgtgtgt

SEQ ID NO: 34361 - DNA, 1726 bp, Homo sapiens
tgcaactcacagtgtggtccagaccagcagcaccaggtagtttgttagaaatgtaaattctctacccccctatcccaggcctaaaagaatcagaattccaatagtcctccaagtggttctaacacacatcattgtctatatcatctccatcggctttttctactctatgtcctttttcatggctacccctcatagcagtctttttactgttaacatttcccctgctcattcagattccagcagtcttaccttttggaaggattgccccagcaaagctgtaggtggtggttccaccctgcatccctcccccagatgaccctcctttctccttctctgtatttcacaggccctggaatgctccctgtgtccccagcccccagagctccattctgccttcagcttggtccactgttcttcctccacctataggtgtgaattatattcactccctcaaaatgtttaagcaaaggccgtctcataggtcaggtaaatctattatcaggtaagctttgtgtgcagtcactctggtcagtccagggcaaaggtcagggctccacagtgggctgaagccacactttactaaaaagaggcctcacctcactgcccccaccccctcaatgagaaagctttcactgactcaaatcgggtgtggctaccacaagtccaaagctctgaaaaactaggacagtttctctctctctctcattcacttttaatatggatataatttaaaagttacagaaaaattgtaagtacagtataagggacttccatgtgccctttgcccagattcacctattgctttcattgtgctccatttcttttgtggccttattactatctctgtgttcttccttgactattttaaagctagttggaaacattgtacccctttaccccttaatatttcgggatcaaagacattctgttatgtaaacatattatgattgcaactttaggaaacttaacattgatacaatactactatctaaaccacagttcaaattcagattacgtcaattgtcccaataatgtcctttacattttgtattgcttttttctcagcccaggatccaatgaaagatcaatcatttattgcatttaattgcatttagctgtatggccctcctttaacctggaacagttctgcctttctttgactttttggaccttagcaattttgaagggtactagccagttgcttagcagactgcccctgattttgagtttatctggtatttcaggattaggtttaggtaaattttttatgacaggaaaatcacagaattgatgttggatccttttcagtgtatcttgtcagggagcagggagcacatggtgacatatgccccaatactggtatgttagctttgatctctgcaaaggcagtaaatggcctcttggtggaggctgtcctctgctggttattctcaacattgcatcacttcttggccttttggctaagatcaagtgtattctcaacattgcagctgctatgcctctgctgatgtgattgacaaaggaccagatgccctgagtacgaactctgacacttcactggttgtgtgaccttaggcaagttattcagccttattgaacctcaatttccacatctcacaggatggttgagggcgaaggggtcccacagagatggtcatgcagtgtattcctaagctaaagtctacactggctgctatgacttctaggcgggcagggcctggtggtc

SEQ ID NO: 34362 - DNA, 3023 bp, Homo sapiens
aattcgcatccttgcacgttcttcctagatgtgccaagaatgcaagaccctgatcacgctttacttgggccatttctcagcgttgtgtttgcagcgagcaatcttgagggatgaggtaatgtctccctatggaacaaagagcaggcttgcttactgctcactataacatggtgggttccccaagctcagcattcctcttctgtaatgcaacccatcttgtgtgtaagcatgcatctgggcccgtgtgcttcgttcctgtgagaactggggtccagggagccaactcaaaaatggtgatactctggctattgcttttgttgtaatagtcttttatctctgactcagaagtctggtgtgttctgtcagcattcatgaaaccgtgaaagctaacgtgttagtttgcaaacataacaaaatatgattcatcacagttctccacgctcactagctgggcgtccctacacgagttttttaacctctcttagctgcagtttcccttctttatattataaaggggacggtggtgtgtatgtacccgccccatagcttcgtcttggggttaagtaagactgtaaaatccctaccacactggactcttcccaggacttccctttccctctttgaactctgccagagactattctgcatttgaggcctggcgatgctgggcaggggcgggtatgggtgaagcacagggtgggccgcggctggcgggtttggtgcagaaacgggctgtggccgagccgagaaagcgcgcccagcggccgccctgcgaatcctccgtaggcggggccgggactgctgtgagctaataggaacgggggccgggcgttcggtctcgccgctgcagtcgcagagcaaccacgcggctttgaccgtctatttcaaagggcttcggggtcttgcggatggggatcactgcgggcactggaaacctgccggcccccacccagccgcctctcagattcgtggcgaccgcacccttctgggcagcggcgccaggcccgctgccgtccccaccgctcgcagccaccaggaaaccccgcggccgcgctcgagcgcgcgccctccgaccacatgcacccgcatacgcatgctcccagcgctcccacgcgtgctgacaccctcccggcttccgcccacgcagtcgcgggccccgggcgcgcgggctcggggcagctgcgcggcgtccttggaggcaggtgctggcggcaagacgagctctcggaggatgctgcggcgcggggcgcgtcgcccccctcagtccaccagagcccggatacctcagaaattcggctctgggtctgtggggagcgaaatgcaacccaaaccccgtttttcgaaccccgcgcaaataaacacgcacaagcacgcacacagacgtcgcgcggcggcgctcgcgcgcaggtccagccgcggctgggtcgggcgcggcggccgggcgcgagggaagagcccaggcccgagaggggtcgccgcttacgtctcgcagcccgaggggaggccgctcggcctcggccgctcacaggcgcgacgtaaaggcccggcgtcaccggcccggcttaacggtgcaacggctggcctgggcctgcaactctggggtcccggccgggctggagcggccgccggagagacctggtaggcggggcgcttggggcaggaagggagccggggagggaaaagcgcgactgtgattcgtacggctgggcccggaccgtgaaggggaccgggttgcggctgccctcacaccgaccaggtgggaccgtcggactgcggccgcccttggctcaactgggtcgccgaccttgttgaggggcgaccactgcggggagaccgagagcctgcggctggcgtttgaggcggatggcagtgccctgagcgcggcggctgggtctcggtgacactgacgacgggaggcgcggtcggaagagcgcggggccgtcgcctctggcttaacatagcagatgcgctgagactccaacaggtggctccgtggcgcaatggatagcgcattggacttctagaggctgaaggcattcaaaggttccgggttcgagtcccggcggagtcgtaacgcttttttccctcccccctacaatttattttctgcctccatcatgtctcttattttttttttttgctaaacggtttaacttctctctcattccctgctctcgcagttcactgcattcggttcttgcggtcctttcttaagcggctcgcagggtcccgagcccctcagctccccgggcctcggtggcccagggcccagctcagccgactgggcagtcgatgtaggtcctgagaagagcggcggcggcggcggcggcggcggcgaaggaaaagcgacactgaagcgaaggctcgcggtttcggcctaaaggaaagtgcaggggaggcccgggtctcgggtgacacccccacgccttgagcgggactgtggttgcgagggagggacgagaaaacacgcctacgccctgcgtgcgctgtgctgactacctctccagcatggaggcttccagatgagcagacacccgaatcccagcgggagcccgtcaaaaatggagatttctgccgtcactctgggactcttaattcggtccgtctggggtggggcccaggaatctgcatttctgataaggtcacccgctcccctcccccattattccagtgcaaagaggtcctaggcccagtgcccatcagctcctcaagacaggaattactatatctttttctgacaactgttaactttgtacaaggttagcaaataaatccaggaatgaatggaatcttaaaactcgtaaaacaacaatgaaaggtaattcacacaaaagatacaaaatccaaaattgtcaaaaaagatacagggaaaagtaaacatccatgttattcctatagtccagccttgcaattctctccacaagccattagtggtaatggtttcttggaaatattttcagatttattttatgcccatatcagcatttttaacatcttttgtcataaatatgtcgtaaataaca

SEQ ID NO: 34363 - DNA, 1926 bp, Homo sapiens
caaacaaacaaaaaaatcaaaatttaaacactggagccaaccctgcatttacttcactagcctcatccttcctagatgtaacttcagaagcagaacgattaaaatttttctgtttaaagtcaaatataatgggtagaccaacattctgacccacctatagaagaggggagaaagggaatattaactctgaacaccgatgtgtttaggaacacactgatggaatcagtcgccgcccttacctttacgtacaggaaaaaatcgccgccgctccgttccctgcatcgctgagtcagaatgagacagccgactaacgccactaagagtcaccaggcgacgacaccacagccctcctcacgccttaaggaggtgatgctggacagctgccagcctccccacgtgaaaacgaagctttttttccagcccccctaaatggggcttgtgcatggtggccgaaattaaccctccttggtaccgtgttaacagtaaggtttaaaagttcgaactgtgcttctgcattaaggagttgaacgacccaaataaagttatctaacctctcttccatactaaaaattgccttaagagacagtggtgaaggctaaacagtttccgtgacaggcttagcacggggcctgggagacccaagcgcgcggcaagctcgggtcctctctgtcggcaggtcctcacccttaaccggacccttgcgccgccccgcctgcctgagcgcggctctgcgaagcggcgagaagtagggaagactggatttcctaccttttgcccggaactttcagccgacgcggcttggatgctggccttagcccgtgcagatctggtaaccaccatctttccggctccctcgcgaccaccacgacttccctcttccctggcgctccggaaatgcgtcagagaactgcctcgagcgcgttttccgcgcagatccgagaattcgcgagaatctccgcccagccagttcaggccagggcggtcagagacaaagggcctgggtttaagtgtgcatttcagagctgtagaaggcaagccagatttttgctgggaaagaccttcatcggggcggcgaagcccgcagtgacagagggtcttagcgtacccgttcacatgaattgtaaaaacgcacttacatgccattcgttctttcatttgtttagtagaatcgtttgaacccgggaggcgttctttcatttctacgttctaaagagcttaatgtagccattggtatgtccaagggagaagtttgagatatttgtgctttttaaagaaagacaatatttactcgtgtattgtgacgctaactataaataaaatttaaggacttggttggggtaaaagggatataaggtgctcgcaggaactgggagacgaagtggaaagctgtataatctaaacgtgagatggtgtttagggattgggaatagcagaaaagaaaaaaacgttaaagaaattgtaaaggagaagaataaggttttgttgttgttgttgttgttgttattgtcacagtgaaaggaagagtatgaccagaatcaagaggtttctttggttatcttttgagataaaaggtagagaactatgtttgaggggatgggaaggggttgaaaaaataagtaaacgcaaattattgttggaggtgagaaaggatgaatgagtgcctcaccaaacctagtctctacttcatgacagaaaaccaattttttatttaaagtcacagaacactgtgtcgatggacacactgcttcccagcttaaaatagcttattttatagtctctcttgcagccaaatgtggctatgtgactacgttttagccaattaggtataaattgtgtgcatgtctttagggacggcatctaaaagagaggaggccgtccctgacttttttttttggagacggagtcttgctctgtcgcccagggtgg

SEQ ID NO: 34364 - DNA, 986 bp, Homo sapiens
tgtctgactagaattcatatcacaactatgctacatttctcaaagacaaacaaattaaattattagagaataagtgtggctggtaaatcctacctcagattcacctgtgctgtttattaaaatttcagactcctgagcctaatcctagacccactgaatcattctccaagagcagtttggactttcattttaacaagcatcctaaggagagtactttatctacgtactctaaagtctgagaaccaccaggatagacatatcttgcagaactcaacttgtatgacactccagaagtcatttcgtaacatttaggtgcacctctaacctatcttccatgttttcttagataaacaaaaaaaaatttatacaaatattatagtatgttgtaaattaattcaaacatactttattaaagtgtatttcagacttatttgatagtagtccaaagtaagacatacattcacatagtgagcaaagacctatatacatataatggaacaaaacagtcataaagcggtatttatgctcacaacatgccaggcactctaatggcttccaatatattaattagaaaaaatatactggtccatgactcactgaactgatttatgaccactaatgggccaaacctggcaatctgaaatcactgccttattagataaccaaggacacagtgttttgcattcttctgtgggcaatcaatgaaaacacaaatgagtaactagaggcaagcccctgaattgcaaaagcactttcctaatagaaacagcagacactaaacttctgaactatctgaactatgactgcttatgataaaaactgatacaatcactttactacgtatatcttagtacacatgattacaagagataactggtttatcaatttaagggcacagaactacctatgttaagatttacaatccataataataatttacatgctagtcacaacaattcacttgaattcaaattataaggtctaga

SEQ ID NO: 34365 - DNA, 3034 bp, Homo sapiens
gtggtttaaataaaacaaaacatacacactgagctggaacgtgaacacagaatatggtacagactcagattcctactaaagttacaagcaagagttctcatctcttgatgggcactgaccccaacaacaggcctgggcacaggtccagcacttaactcagagggatgccgtgtgctgctgcatggtctgttaccaacatctcatagaagagagcagaaaccacttaggaacacagctgatttaggaaggtttttctaaacacacatagtttaggaaggtttttctcttaattaagatttatctttctgatggaaccagatgacagggagatagatgcctgcatggtgagcgttttcatatattacctcttaattctcacaacaacctgatgaggaaggtgttattatccaactttaaagtaattttccaaagtcatatagctcctaaatctaaagattttgttattttttaaatactaaaattgtcccataccaccaatatgcacaatgtgcagtggatgactatccgctcagaaatggccaacaaataggtaacaagtttgtaattccagattaatctctgtcacctccaactagtgactagtctttttattttccagtttttacaaaactttaatttttgaattgatagattatatttgtacatatttatggggcacatgtgatattctgttacatgcatagaatgtacaatgatattgttacatgcatagaatgtgtactgataaagcatacatagacgcacagataagtgcataaaatgtgtaatgactaaagtcagggtatttagggtattccaaagccaaaattgagtgcttactcatttgcctcactgcaatagagagtctaatgtcaacattctaaaagttaggtgtactatgaatactacttcatctgaatgcaccaaaggataatctccgaaaatattcctttacctggacagggtgggggaaggaagcgagagatgtggagagagacggagcgacgtcctggccctctgtgacctccgtgccaggaagagggacccaggatgtttgagagttttgctaccagccttaagcaccgagagaggtgtcactcagtgcgcagctgcaccggctaagttttttagacgcgttgccctcggcagcgggtttggacccaaggtcgcgtcgacactggcctcagcatctgaccgcgggcggagcccaggtgcgcgcgaggccctgccaccctccctcgcccgcgggcgcttctcccttgccggaaccgcccggccccgcccgaggcctgccccgggagccccgcggcgagtgtcgccacgctcacctcctcgctgtgcgtggacgggcacttcttccgcaggcggccccagttcagcaggttccccgtctgcaggtgcagggtgcgggcccgcgccaggagcgccttggccgcgcggctgtcggtgcccatggcagcggccgcccaggggccgcgcagcgaaggggctgcgggcgggcgggcaggcaggcggccgccccacaggacgcggtgcccgaggcccgagagagacccgagagggagcgcgaggctgccggcgccgcgcggctggagcctggtctgcgctcgggcccgagggaggccggacggcggctgggcggcggcgggaaaggaaggcaccggtggctgcggctccggctccggctactgcggccgcagcgggagagctgattccaaactgagggagctgtttcctggaagacaatgactaagcagaaatcgtagccgagaaagtgcttcgtaaccgttactcatcccgcggcggggcaggggcggggcgcgaatgggctgcgggacgccggcccgcaagtgactggcccttggcctgcggcgggcgtggcgacgggtggtgcgcggcgggcgcgcgggtcgagagagcgtggcggcgcggcccggagcgcagcgcgcggcagggctccccctggcggtcagaggacagcgcgaggcagacaccgcctccgcctggtgaggtagacaccgcctccgcctggtgaggtctcccggcgttcaggtcgcggctccgcccacggccgccccagggtgggcttcctacacgtctctttaaagggcagcctgagcggccaccgggactcggaaatgctacgtagttttcgttctcagaagcagctgtttatgcgcaagcgcccccttcttcttttcgctttgctaccttcaaggaccttctcccaaactgctaatttttcttcatccgttaaaggtctattgattcacattatttgctggcagtgtgtgaagtcaacgaacaagactgagtctttgcccttgagacgcgtacactctacccagagacaagttctaagcacaggaaacaagtaattttataagaacatcatagggcagttattctccagatgaattcagattaaagaggacacttgagccggtgagatcacagaaagcttttatcacccacccctttagaggtggtcgagattatttacccctattaaatttcacgtgtggtggtggactcggtataaacatcaaattgaacatgtattgagctttcctcaacaatctttcacattcgttgaggtgaatcagattattaaaggcaaaatgagattctcattataagcggggacaatatagctattgaaaagagagatgaaccagttggtaaaatggtaagaattaggggagggatgggaaaaaagatctttctaggaagttagaaattgagcctgatgttgagtaaatatttgttggctgaatgaatgatggtaagagttcattgaacgagcttgcgctgctttttttttttttttttggatattgattttttattatagtgaaagagctacccacaagcaccaccactacttaaacacattttgatgcactgtaacatacaattaacatttgttgtaaataattccaacatatacaaaaatagcaagaatactataatgaaacccgatataactatcttctgaactcaagattgaataagatttgtctatactttttgt

SEQ ID NO: 34366 - DNA, 1157 bp, Homo sapiens
gtattttgttatatgtataaaatgtgtaatgatcaagttagggtatttagggtatccatcatccatagaaatttatcatttctatgtgttgggaacatttcaagtcttccattccagttattttgaaatatccaacacactgttgttatctatagtcaccttacactaattggaacttattccttctatctaactgagcttttgtacacattaaccaacctctcttcattccacccccaaccccacacccttccctgcctctggtaactttttttttttttttgagatggagtgtcactctgttgcccaggctagagtgcagtggcacgatcttggttcactgcagtctccgcctcccaggttcaagcaattctcctgcctcagcctcctgagtagctgggactagaggcacctgccaccacaccagctaatttttttgtgtgtgtttttagtagagatggggtttcaccatattggccagactggtcttgaactcctgaccttgtgatctgcccacctcagcctccaaaagtgctgggattacagatgtgagccactgtgcctggcctctggtaactattattcaatactctggtaattattattctactctctgcttccgtgagatcaactcttttagctcccacatgagtgagaacatgcaatatttgtttttctgtgcctggcttatttcacttaacataatgacctttagtcccatccatgttgttactgccaatgacatgatttcattcttttttaacttctgcaataaacatgggggtgcaggtaaccctttggtatactgatttcctttcctttggataaatacccagtagagggattgctgaattgtattgtatggtagttctgtttctgttttttgagaaatctccatactgttttccataatggctgtactaatttacattcccactaacactgtatagtagttcctttttccccgcattcttgccagcatctgttatttttttgtttttaaaataatagccattctaactggggtgagataatatctcattatggttttgatttgcattcccttgatgattagtggaattgtgcattttcatgtacttcctggccatttgtattcttcttttcaaagatttctgttcatgtactttgcctgcttt

SEQ ID NO: 34367 - DNA, 523 bp, Homo sapiens
ttgcccatgacctcagttaaagtccaacaggggggaaggccctcacacccctccagtctggtctcaagtcatccccatgtgtaaactctgtgctccatccaaaggcttctcttctttgtgttttgaaactcccagtggtttccatggccatgtcttgagtccattctctctctccctctttgctggcctctcctttatttgcttatagaaacccagctctcccttttacactaaatttagatggcagcactcttttgtgaaatgtttcttcattatcctggttaaacattatatatcccacctgtgaactgttgtgacatttagcttctgttgacatttgttacatatttctgtaaattgtcattatttttgtattttgcttacctaatcaattagtaatctgctcctggagttgatgtgctatttcttagacttatatttttaacatctggttttgagtgttgtgtttcagtgccatagattgcttggtgaagatgtgttgattgaattcaactgtgaataa

SEQ ID NO: 34368 - DNA, 4793 bp, Homo sapiens
tctggttgtgtcaggacaacctggaatgtctcttgaactagtcacccagataacctcaattttaagagaaatattaagtatttgatttgtagaagcctattaaaaacaaaaacatttttttttctcagtgccaaagagagaagaagttaaacttgccatctgaacaatggaattcccaaagcacaaataaagagcaacttcttttgtaaaaggattttgagtctaaagagcttgtctagaggaagctatcatgagccacccacatttgcaatgcccctggtgtggaagggaatagaatgtcagcagaggttggctgagagaaccacaggtaggacaccatgcctccctgaggatggtagcctgagttctggtcctgaggcattgatgagagctgccacaattcacaggtgtccttaacagcactcattcatacatgttcagataggctttagtttagagaatagatatattacagcagggatgtcagcacattttgctgtaaccaagtctgtgcttggtctttcgctgtttcctgaacatgccagactccttaactgcacttgggtttcttgcctcttccgcttccctttcccctgggtccctcccaatccttctccctctcccattgagccttcccaagtaactccactgctcactaatctcccaatttttggaaatgccacagtctttctaacttgtaacttcatggttttgcaagtgctgttccttcaatctggaacattcttcttcctgtctttgcatccccttctgatggtaaaggtggtgttatctgacatcagattgtggagtttaaggtctgcttctgacgattttttggacatgccacttaacctctctgagctatccatttcccataggtaaaggggacatgaataacagtttctgcggcatggggttgttataaggattaactgaagaaatgcaggtaaagtggtaggcacagtgccaggcatacaccaatccctgtgggccagtcccacagaacagggccccaccttcctttgctctgggtcctgatggtgtcccagcagtggctttggagttggaggtgggcttgccatccaccacatgcagcaaacacaaacaaagtgatgttgaattggggctgaagttactattctagagtttatgtggctgggtaatggggaggatcctctctgggctacagaatagaatgtgcttaatcactggcttatttgttaaccaagtcagggaaagtttggctaaggaccctaacttacatttggggttgtagtctttactcaccctattgcccgcctcatctgaatcctttagatttgtaaaatgccagaaatcgaagccaacccaaacagaacagtagggtttattggcccaaaactggcagggggacccgggaccagcctctccaacaggtgacgtctattatcacgcgtcctgaaggcgcttccagcttcctggtactcagtcctcccactgctggctgcagagattttttttttttttaaataaggttaaaaagtaacccttctcaccatgaataagcaaaaacactgaggcagaggtattgcacgctcaaagtgagtaacttgaatttcagctgccagatttctgagcttactgccagggcagaaagaaacagcagatctgagctgtggggattcttgggctttgtatttgccattacggtcagagacaggccagtctttgcttgtggatttttatttgtacacttctgagctctcagttgtttaatccaaagtagctggaactatggggtagtagatgggtgacacgacaagacatgaattctgtgtgtgggattaggatttggtcttgatataagctcaattacaatggttcatggggaaattaaaaaaaaaaaaacataagccctattgttctgggcccaaaatttcccggctgtgaacagttgttaacatttgctaagctcttactgtgcactatgcaggtgccatgctgcgtgtatgacagttattgcttcacatagtcctcatagcaacccttcaaggtggatgttagtcctatctgcactctatagattcaaaccgagattcagagaggttggtgactggcccaaagtcaaataattagaaagtggcggagctgggacttgaacccaggtctgactgatgccaaagcctgtgcatttaatagaatagaggaaaaatctcaacaaaccctctcctttcccactacctcagttagctcagtgggaatagattgctcccatcttccttataacatagttggcagcctctcaactccagcatcttaggaaaggggcatgggtttgcctccagagttcaagtgttggggagggaggctgaggctggtgacacagcacagcaccacagggctggttattgcctggtcttggcaaaaataaggtccagacaagatctgtactgtgggaaatgaggtgtggggaggcatgtctctttcctgtcaaaggaaaggtagctagctgcccaatatagatatccttgtttgtaaaaagcaccaaccacaagggtcttcaggggatttttgccctgtgactcacaatatgaatgtatgatgcaaggcgagtttgttttaggtgggaggatttgggttgggctgtctccagagctgaggtcaaggttgggtgtagcccagcctatgtgcttttcagattggccagcttttctcttaccttcctactcccaggatcatagccagcaccaaacccagacctttacaggctctggggtggagtcagagctagaactcccatttctggtgcaccatcctctcctctgccaggccttagggctcctgtttgctcctggtgaatcagcacattgagaactctgggtgaggggtctgcggcctcagtgacctccgtcggcatttaattctttttgtgtgttgaggtttctcttccaggaagagatatttgggccagtgtggctatttgttggagttttgccaccatctgtaccctagaactgtgtggagcttacaggtgagcaagtgagagcccagcccagaatgctctgtgcctgacatgagagtgcctgaaaggttaggccagaccagcaactttctcattcagcaactgtttattgaaccttttgcccagaaccagaggcaactgtgacaaatgctactgcccatgctggcaaaaatgcgcacagtctggtaggggctatagacatataacgagtcaaacattccacaaagtagtaatgtttccacagatgaccctgggtggtccaggagcagagctgatggtgtctaacccaggggtgttcagggaggactcttgtagcaggcacatactattccccaaactgtcacctctctaatctggatcccctcccaccacaccagccccttggctcattcttctattcccaattgtattattgccctctgcagagagtcacaagggatgggacatgaggctggagaggaaagcagggccaggtcacacatgtctcagtggagacactggacattttcatgggagcagtagggtgtgagacttcagttccatctctctcctgtaacctaagcatttatgagagagaaaccctttttatcccatggtgtcagcccacaaaagaagaacttctaagaaaaacttctaagagctctggaggcagaacaagttcaggggctctatgccagggttaacaggtaaccctggcactccacgctggccaccaagccagcttttgaccttggtcatgattctgttctggaaactggacccagggaagctcctgtgcctcctgcagctctgtgctttattccctgtcacaggtattggcatgcactagatgatgtcattgtggactcatgttgtcaccagcaacggtgaggagaagagctcaatccttgaaagccagtgccatatcctgtgtatttttttctaaatgggactatcttattgtaagttattattactaaagttttatgtacatgtatattccttataaaaaagaaacattccagaattttatacaatagaaagtggaatttcctgcctccccttacagtcctgtccctcccaaccattatccttccaaactttaaaagaaatgcatatatatgtaggtccagacatttcctgttgcagtatctttcacccaagcaaaaacaagccctcaggaccctcaaagtgtcccccagttctttccagaagtcccccaaagggtgccttacatgtgtccataagcctgtctggtgcttgtagtccatatggcaacctctctgtttctcttctcccacgtttgctcccacccttgtgtgtctgctgctcacagaagcttggagaagttcatgggagccagacaccaaagtccacgtcgtaggtgctgtctccaggtgcctcctgagtctccagtccttggttggcatagatgggatgatggtgtccaggcagaggtgggagaggacagtctgctcaatgtgtgccagtgtcctttgtcatctgggtccccagtctgctctgctcagatcctgcatctcatgagttctcgactgagtagtccccatcagcttctgctgctaatgcctcttgtaggtggcctcaaaatcagcctggggatcgagtggatgggaagaggctattctctctctcactgttcttttcccctttctttgcctctgcccactctttcaaataaaactctcttctctcctgtccttcatcttcaaagagtttaatttgtagaagccttttatgtattatgattattaaccttctatttatctatactgaagacacttgtatcagtttg

SEQ ID NO: 34369 - DNA, 1316 bp, Homo sapiens
tgttgaaaatgctaaatattgaaaatactttctcagctgcatcctttggcaaattccagattccttcctatccgtctttggttttgcaaggtccaaggtcagatatcctagtttccctctgcctaagcctcttcagttagctggcccagttttcagggaaataggaatatgaggcatagacattcattaattgtagctgttaaaattcccaagcaaatccaagtagaatgtggttatgaaagccaaggcctgttgccaaagaaagatgtgtgtgtgtgtgtgtgtgtgtgtgtgcatgtgcacgtgcatgtgcgtgcattgtgggatatgtgcttgttatataacttctgatccttgatccctggatgttatccagtgagtagctggttggatttggggcttaacatggcttgggagctgtttggagccttggtgggaactagatgactctgtgttgtctcaatcctgctgtgtaaatagtctctttccctgatccatctgccacagcccagctgcttttcagctccagtgatcctgcttactgattctcctagagacagagatctgaatggttggtgaggagcccatcccaggctggcaggaaggattctgggcactctggggacatctttaatggactgtaccgtaagatattttcagtgtgggacttccaagcttgctctgtcaaggaactttaacatcctgtgcagctgcttgagttctctggagagagctgtctgtcccacctgagctgagttcccttccccctctaaactaagctccttcctcctctaaactaagctccttcctcagagctgacccagggcccactgctgccgccagtgcacaggggcctgcaggcctgttacagcattggcttagtctggaaggtcatatatctggctgttgtatgaataaaaaatagtattttcatcctatcacttaagttacccaagctcagctgctgtagccagagaccctcactaacttgggccacctagtggtctaaggggactgtgctgcagtcctgctccacacaaacgctcagggacccagagtccttccatcttgtggctctgctatcctgagtccttgaggctgtttccatggtcgaaactgggttaccataaatccacatgtcatatggcagagtcggggaagacagcgtggaggggcaatgcttcttggactttggacacatcctttctactctgttctgctggagaaaacttagtgacaaggccacaccttactatgagcttgagaaatgtagctcttacctgggcgaccacccaccaacttattactctgttact

SEQ ID NO: 34370 - DNA, 1555 bp, Homo sapiens
tctcaaataattccaagatgaaggtaatagcactgctgttgatgccgatgaacagattagcacaagataaagccacataggctgtgctggggacatcaaacaggaaggatgctgggtacatcatgggaatgaccgcccatctgtgtgaaatgagacaactcagagtgatggagttccacattccattccacctacaatacgtctggatataatgcactccccttacacctgaggtgatgtgtgtgaactggccagagtcccaggggaccagagagatactccatttgttggtctctgtgcctcaactttaaatggagataatgatgcctgccttgaccacttcatggggttttgtgaggagcaaatgggctgctagctgtgtatatactctgtaaactacaaagccctgtacaattcataggagggttctccagcctgcaacacctcccactctagcctgggtcagcaaagcccagctgaggtcatctcagatgagcccagtgagctcatcttcacagcttatagtcaggttggttcccaaattctctatttccaagagaaagatgtggagaacaatgctttggcaaggctctactggcccacagaggaaggaccaggatcactattttcttttacagatgaggaaactgaggccgagatggatgaattactcattcaaatttacacacgtgggaaagaaagttgcatgctgggccctgtaactctgctgatgtaacccctgtgtcatcctctgtccctgactcaggaggagctttttggccggagtcttctactgtgggcggtaactcttggccagttcacatggggacactgaggtggacagattggccacagatgagtgagagtcagagctgggtgaggggttggggaatggctgcccccaggctttggtcaaggcctcagtttgagtaggagattcagatcatgtgggacttctctcattgtcactgacaggaccaggcctcagagatacctctgtcagtggagtcagaatcagaagccagacagatccctggttatcagcttcagaccctacctggggccggaagctaaacttgtgggtgctaccaccacaggacagcccaggttttctgtcaggagatgatcccccacccccaccaccaggcttctcttcagaggcattagctaatggcccaaacggcttacccatacagcaggagcagtgccacaagggcaggaaggttttctggagaagtgtaggctttcttctgaaacccgatgaagatgcccaccaccagcccagcactcacggaataattcatctcggaaagagaagaggagagcaagtcacttaacctctcagacctgctgccagctctgcaaaatgaggggtggggccaggctcctccagctcgtagggtctgggattctgattcgacttgctttttaaacagttcttggttggcaaacatatgttaagctgtcactagtcctcctaccccaccccatgccctacctccctgccaagggaacctttagtttgtatcttttgaaaggatcaattacaaaattc

SEQ ID NO: 34371 - DNA, 1167 bp, Homo sapiens
tgtcatctcctcccatcccagccaaggactccttttctgtgccacctctgtgctttgcaggtacttctagcagcacaggacccatcttcatcctgtcatccctacctctcggggcttctgtgcctcacacctgttcagggaggcccttagcctctcctgcctggacttgtgctctgcttcttcactggccctgggatctatctcctgtactgccctggaagtctgaagtgactgtgtggaaacaccagtctgagtgcatcactccctggcctcaaacccttcaaaggcagggcagaagccaaagtcaacagaacagaatgaattagctggttataccaagcagaggaggagctctttctcagggccttgaatcactgcctcactcctactctctgtctcagccgaggccccacaggtccctctggagagcaatcctgaaagccagatttcatgtgtacggtctagaatctgcccaggaaagcacatacatgtcagccccgcacctgttctggaggtgcagttcctgagggaggctgggaggcagcaggctcctagagtcccacttggtgaggttctaaacctctggaaatatttcaacctccaggatgcctcaggaatggggtgagtctggggctggcccacactccctgaagcttaaaaggaatgggccaaggagtgtcccgggtttaggctacaaggccctcttgttggagtattataaactgttatatacttggaggttttagaagctttttttgggtgagaatgctctgaaacgccacatcagggaatgccacccccacttatgtcctccaagaagaggcaccactgagtgtcttctgagtctgggatgtccctagccacatattcttcaggacgtgtcttgtgacttcctgagcacctacagaacagcccctcctcatggctgtgaggtgtgccttttaaaagtgtgcaattatttcaacaatgaatcaatctgagattttaattctgataaaaatagtttcttacctctgttcattgacccagaatttgctctttaagctgaaagccaaaataaaataatgcaatgaataccacaagtacagcagtgccgttaactttctttcccaaacattcattttgaagactgaagtctcagtcttcaggggcatttttgcattttcc

SEQ ID NO: 34372 - DNA, 725 bp, Homo sapiens
tattaaacattgttttaacccctgggggaagttgcatgtcagcagccgatgaagtaatgtgtttgcctttgcggagccctggggtcctggaatttgcttccagctctctgaccatatcagttagcatggagagaaagcagatggatgcagggccgccacacccagctctgtccctgagttctgataccatctcaggctatctgaacttgtcctgatggagaagccgaaatctccgcgatcaaccactagagggaaacagaaccaattagaatggcaccggccccacattccattcacactgaaccgccctagagaacattccatcacagggtgtacacgctgttgttccttcctggggctctccaaaggacttgaagactgtgtcacgtgggttcgctgccccctgcgaggtccgtgtctgctgctccttgggaaaccatggcgggccgtgttctcctctcagcagatggcgctcgggtcccttggaggagagtggggcgcctgcggagctgagagatccgcgcagagcccctttgccttccctgccctgaccttctgttaccaggcggttactccacaagcccctctagagactgattcttttttcactttctccagaacgaccactaaccctcatcagctgatgttgaagcctgcctaatgattggtaggaaaaggaatgttccttgaaaatagcaggactcggcctggtgcggtcgctcacg

SEQ ID NO: 34373 - DNA, 2602 bp, Homo sapiens
ggtggtggtaagagcaataacttggctccccaaggggtcagccgccccagcacagtctgccctggaaggtcaaaccctagttacacaaaaagacacacaaaataactaatcagtttggcactttcagaaggcgaatgatccatcaatacatcagttatccaacagccactggacccaccaccagccatgcacaggtggaggagaccctggtatatccacctggcaaacaggatagatttgatacactggaacgactttcttgtgaactttacacgttttccctgtgtttcatgtgctagtaaagcccttgggattattatctattgaaaactgttgtgtgttgtcactgaaagggcccaattccagcatgggagggtttcactcaaggtggccctagggagagaagcatatgttcgtaaagcatgcacttctgggactagccaccagaggactctcccataccaaatgacccagctccctattgcctccccacacccacctcacttccccaccagccactcccgtcctgatcctaaagtggacctgggctttcgcccctggctccatttcccagctctgcctattgtccgaacccaaactaactgcagactggccactgttatctcaagttttctgtagagctgaggctggaaaacccattggacagttattaaaagagggtttcctgtgtccacactgagttttaggtgaactcaattgtagatctctgctgctgttttggtagtgtgtctgaccccatctataatgacaaatgagcctcccaaccctccaccccggccctttctctaccaccccccaaatccatattcagtcaaacagtaggctgcttgcttggcttattcctggtcaacagatatacaggcctgggatgggagtgtccagggaggcaggtcctgagctcatccaacacattcctctgccttgtcattgagcatacatcatggaaatgttagttagggaaggggctgcattattccagggctcccaggaaccagacctactggccatacagagtccaaaatgaatgctgatgtggcaatcattgggcaaacattctgaccagaacccttccacataccaaacatactacatagtggggaatttgtcccctcccccagcctcactttccttgctttaattttccccttcccttttccagctacaacatcaactcttttccctttcccaccactgcactgactcatctgtgcctgcctggagcttgggagaagcaggttcctcagtcagagctccatgctctccaatttggctctggtccctggggctctctctaaagacatggaagccttgagggcacccccagcccaccccagcccactccagcacccccattagcgtgtcatggaggaggatcgcgaacttcagactcacgaatcgtccacgaagcaggggtagggcatctgctggaggtagattccaactggagcctccgcctgcacctggctccttgtgatcccctgttcaaccatgtcctgcagataggcaaacccgccccagatgtaccggaaatcttccacgggatcagctctgggaccagaatcccaatacctgagaagacacagagggacaaaggatgggaacgggcttggatagctcactcacacctcccgaccacagggtgactcggaactcattctcttaaaatctttctcctaaacgcttcaaaaggatccaattctatttcctagtcctcagtttaaatctcagttttgaatattagccacaatgtgactctgtaattgctttcattcaaggactctttgttgagctttataaaatatcttattttttcttatttaacttaattttattgatttatgagtccagtctcaatccctttctctctaccaaatgtaatttcccactgactttggagaaatgcagcgagcccttcctgaaacatcacctgtctttaatcttattggttttctccaccacgtctatgtccattcggatcttatacttcacgtggggtggtagagagctggtccagggatacatgtcagggaataccactccggcccagaacatgttttcctccagtagagagagggcacgttgggtgagctgagtttcatcattgtagctttcaaacttatccaggaccaagcactgcagagagtcacaaagttgagagagtgtgaggaggaccaactgcaaagactcaactctacacacagaaagtcacaggataagggctgctgtcccaggaaatggtcaaatgcaaggaggcctataaacttaatgtttgcttaactccagagtctggtgttaatttttcaacgtgtccagatgtaggggcgccagagagcttggaagtgctgacgtgctcttatccctgcagagctagtgaggaccacactttccagatgtccaaggctgtccaaatatgcaagtcttcaaaatgacaaaaatactccaggcttttactctccagcatggggaggcgagggagtggggtcacactggctacagcctgctttgaagatcagaaagcctgacgattaaagagctttaaagagagagagaaacattcctagccttgaacctttctggctct

SEQ ID NO: 34374 - DNA, 2514 bp, Homo sapiens
cagctgattcatagtcatgtttcctgatgcatccccctacaatgataccttgataatctctgggggaaaaaaaacttaaaagattctcaaacgttcatttaccctaaaacatctgacccattttcaaaggtgctttgtcttccttgccttgcaaattggtgtagcatagtgtttaagagtctaacagatctgttgccatttcctaattgtgtggcttctgtttccctacctacaaaattgagatatgccctatctcataggtttgttctaaggatcacattagacgctgtttgtgaagggcttacaattgcctccctgtaggaataaaagcagatgcttgctgaaggcttactatacggccaaaactggtccaaggactttactcatattcacccatttcattctcacaacaaccttatgaggtccaagttcacttaggagacacgactaagcaaagtaaacctcctctggaaagagcctgtgtttttaaccactatggtataccaaaccgtctcacaaatagttaggatctgataaataccatttttatgactgtttttgcaaaatatcttgaaagtcaacagacttttaagccccagccaggttaccttttagccatggcagctgtttatcaggggaggaagggagctattttctttaaataatatgtctgggaacatatcccatcctgagctgatccataacacctcatttggttagaacaatgctatggacagatgccaaagcccatgtcccaggtgggcagtaggggagctgagagggcgtggggcctcacacactgatgcttgctagctgcttgttgatcactaggtgaaagtcagacaactctgcccacaggaaggccttataaagctaatcccgaatgtcatcctccccacatcttccctagatcaaggtagagcaattgtagaagctgctttggacatgaatcagaagttcctgggtcaccctctgaagtatgagtcatgaggtggccttgcattctcatggggaagccacctgccatgcagcaagtgacctcattccctattggtacttgctttgatccctgaaatcaaaatcttggctaatggacatgtatattagtgcacgtatgtacataagtacgtttgggagacagagatgaatgaataaactctcagcagaggtttttgattttgatatatttggtctgattagcttgcaagttagaatatagtaggttctatgaggctacggccatggagtctatgtgtaaaagctgtctgcttctacactaagagtaactatgcaatcatgaatgttagggaagaatgtaggtagacaagaactggctattgtaaggggccagtgtaaggtgctcaaacctagcaccactagtgggaaaaggagtcaaagggcatctttgctgaataaaaacacagtgtcttaaggcctcagaggcagattctgggcaaatgttatagccggagctcagaatctcaaagagaaccattgtaatgccctatgacagccaatgacaataaagcaaggaaagggctttcctcctcccctttagtttcctaactgctgtggctgagcccaagtggcaggaccaccaccatttgaagtccacacaagtcctacagctctttgttggttgttttgctggcactcaccaggaagcagagttcaccctggcggaagaggtttgagccctctccagcgcaggcagctgtgttcaggacctctggagaatgcagtcatttgtttacacagctaaatcaaacacctccttgggaggacaagctgcagtagcagcaggcttccttctttaactgtgacctctctgtctgtaattcaaacacattcagtaacagatacattaaattatctgttaggtgggaaatgatgtccagtagaggcagagaaagaaagaaaatctttccttttgtttaaacttgatgatcaaagtggggagcaaccctgtgctgacgtggcataagaggacatattttgacgaatacatccaggacgtgctaggagtgaggtcttcgagggtaagggagccactgcccgcttagagatgttggctgtataatcccgcctctcacatctgtaactcctaaactcaggctgagaacaaagcgggcgatgaatgccagcggagggctcaagtggccctgctggtgtcaaggtagacacctggggttccttttgagaaatgccaatggatgtgggcaaacatcccagaatgagtttcctggctaatctaaacagtaacattcaagatttatttcccactacatggaaaaatccactggataaaacagccttgggctatctgaattggttggaatggtgagttagaggccgaaggcactgcaataaattttatcttgcacgctgggcaccgcaaacagacatctgaaacgttcacccacagagagtaaggaaacacatgacgactggaaaacaaagggacaggaaatgcacagctgttaaaaaatgtctgtctctaaaataaacaactta

SEQ ID NO: 34375 - DNA, 553 bp, Homo sapiens
cagtttatgaaagttacacatagaaaaaactccaaggctgagtggaagctgccagcaggttgactgcctggctcacaaagatttgctcttttctaggagtgactccaacaccaagggaagagtctgcagtaggcttgttaatgccaaagtggactggtcatgtgcagtcacatgatcttagctgggccagtcagggcctattcacagaaatttggggcatggatctgtgagaagcatgggttaatcattacagaagtacagaagtgttgagaaattagaggccatgctgggtcactaggttcagtttgtgtacgtaggggcctaagcaaagactggggactggatttcacttgtttttgctaaacaagcccgggaccctggtatagggctgcatcctatcaaaggaggtacctttttcctttcacaaaggcgtcttctgctcaccaaactatacaaccacgaggctgcatccacccagaggagcaccttttctaatttgcataaaaatgccatataggctagcagaggacctgaggctgtgttccccaccact

SEQ ID NO: 34376 - DNA, 883 bp, Homo sapiens
aatgcaacatactctcactaagacacctaggactagttgctttaaatgacagttctctacttacatatttccaaaggtaaatgccaaagtttcaatagaagaaaacacttcctggaagagatcgtttttgttttcttcattaacttctgtgaagttcacagctgtaaggaaaagttggttacaataaggaaaaacatactttaaactagatttatacagaatcatttaatcctttaaaacttcatcattagttcaagaagcattagaagattcagaaattgaaaagcctaacatacaaaattgacatgatgttcaaattcttcattatgaaattcatataaaagaatcagcttgcataaaagcagttagcattccaaactgactactccatggattacataatttgacacatctaaaaactgactcaatgtgaaatccatcagtgctggagtcacagagtccatgttacaccacacctctcaattattaacactgttctgtactattttctcttccttactgctttctggcattttaaaaaacagctaaacacactgtagctcactgaaggcaatatgaggtacattttttagtatgaattaccaataattaaagtcatatatatatacatatacatatatttgacaaagcataaaacctgtaacaaagcacatcacattaaaaaaaaacacccagtgatttggaaaattaaaattcctatttacttacagccttatttcttataacaggctcttgggctctgaggtccatgttaattgacatacagctagctgcattttgtttacaatagagatattctaatattttgcattttgttaaagcaaattatgaaacaaaactgaaaaagatttcttattttaac

SEQ ID NO: 34377 - DNA, 2567 bp, Homo sapiens
ggtaatgacgcatgcaaagtacttagcagagtgcctggttcatcataaagatgaaccataaagaaaagtcattattactagcagtgctttattgtgggaaattgtttttgaacaagatgtggcttcactacaatacataagtggattgtgagcaagaaatacaggactggaaacaattgtagaaacttaactgactctgtggaaacctactaaaaagcttccaagtgaaatttgaactgtgcaaatagacttgtgcaaaatatttttgacacactaattctggtgcatctctttcaacttcaaaccaacaatattaaaaacatgtattatccacttctcaaagaattctctagcaagtagaaaattaccgtgcaaaaccacttccattgtatgttgtaaatctaagtgttgtgtgcattagaaatgtagacacaaacttcctatcccccacgactgcaggagcctgtgtcaatcaaatgtccgctgccccacgcatgccccctgccaaatgcacattacggcagtagtttcattttaggctctctaattgaagtgtaaaactgcccccaaacatctatacttactatttcccattctaccatttcttcttgaggaaaaattgccagatatttcagaaatctgctatttcagcacaatttcagatttggcaagaatctactttgagatgctaaaaagattagatgagctcatcctaaaacgatgattaaatctttatggttttaaaaagcactctccacaaaaacagaatagggacatgtgagaaagagttttatcaatactatgcaaacaatttttaaaggaaggcatgcaatacacatgcacttcatttctgtacagtttgaacctagcacgctttaaaaagaggaagctgcccagcatcccacccctccagaatgtctagcattcctggcaggcagtactctcctttgaccagccaaaactactctttgccaaagagcaagttcctcatccaagaatttaaacaaagagggaagaatggagcaaccaaaatggacagccgacggtggtaacgacggacaaaagataaactatagacaagagatacagtcacagagacagatggagagaagggaaggagagctcagctcctgccattagcaggtaatatcctgccctccgaaaacatttggggccaataccctctgagaaagttttaaaaagataaacatagagacaagaggctcgtcagtcacgagggttccaccttgaaacgtccaactccagctcacccgccccccaaaaaatttttttttttaattaaaactgtcaaaccccaaaacacgtccacaattgaactgggacaaacctctgagactgaggaaaactctcaacgaaacccaaaaaacacagaccaggagaaaatgcaccacggaaatcctaaaatatctcaggaatgagagcccaactggagtgagggctgcagtcagggcaggtgggagcgggaatagaatccaggcaagaacacagacccatagtgatcaggagcacggattccggagcaaaagcgcctgggtttaggtcctgacgctgccaaccactagtctgtgtgcttgggcaggtttttaacctcggtttccccgtgtgaaccgagtcgaacaatcatggagtgttctgaacattaaaagagttaaaatgtgcaaaggcttcagaacagcaggcggacccgttgtacgcgctgtgtgctaactttaattacgatcgtcaccgtctgctcccggccaccgctggcgtcctccccagctcgtccgcgcctccctcgccgggcgcgcccctagccccggccggacccttcccgtggactccagtcctggctcgaggacacccgtccctagcgcagcctgccaccgcttccactcggggccgccccgcgggcctcccggaccctggacggcaattcgcgggcgctcgcgcgggcaaccccagcccggagccacgaccgccgcggccggagcaagcgccacctcctcacactcaccacggcgctccatctcgcgtgccggacgcggacgcccgccccacacctacggccgccgccaccgccgagggctggagctcgctgcccccatcccccacggcctgcggacgcccggccaaatctcagccgcagccgcagccgcagccacagccacaggcaccaccaccactgcagccgccaccgcccctgcagctaccgccacggccgcaccgcccgcccgccagccccgccccctggagcccagcccattggcccgcgctcccgggggcggggccggcgaccgcggcaggtacgggaggcaactagctcgcgcgcagaacgcgaccgtcagttgcgcgcggccggacgctgtcccagcatcacgggctgcgtcggctgcccttttggcttgcaggggacaggcagagcgactcagagaaaagtcacctgaggactagatgcggctaatggccagatgagcagctacatttcttatgagacacttctgtggatcgcctttttcctccctcttccaggggttagggcctggggaagggcgccacacgtctga

SEQ ID NO: 34378 - DNA, 2277 bp, Homo sapiens
ttgttgtgattcactcattctgaatattcactttcatatctaattttgaagtatttttcttgaaaggggaatctcctctcccaaactgaatgaggaggaagcgaagctaattcccaaagattaataaagaaaaaggtaaatgtagaacaaaaaggtacttagaactttcataaaacatctcctaacattccccttccccccgccaacccctccatcccccgcccaaaaaagatccatctttagaaaacagaggatgtcaaagatccaaaaaaaacaatgtggaacgccacccttggtttttaaagaggggtggtggtggtgaaaaggtgagataaactaggacaaatcagaggggctgaaagacaagggaggaacgtccttggctgctctgtttaaaccaaggcaagatcctccctgggaacaccgggtttctatcacagaccgggtcctgggacacctagtgaaacaaacgcacaggggtccgctctctaggtggtaggtgcaatctcccagcttgtcccttcctattttgcagagcacacgacttgccctagagccatggctgggaaaaggtggaagggcgagaccaggcagtaatgagtggggagagagaaggggaggagtagggtgggagggaacgacagagacgctccagaaggggcacacggtgagaatgcgcaagacggtgttttacaaccttagatctccctcccccaaagtaataaatagccagggtctaggtgaggtgaagtgcaataagaaaaagtaaatatggaacatgagatgtctgttttactcagcctttgcatgtgtcagactgaaatttcagaaaacgtcaccaaacttccaaaaagcatccccagtaagaaagacggacttgagacccggtgaagaaaaccaatggggtaagggtaaaggagcccctgaattccgcagtgaggcgatgagggctggtggctagcaaagggagcggggctgagacacgctcggggagtcctgtaaggggaggaaagtccacccggccagcttctcccctgctgcccgccggcgtcacacaactcagagcgcgcacccggggtccgcggcgtaccggcagcgcccgcccgcgtcctctcgctcgtccgcgcctgcctcgccgggcgcgcccctagcccctgccggaccctggacggcaactagccggcgcccgcgcgggcgaccccagcccggagccaccaccgccgcggccgaagcgagcgccacctcctcacactcaccacggcgctccatcccgcgtcccggacgcggacggccgccccacacctacggccgccgccaccgccgagggctggagctcgccgcccccatcccccacggcccgcagacgcccggccaagtggcagccgcagccacagacaccaccaccaccaccaccacagcggccgccgcctttgcagctaccgccacggctgcgccggccgcctgccccgccccttggagcccagcccattggcctggcccgcgctcccggggggcggggtcggcgaccgcggcaggttggggcggctgctcgctcgcgcgcagaacgcggcggtcagctgcgcccggcctgaagttgtcccaaccgcggccgcgtcggtcgcccttttgacttgcagcagggcgggcagagcgacttagaggaaaagtgactttttgtaccctcctgcagggagcaggttctctgtccttgtttaattagacatttctcaggtgggcactttgaattccttccagtcaagactcaggtgttcaacttgttttgtcggccgtcttcctccacccttcttctcccattcaaaacaaaagtacgttttgtgcttaactttaaaactccccccactcttttctgtcttcaactgattgtcactttcagcaaaccaaataaattactcaaaacatcagctattatacagtccccgacacatggcaggtgctcagtagatgctagttgatcgcatgtcccctaaccacgctacctgcttcttaccattaagtgctccttcagtcatgggactgatcaacacggtggaggaagccgcaaccaaaataaaacatttatctagatgttggatcacacatcatatcatgtatggaggaaaacaaaacactgcatttatatataatatatattagtaacacttaccaactctactaagaatacctttcctgtcacctgtgctgacacataagcactccatgaatattagctgattaatgggtaaaattatggaaagggaatttggaaaaatcacttaa

SEQ ID NO: 34379 - DNA, 3294 bp, Homo sapiens
cagagagacaagacctcctgcaggaagtatccattcctacttacctccagaccactggagtcatgggtaacatgaccattcctaatttgccctggacagtttcagttaacactaattgttcaggtaaaattattgatagacccttctctcactctcagaagtgtgccaatttgtacattacagtaaatgtgccctctagtcataggagaacttatgctcagtattacctggtctctcaattttttaagccaggaatttggatttttatagaacatttctgaattttttaatgtggacaataaattccaaatttttaaaattgtccaggccaaataaaaatcatgagaggtggaatctggcctgagagctgccagtctgtcatctgtaagttagaaactctagctgataccacagtgttctttgccttccctctttggagaccttagctctcatgggctgttgagagagggtcttagggggctcccacaggggaaagccttctgctttaggcagttccagtggtaatcagggaagggtccaggagacaacaggcctgataggggcagtttaggccagttgttcaaggccttagtaatgattataactagcgcttcctatgtagtaaggtcttacatagattatcttatttactcttcacaatcacctataaggaagatattatgatctccattgctctaacgaggaaattgagacttaaagagactaattaatatgaacaagttcacccagctagtaagtggcaaaaccagggatctgaactcatgtcagacttgactcaaaaaacccacatctttatcctctgtgtctgctgcttcccactgtagagagatcaagtttttctttcccttgtggtgtttttcatttgggtgagtcatttttgagctcttgtcaccatggaaaatcataaagtcttgactctgagtctgcaagaagatattttcttgctttcattcaggtatgtagaacacaggccaagtggttcagcccaaatctctagaacaagggtgggtggggacaggcagtggggtttagggccaaattcccaagtagtcataaggagtgttcttttactaggtgtctgtcccttttgcctagattccttggaactctgccagtgatgggcagctggtcaaagatttgagatttcacaattccagtcatctctgtgacctgtatccattttagaaatacaagtaatgaatatacctcatccaacagagactaggaaaagcatagaatttttgttctagtattaatttgaccaaagattggacatgttgtagtggatcaaataatgtccccataaaatgcatgtcttcccagaactttaggatgtaagcttgtttggaaatagggtctttgcagatataattagttctaatgaggtcatagtggattagggtgggacttaatccagtgactgttgtccgtacaagaagagaaaacagagacacaaggggaagatacctgtataaaggaagaggtagaaattggagcaatgtacctgtaagccgaggaacaccaaggattgccggcaaccatcagaaactagggagaagcaacgagggattcatctctagggactacagaggcagcatgggcctgccttgcctccagaactgtgagagaatccatttctgttgttttaagtgatgcaagtttgtggtagtttgttaaagcagccacaggaaactaatacacatgataaagaaaaaaatttaaatactaaaatgccctttcaagatggaacaggaatctgtgttggaagtttaaatttcaaagctcccaagtcaaaagttcagagagcattttctgactcactgttggccgaagaatgaacttttcagagaggaaaagtgtcctccctgcataatgcaaaagtctctacggagtttctgtagaggaccagaggcattccatgtgttgattcaaaatggcttagttctgatctaatcttgagcaagacttgcttgtgtttaggaagtccatctaccaatgtctaccaccatttgccacgtcatcacaagcctaaaatctgttatgcctgggatgagccatggacattcgagtgtgcattatatggtagccttttcccattttctgccatgtttgccctgtctatctgaggggcttctggctcagtttcccttttgagactacgattctgacaaccaaaccagctttcgtttctctaaagacagatcccttcctttctcttacccccagaggggccctgcctcaaatctgatggactctctgcattgcagagggatttcttacactttcaattttggaatgcccatagcaactctgaagaaagctggtcacaagctcctatatcccatcctcagctgattcaatcaaatttgggtatctggtccaagagcagctcgtctgtaggcctgtcagtgttctatggagtaatctggcaaggaagctttacttaatgaaggaaagaataatcaatagcactaataggaccttctgtcttggagagtttaaatagaatgctttgtaggggtatgggggacttgctgttggtagtaggtagagagattggaaagacacacagaaaaagaaaccatgtgatagcaggcgccattagtgagctgaggccatgagacaaagaaaaatgaaggaagttggctggtagtggcaggaatagtcaaacagagacaagaacagctgcatcatcataaaagtggcagagcattaaggcagctgatgctggtgtctgagggcccacaggataactcaaactgcattgtgttctaaagcagcttctatcttataaattatgttctggtctctgtgaggcatagctgtgcagctgttgagtgtttcctgacttccttacaacctcctgtgtatccctgcaatgccaccttcctaattctgcacccccattaactaaggtaaatgtgtctctgttcttgaaacattaaaaaaccaggccatgaaaccaccatctccactaccgaattccatcagattggactttttggaaactatccagagattctgaatgtacactctcctcttagacatcaacacttggaaagtcccttactattgcttggccagaccttcttacctcagctctgtagcttccccttttccagttcacctgctgcagaagctcagacatgctttataaatcaaggcacataggttattataacactgatctcatttaatgtaatttcatctccataattgaacataatgaagtaataaacacttatttgtgtttactatcacaagtttgggtct

SEQ ID NO: 34380 - DNA, 2868 bp, Homo sapiens
agtaaatatatatataacgagttcatttacatggtttcacatgcttaatcttgcaaacccaactcatgacaataaatttatgaaaacaaaacattaaaaaacttagaaagtaataataaactataaacacaatgctactgaagctcagctacaacaccacattctcagctctagtttggatagaacacaagtgttttaaattgcattgggtggaggccctggcaggaaggaagcatcggatattgctggaacatatctttgtttgagcaacagctaatgagaaaggtcaccattatgctttgctttcaaacactgggtctgttttgaaattagtactgcacatttcatcacaaatgctggtttataatcatcgaggtacataatcctgcagtattaatgttgttttctcctaagtggcaagtaaaatccaaagcttatgttctcaccactgttttgatcagtatgtcagtaaaagataaaatgactttctatttatggactctgggattcctgattatttacaaaattccaatcttgaatttagaggaaattcagccttctaatttttttccttcagttttagtgttacttgtactcttgttaaactcatcgctggcatttgaaatacaaggctttttggaatttgttccctaaaatttattgcatttgtttagtggattatgtgagtggcacagaaatcctaagaaagagcttaacttttctctgcaaagtgtttgctgacaaatgcgataaactttagaagaccaccttctaggaagggctgacatatcaaggacagtaaaaacagtagtaccagacatttctgccacaattttttcggtggtgggggggaacagaaatctattaaatatctcagtttatatttttggttctccctgttggctaggctgttgtattcccatgtccacagcacgttccactgtgggagcctggagctcttagaataaactttgggaaaggctgggtccaccctctggggataagggagccagagggaggaaggggagggggtaaaggaaaagggaagggggcggctgtcttcctgtgtttggatgacctttccttatgtttatctggagggactgggcagccacgctgtgtttggtgtcagcctgccatgttgtcacatgtgatctctttcttagctttatgtgtagagaggacctttgcctctactgggagaactagatttaactctgtgaattatgaaagaaaaaaagtgtaccagtctgttaggcattggggcccagagatagaagtcttatgaaacatgcacatatgccagtgtgcagcagattccctaagggaaaggcttaggcatctcttggagctgtctgaaggcgggcccacctgtacttcttccttcttgctgagagctgggctggaggctgtcttgcttctcctgaagcctcatcatttagtacaatgcccttcacttgtggatattccttaactatttcttgaatgcatgagtgaatggatgaatacatgagcagagtcacagagaggtgactgggcaacaggcagtgaggttcctacaatacttaattgatttgccagtccctgctctaagagccctaagtagctccactttaaagaaaccagtttcaagcctctccgtctcacattcctggtgggtgaatcacttgtttcttatggttgggtgagaataacacctctggtttccacctttctttttcattttagtgctgacctcatctgacctgaccttagcttgaatgttattttcccagagaagctatcccttaatcatcctactctcctccgcctgaattagatccccccatatacctcttactaatctctattatcttcatagaatgtaatacaatttttaattatattcatgtgggtgataatccatcctatgtctgatttctccactagattacaaacttcttgaagataggggaccatatttattttctcatcactgtgttcttagcacctggcataatacctggcatataggtactatggcatataggcttaatacctggcatataggtcctctatacacataagcactcagcaagcctgtgttcaattaatgaatgagcagattaatgaataaattatatttggaaggagaattcataccaggttactgagcagggttggggataaagatcagagtccaaaagccctatcccaatcagaccttggacacactaacgagtttgagattctgaagaggatgaagtgcttagcagacataagtgacattgggcattttacctttggaagctaactagtagtctggactcctgggagtaccagaaactttctcgtttaactctacccaaagtagcaacttcttccaccttctcagtaatagcagtattcttggttaccaggtatctgaaccacagaaagactctcgatgttttcctctttttcacatcacacagcttcacaatacctcttgttagttttttccttttcattcccatgagggccttttgatctagtgaattagtcagtttctttctcttgcaagttccagacatgcaattccaattagcttaaaagcaaaaacggggaatcacgttgtagggaagttgatagggacaactggcttcagacgtgtctagatccagcggctcagatattgctcaggactccacctttcttgccatctccctgctaagtttttaaaatgaacacctacaactcctgactcacaatctcctcatagcaccaggaaggactctgattgcacccatgtgaccgttcctgaatctgtcactgcaatggggagggaaggaaggctctgatttcttgacctgggcaatatgttcagctttctgccccttgtatggtggc

SEQ ID NO: 34381 - DNA, 1888 bp, Homo sapiens
tctttcgaagacatgagagtcaattcctctgttacaaccagagggcagaagaagaaactcctatagataagttcaggtctctaggtaaatggcgatctcccttattcaaaaatacaaaacaaagggatgttctttgggtcctatgctgcacacttcatgaacacaggggccatgtctgtagcccagtactgatattttagaaggctctcagtaaacatttgtggttgctgaataaataaatatgagtaaacatacattccctttaccaccaaaaacttctgagactaacactaaatgattaagaaatgaacaaaaatgtcattaagaattttagtaagagttcaaatgacccacagataaatcagtcctcgaatccttgctatttaatatcggtacacatgaggtccccagaaaactgccacaactgcccgagtatggggtggtggagtcctcacctggcagcaatacctgggcaaaacagatacaggggttgtagtagacaaagagctcaagctgagttcgtagggtggggaaacagtgaagaggaaggagatcctcagcttcctgtcccaggtgaagaagggcttctacggcccgggaagatgggcactccatgcctacccccagctggatgaagccatgtagtagtgtccaggtgccaccctttcaaaggcacatgccggagcgtgctcagtagaaagcaaacatgctctttacaaatatactggaaacatttccctatgaggaccactaaaggaactgagtatgtttaatccaagcaaaaagactcaagaggaccatcatagtaattttcaaatatgtgaaaggctgtgatctttccagcacaatccttttaaaacctctgagtcaaccgctctttgacctcagttgagcctccaattgattaatcctacttcctttttgctatctcactttcttcgttggttagctcagatttcaaaggccaacatggtaatcaatgttgtgtttataccctcaaatttctcactctctcacctatttggtgcttgcttcagtgataaaggggggcaggagagggggagtcaaaggcccaggcatgggacagggcagccatctagggtccaagacctcactttcaattcatgaaagggaatctttcttccccatgcctgctgttttcttccatgtggggacatgaactagtgtcacactcctggcttccttctactctcccacttgcccttctctactgcactcctgccagatggaataacatacctgattagtggctttggaaggagaactgagcctgcaccagatggggacaccttccttgcctctctcctcttggcaacaagcgcctacaaggagccactcatttcctgacctatttcctccatgctgttagtttcagagaagcctctcttggagaggtctgggagggttcactgaagcttgggtctggatgggtaagcctgtctaattctggtattcagtaagtgaaaggtcaaatctaagccacatttcccagctattaatgtctttccttctaaagggagcttgctgccttcgatgagcattgatttccctctgttcatggaggatgaaggcaaaactcccaatggaatcaaccttttcttctctccctctctctctctttctctcttgtctctacccaccaaccagtctgtccctggagagaacgtgccctcgactgcacctctgcaccagaggcttggataggtgcaacacaaatgcttgtcagatcaaataaaataatgatgttattatgtcttaaagaagaccatgtttgaggggtaagagaaaaatggggtctggagtttggtgcttaatcttaaagacccaacaataacatcaaattttaagtgatctcaaacccttcgtg

SEQ ID NO: 34382 - DNA, 2657 bp, Homo sapiens
taagctgaagtgcttcttttgtccaaataaatcaggccactttttcatatatagaaattaacagttcctgaatcttttttttttttttttgacaggttcttgctctgttgcccaggctggggtctagtggtacaatcatggctcactgcagcattgacctcctgagctcaagccgtcttctcacctcagcctcccaagtagctgggactacaggtgcacatcaccacatccagttaatttttaattttttgtagagacaaggcctcactatgttgtcaggttgatcttgaaatcctgggctcaattgatcctcccacactggctctctgggattacaggcatgagccactgcacccagccccctgaatcttccttgacttcattcacaccagccctgcctgtttgctgaaggttgctggaatctggctggatcatctttccaggaaagggggcttatttggggtttcaggcaggcatatcagcacattcctgtataagactaggggagtttcagcatattccaggctgacctttcctttcagttgcagatcagacagagtcaaccttagttttatttagttggtttattgttgttgttttccctctgtgacatagaagcgtgcactttgagggggaaaaaaaatcctacctgttttacagttagttccatgagaagccaaactagttattaaaagtaagaaatattttaagttgctcagctgaaattttaacagctcttgtctaatcgttaacatacaaacctccctaaccagaatatttgtgggggatgacttcttaacaggatctaaaatcagcagtttcccaaaaagcctgttaaaaattacacatctggaattttgtcctagtctgactaggctgctgaattcccttttgatgtttcctggggggtggggaagagataaatagcctgatttcatttaatgtagtacatttctttgaaatctggtgtcaaattttgagtatttgctgaaaggtagggtgaccaatcatcctggttttcttgggattgaggggtttccaaggacacaggattttctttgatttgggaggccaagttgagctgatcatcctaaaaaggaaaccctagtccaaatcactcacaggacaggtgaagaaactgaggcccagcaagatgaaatcatttgccaccatattacatagttagccaacactgactgcattgctgggaccagaacccaaatcttctaagtcttagttcaaagctccactgacccacttgacttctccaaacttaagtttgatgactggtttgtcggtatttgactgctttatttaatttatatgtgagcagaggaaagcgatagtccaagtacattctaatcagtgatcataaagacacagatgttctaaagcaacataaaagtaacatctactgaacacccatgttcataacagcattactcacaatagctagaatgtgaaagcaacccaaatgttcatggatggatgaatggataagccaagtgtggtatatacatacaatgaactatgcgattcagtcttaaaaaggaaggaaattctgacatttgcttcaacaaaaatgaattctgggacattatactaagtcaaataagccaatcaccaaaagacaaattctgtatgattctacttttatgaggtactctatgagtggatacttacagatctaagatataaatactatacttagagtatttgtctactctaagtagtcaaaatcacagagccagaaagtagaatggtggtttgctgtcagcttgagggagggaggaatggaagttattgtttaacaggaacagaatttcagctttgtcagataaagagagttctggctaggcacggtgactcaggcctgtaatcccagcactttgggaagccgaggtgggcgggttgttttagcccgggagtttaagaccagcctgggcaacatggcaagacctcatctctacaaaaaaaacaaaaaaacaaaaaaacaaaaattagccaggcttgctgatacatgcctgtagtccctgctattagggaggctaaagtgggaggattgtttgagccctggtgtttgaggacgcagtgagctatgatgttgccactgcactcccagcccaggtgacagagcgagtctcaaaaaataaaagaaagagttctggagatgaatgtaatgatggttgcacaacaatataaatgtacttaataacactgaactgtacacttaaaaatggttgatagtacattttatgttggatctattttatcacatttttttaatggaaaaataaaataataactacaaatagctcatctattccattggtgcaatgtttctgttaaagaggtctgcaaagtgctttgcagccatttattagctttgggatgttttgtcaaatcaaaccacattctttagataaggagtttggtttgctttgatatttagtgaccttcccttagctagggcatagaatttccagatgtgcaacactcccaacttctagctgcaagctcacagcctggcacatagtaagtgctccataaacattttttaaataaataaataacagcaaggactaatatttatttgaagcatttattcagaggtgggttgaacttgaagctggtgacgcttaagcttcaggatgtct

SEQ ID NO: 34383 - DNA, 2837 bp, Homo sapiens
aatgagtgagaaatttttcctcccttacactccaaaggtatatttttattgctatttgctcaggaaatgccataaggatgatttaacgatttcaaatcaccacctcatttgacatgcattttaggtaacataaaaatcatgcaatatgattgaaacaaaagaaattaattagagcaaagagaaaaatacaagcaaggcagtaaagtgaaacaagaaataaaaccactcaccactcacgacacggaaattccaactgtaaagactcaagtcttttctggagggggatcacacatttggctctgagcaatgaagaaaacagacaagttataggattcacagtgttttataacatacataccacggtctcaggagccttaagacctgaaagacgtttctcccatatgtcctcaaaagggacactgatgtcatgaatgacacttaaagcagatgagtttccaatagctgtttcttatggtatcactccaggagcctttaacctagggcctaatgacaaagtgaggtcctttaaaattcagttctctgagggaatgacatgatgcagttcacaaatgaagttttttaagtatctgacttgatgcacagataaagtttaaaatatctaaaatatctaaaagaaggccaagtgttgtggcttccatttgtaatgccagcacttcaggaggccgaggtgggaggcttgcttgaactcgggaatttaaaaccagcctgggcaacatagggagaccctttctctttaaaaagtgtaaaaattagctgggcatggtggctcatgcctgtggtcccaactacccaggagactgaggcaggaggattgcttgaacccaagaggtcaaggctgcagtgagctgtgatcaccaccactgcactcgagcctgggagacagagtgagcctccatcttgaaaaaaaataaaagaaataaaagaaaaaggaaaggaaagggaaggaaggaagaaagaaaaaaagaaagaaaagaaagaaagaaagaaaaagaaagaaagaaagaaagaaagaaagaaagaaagaaagaaagaaagaaagttggatggcctgcatctctccctaaatgttgttttctccaatcaaacttccataagaattaaggagcagagaagtcaaggataaattgtctggcaggtacccaacagctgaaactctatacttctgattagatgcggatgtacacctaagaacttggcatccacttgtgaaagtgaaggttcctaaccaggccatgtacttgtatagacctacgtcctcaaagaggcagaccacagtgtacccatgggtaggggccagatttccttcaggaaatagtccacagttgctgtaacatgacaataaatgaacagccaagatccatggagtggccatggtgtgggacatagataacaaccctcccaccaacattagacactgcacagttagttttctgttatcctgttttggttttatcatgtatacctccccacccattagagtagttagttgagaattgactgttaaaaatgaaatcaacctgccgagaaaaagtcatgttggatgaatcactggggccctaggctgttggcttcatgtttaatttggatgcttcccaatccaatcttgagtaggtcaccccatatagcttcctccatcagcaggatgattttgttttagaaaatatgtacacttggtaaactgtcaaagtgagttgtacatatggtatgtgttgttcagagggagaaaatattttcagcactacttgaagtctttatacctgacaatgcattaagaattcaacacaataatcttattgttttagctgttgcttttaccattactcatgcagcatgactgggaaaaaaattaatgatcccccccacccccacagtgtttggtgtgtgtgagtttaaaaaaaaaatcttttggtttgggatgaatgcgtcgaacaatccaccatctggtgtacaaatatttttatagacacgaatccaaataccacaaaatcagtgccatggctcaggttctgtgaatctttttctgaggcagactttttattaaatatgattattcttgaactatgagactctctgcaggagcattaagatttagccttgagaacaaaactctttatgttgaccaatatttttaaaaagatggaaagaactctctctggagctaatttcaaggaggacaaaaaagaattttgtttttgtttttgcttttttgtttacatactaagcatatacaaactgaatcagtgacaacttctgttacattcctgctgtaatcctggctagtggaagaagataagatatcagtaagctctgcgggcatcaagtttcggccctgtcaggtgtaatcagaaccctggtcttaaaacgaaggcctccactccacctcctcaggcagaggacacttcattccccagccccaggcactgagaggaaaaggaaggatccatcctgtaagagcaaaataaaacaaaatagcaacactgggtttgtgcgttccctttaactcttgacaccctggaattaatgcaaagtggtctgtatttaatatcgaattccctcccctcacaatgcgataatgacaagagatttttagaaggcgtggaaattaagaaattttagaaaattaagattctcctctgaacctaatgtaaagaaaattgatgagtctgtgcatttgatgggattcctaggtcagcaccatgtcgtgaagacattttctgagatagtgagtttgctcaaaatgtcactccaacttttaaagcatggagaaaattgcttgtcagtgaatgtaccactcagagcaaaatagaatttttatt

SEQ ID NO: 34384 - DNA, 611 bp, Homo sapiens
ctttggtctcttcatctcaaaattggaattttaatatacttaccttaaggattgtgctaagagttaagtgagatgttctgtgttcaagcacctagaaaaaataagaactccaatattagctattgctgtgagtgaattgtagtcagtccacagatgataacactcgccttcctcatttccttggggtcatctcttttgactttctgctgccttttcaaaacttttacactgtctaaggacaacagccctacctggctctctcactctaagagatggtgggaaggacagtttcactctcgatttccctgttctcccctcaaaacacactctttcttcttagccccctctgctgtttctgagaacacagtgccccatttctttccaaagctaaaacctctctggcaacagagaacccgactgttatggattcagcagttgacggttgacctccagcaggttggtgctccatcagtaagcccattcctctctcccagctgcagtaactccttcctgtcagcctccagccctgctcaagtcttctctggctctgtgcatttcttcctccaatgtgcagagccaacaccacccacttctttccttccctgcataaa

SEQ ID NO: 34385 - DNA, 1021 bp, Homo sapiens
aattcattattaaaagacaaatcttcttgggtctcatgtttctgcacatcttacaagcacaatgactgacacttttgttatgaactatctttttaaggatatttgtatagcaaactactttggaagatagagtatcttcccctggaacaaaggtgcgtgtttacttgctgtccattataaaaggtttttagttccctaagctcagggtttctctcttgcaacacaatccactacatgtgcaggtgtcatctggctctgcttgcattgatctgtgccaattagggcttaggaaactggtacaaatgccagtatctaactactgctattgctgtgggcaataacgttttttgtctgtgatccaggagtcttgtgtcttctgtcagcatctatgaaactgtggcagcataacttagattataagtacagcaaaatgttcacagttcttgacagtcttagtgactatgatgggatgtagattgataagtaaaagaggaatgatgaaggccttataggccaataaaaagtttctgtggggagcctctggtaatcagtagtgaacatgttgaccaaattttatgatcaggtaggcatgaaatgcttctctattttttgccagttgtgagttggaattgaagagttgcaggctcattgtgtgagtccagcccaagagtgcaaagtgacataaacctggtgatgccaggcagataacagtgtggctgtgactctgagtcaaaaggtccccaggctgaaatagaaggtgttagacatgaggaccttgctgcccaatagaaggcactggactggccaaaaacattgtgacttcatttggttgagccatgagcagccaccacgttgtctaaaactgaaaataaatgaaaagcctcactgctggagaggctctttccccttttgccctctgatccctccctccctctctaccctggcctctgctactgacagtacagatattcaatggaccttccaagccccttaccatccacaggtatttggtattgtttag

SEQ ID NO: 34386 - DNA, 892 bp, Homo sapiens
caactgggagcttttatattagtcctgttgccattgaggaaatagacaagctctcctcaagcctgtctcggggactatgtgatatatatgcatatattatatacgtaaaacttagagttcattgctacattttgataagtaagtaggcagacagtaaataggaagatcaataatagacaaatagatagacacatccccccacacatatatttaccaagcttatgttgtgataggaaactcccgaacctagcacagctgtatatattcttcctttgataatcagcactgtttcccccttcattgtgtaacatgggagtgggaaggaacatgattaccagacaagatcaatcaatttacctctgctccccctgcccttcgtcctgagcagtcccttcccccctcctcattgagagttttaggctgttgatcacattcttcctagcctgtgattggaagaggatctggactttgcataggaacattttagcaacttactttccctgccagccctcccatgctccacgcctaccactattaccagtaaattatttggcaaattttcagaattatttgaaaaataatcaaagcatctaggggacaggtgaaagggattctaaatctgaggcagaggttatcagtggatggttctatttgattaagtcaggcatgtactcttgcttaatcctgaggcagcattctttcaacactaatctgtttgaagtcacttcataaggatcaagaagagaaataatgttaaataacccatttctagatttatctgaaaaagaaggtgtgttatcttgaatgatgtggagagaggaagacttcacatttgagaaactctaaaatggtaaaggatctaaagtgtgataggatctccttatgtctaaac

SEQ ID NO: 34387 - DNA, 662 bp, Homo sapiens
atgtagactatctcggtaaatgtgccgtggatacttggaaaaaaaatatgtgttcttctgttaaatggagtgttgtataaatgtctattagttcttggtggcggatggtgttgagttctatatccttgatgactttctatttgttctatcaattgttgagagaatggtgttcatgtcttcactctaatagatttttctatttctcctttcagttctatcagtttttgcttcccaaattttgtagcttttatgtttgtgcatgtgtctgttttagtgcaccaaatgtaaagagaggtttagttaaaataaaggcatgaactttgttctgtgggttgaccagctgacacaactgtgccaggtactgggaaggagaggcactgcaagtgtaaagggcaagcacttgcatctctgggcaaatcgtcactcactggacacctctcagtctggccgaagtccctgaaatgtatctcttatggtggaagtctccaagttctccgtgtcacttatcatcattactaccttgaaatgaagtcaactccaatgttctttataagggctcttaaaaatgagttattaaatgtgaattgatttgcttaagtcataatttaaaaaacaaaagctaatttaaaaatctgtcatgtattgtcattattaaatgttat

SEQ ID NO: 34388 - DNA, 363 bp, Homo sapiens
gtctcagggaaaatatgtattgagttttcaaaacccttttaatccactgtacccagtggctaattttgaggaagcagagtcttgacaaggttgtttcctgccaagcaggctgtggggaggtacttgggcaactgcttggtttactttttaagcaggtgtttcgcttggcatgcggtctctctttgggaaatggctggtcctgcaggcccttacataaccttcttctcagacaagtcctgccccgcccttcatgccatggctcttgcagcccacagtctgtttaaatctttgatgtctcttaagatgcagggccacagcccctatgaagagctcctatctcaattcaacctgctgggatttcct

SEQ ID NO: 34389 - DNA, 2604 bp, Homo sapiens
gacctcgtgatctccccctcttggcctcccaaagtgctggcctcagagatgtgagccactgcgcctggcctaagttaattcttataaagatgtttagaacaactcaaaggtccatcaatggataaatgattaaaaagctgagtgcatatatgaattttgtttatatatgtttatataatttttgacattttgtttatctacttatccattgatgaattccctctttaaaaggaaattccttcctaaaaaagaatgaaatttggattcatgctacaacgtgtatgaaacgtgaagacattatgccatgtgaaataagccagacacaagaggacaaatactgtgtgattctacttatatgaagtatctagaatagtcaaatacatagtgacagaaagcagaatagtggccaggagaggctcggggaaaggggacattgggaatcatggtttaatgggtacagagtttcagtttgggatgatcaaaaaagttcaggagatgaacagtggtcaagattacaaaacgatgtgaatgtatttaattatgctgaactgtacacttaaacaatgataagttatctagtattttttactacatcaaaaaatagagttaaaaaaaagtgctccgaagaatgtctgatacatagtaagttctctgtatgagttatctgtggtatctcttgcttactgatgttgctctttaacacttgcattttcactcggcattcagtttgatgtcatctcttcaatttcggggcaaggatctcatcataatttgccttgtccttcacagacctgacagtgtactttgcatgtagttggaccctgtaaatcattgactggtagtgcaaattccaaatggcctgtttcataatgatgtgacctatgctgttactccagtggagtttatctcagtgttttctctgtgggaggctgttagcatggtgactaagagctaggatctgaagtcaagcagatctgagtttaaattccagttttgccgtttactagctgtgtacctttggagaagtcactcagtctgtctcagcttctattcaattgtgactaggatcaataatacctactttcacatagttactgtaatgattaaaatgaaataattatataataaaattaaataacacatggcccatcctaggggctcaataaagggtagttaatataaacattttttatcctaggcaacactaccaccttgacttcaacactcagagagacaatttctgaaaccagccttttgcttgtagtgggtgccaatctctgcactactgtggatgtttctgcagcaaaggataatgtcttgagaccctaactactcaggtggattgtgggacttaatgtgcttcctagacccagcagagtcagatgtaccaggaaaattctaaaagccctagcagagggagaaaagaagctttcttaactcagagggagtttccacttaatgccgacagctactcttaggtgtgagtggcggctcagaggctgcaggggaggcaatgctaagcatagttagagcaaaaaggctgggcctttctccaaagtccctaagagatggagagaagaggaattactggcctacccagccctaaagtacacacatgaggagcagatacattgttcaaaggctgaacctgtttttttaaaaaaatgatgtctggtgtgaatgactttgatagcagccaggaacaggaagtagagtggcagctgcacagatgaatccccgagaactgagtttttcctgtagcaggaaccagatctgggcagattaaatcttgctctctctgaaacaccttggggagacttgttcccagagtgaagaatggggcattctcttagctgacagaaggggcacatggccatcccgagaggtgagtgttggggaacaaatgaggttatcttggaactggcattccaggaagtctagaaagtgtcctgagcaaataaaatacacttgtggactggaaggagacctctgattttacaacatgtgaggagactccagaatacaaagcaaagagagagagagcaagctgagaaaaaagagggagagcaaaagtgtcaagagaacacacttgatgtggagcagttaagaagaaagaggccagaggactgtacccatgctgttgcacagagcacttaccacctgaccaggagccactgacaccaacccctgccatctgttgccatttctctggctgtcatgcacctggtggtacagaggtactctgtatgtgtcagccatggcctcaaacacagatgagttccattttcctgtccatggaaaatatgcgtagctaatcttccaaagaactttacatttcaaagctcctatgtctaacttatgaatctgctcttaatcattacccatagcttgagaactgtcaccctaacccaactttaagagatgtttatctgtgtcactaaagacatcaattctcataaatggtgcggagatgcatatagatatatgtctatatatagcaggttaccaagtagaatgtgcagtgtgtaatcttaaccatgaaaaaaaaatgctcaagaaaaaaagactagaaagttagcttataggagttatattcacttcctt

SEQ ID NO: 34390 - DNA, 2318 bp, Homo sapiens
ttattttctgacacacttgcttttctccagtttcctcagctgaaaacagcgattcactgttactgtatatatgctaggctcaatgctggcgataacaattcctgcaacatagggtcagacaggagaagaatgttgtaatctgcaaagcccttctgattctgggagtgaggccagcattaatacaacgcacgattgttacttctgaatgtccctttgcaaagaacagtgtttctcaaacttttttctgaccagatctgcatacattttacatcgccgctggcgatacatacgtgcaaaacactgaaatcgaaatttctctaaacaactcctttactacgtgatgtactgtgaaacttttctattttgttctattctcaattttattaaaaacggagggtgatgatcccgatctaccaaaccaatttcacaatgcgctagagattataacccgcggtttggaaaatactggcttggaaaaagctctttgatctgtgtcattctcctcacatctccctacacctctgcggagttccgattgtttggtttcgtcctgataatcactgtgctgtgttttccctacacgctctgtgacggggccgtccgcctccttcctgggctcctttaagagggtggtaacggtacatcaccgcgggagtggagaggcagggcccactaggtcgtcgctgcaggccaggcccgctcatccagttattgtgaaagccggggtgtgcgcgcgaagagtgggagggtaggggtgaggcaggggcagcactgacgcctcgcagggctgagtagcaacagctcctccgcgccgcgtttccggagaccctgaaggagtccgcgcgtgcgcagagcgcgtcccgggaactgttccgcccacggaggctgccgagcgcgctcccgccgggccaaagtacaaagtgggctccagagcgcgggcggcgcggcggcgcgagccagggggcggtcctgcgcggccggccccgccctctgctctcctcccagtctcccccgcgctgcgtgcagtaaggtagccgccgccgccgccgccgccgcgtcccctcgccggctcgctggtaccggcagtgccatggcggccttcagcaagtacttgacggcgcgaaactcctcgctggctggtgccgcgttcctgctgctctgcctgctccacaagcggcgccgcgccctcggcctgcacgggtaagaaggcccgtagccgtgcagctttcccgggctggagcgggcgctccccgcgcgctctctctccccacccggccgacaggtctctttgcccgacggggtcgggcggagagagggccgaccgcgactgccgtgggacttcaatgtcagggtgtccgcgagtccccgccacgacggcgtcggtcccagctggcctgtccggcgacctcgctccaccccgggagtgcgaattcttctgtgcccgcgggcgaaccggcgcccagccagcactcaggcagcggcctccagttgggggtgggagggggatgcggtgtgtcccccacccccttccctacatcacccccttctgtgtcaactttctgggtgtgttctggttttgccatctcatcttcagaccgtgaaggatttgttttggggacgtggatgtgtgattgaggatggggattggattcgccaggctggaggctggtgtctaagtcacttggacgaggtttggctcgattcccgactaactgctattgaaagtcgcgagggtggcttctatgaaactattcccggtccacttggcaggattgccgtctaaagtggtgagcccttggagtcggtgaaccctttggtcggtgaacatttggtcggtggcatttcatccggaaaggctggatcggttctgtcggacttagagggaaatgttttccttcctgggctctgtaggtgaaagatgagagtgtggtttaggtgaggatcaagctcctttttaatgacacgccactgcttccaccgcgggagaatttcagtgcttagatttaactttgggaggttatcagttcagaaaaagtaaaaaagagagagctgaattacggttgcgacatacaggtatgtatgtcacatacatgcaatttttatttgctggacaagtgaaagagaaaaggctacttcccaagcgttcttgccagtcattgaatatttcgtattaaatcttgacatactactttcatgaattttatttcattcattcctctgagcaggtactgttgcctcccgtgtttgatttgcctacaatatctaattagtagtaaaatttgggctaaaacacaaatagacttctagtttatagtacc

SEQ ID NO: 34391 - DNA, 807 bp, Homo sapiens
ttacttttcatgagttgtgccaatttgcagtactatgaatgaatgctgacttaattacctactcatcattaggggatatttaaatttttttctactttacggatgcaaaatagtcttgaaagattattttaatttgcacgtattttataatttgcaaaaatgaacatttttttgtgcagctacttgatctttattatggaggtagtttggcatagtgttaaagaatagtctttagagtcagatgtaggttcaatttttcctttggccgtttgtcagatctgtgaccttggtcaatttacttaacctctttgaacctcagtagaacagggatagtagtatttactcactcactcagcagttaagtgaggattaatggagaaaacgttttaacccagtgctcagtaaataaaaggtagctctcatttctatgcttgctaaaagaaaactaaaaggacaacaaaacatacctttgttagcttcttaaaaactcccgagccttcctaatttcctcagatacacccatgaaaatctcccaaaggaagcctttttcaattgatagaatcatttactttcagagttggaaagtatcttaagttagttttatgtgacatggttttaggtttctgtattttttcagttgctgcttcctgaatatgacagtctttatttctccaccttttaaagaggcattgctaaatggaattcggcattcaaagtgtcttctcactggcacactagcagagaactgtgacctaccttgtcctaagctttcattaaagatcctaagatgttaagctttcattaaaa

SEQ ID NO: 34392 - DNA, 861 bp, Homo sapiens
aaaatgccatcaaacagcatagtatggcacagagaactctttttgtgaaaggaagagttaatcactatggcaaacttcagtgctgtcttattttaatacattgccacagccaccccagccttcagcaaccactgccctgtttgttcagcagccattaacatggaggcaagaccctcaaccagcaaaaggatgaacattttttagcaataaagtattttaaaaaccaaggtatgtccattgattttttttttagacgtaatgtcattggatacttgagagactacacagtatagtgtaaacataacttctatgtgcactgggaaaccaaaatgttcacgtgacccactttattgcctgttagctttattgctgtggtctggaactgaatgtgaagtgtctttgagggtacactgctatgtattctttcccttttaactctcatttattcctagttctgcaagtaaatccatattgagtgctcactacctctttttaggtcactggctttatagtcattcttcttgtccagagcttgttctgtagtaaattcctcaggaagagctcatggaacaataatctctgaattgtttcatgttgcaaacagtttgtctgtgacctttgtacttgaaaatttgtctggatgtaaaatcctaggttcacattttctcttcttgaatatcttaaatatgttactctattgttttctgacactgagggttgttaacaaagtctgtggctaatctcttttgcttttcccttttaaatgacttggtcttttgtgtatccaaaggatttttttttcacattaaaaaaaaattctaggctgggcgcagtggctcatacctataatcccagcacttt

SEQ ID NO: 34393 - DNA, 1753 bp, Homo sapiens
cacaacgttgtacctgctccaatctaagcagcaatccagcccttttggattgcctctacccaaacctagaacaaagatggccaggaaaagaccagggacgctctttattaagggaagatgcacatataatgaaagataatatccaaacctctgcacgccaacacgtgcagacgcaggcacaagtcctatcatattgaaggtcgcaactcactgggaagccctttccccagagttaaagcgggagctaaaagtccgcttatgcaacaacagtccaattactcggacaccccgagcaaaactctccagcggaaggggcagcggggtctggggcgccaactccctccctgcaactcccgccggcgcccgacggactcggttcattcaagccgggctgggtgagcgcagccgagtcccgtaggcgcgggggacaacatgggcgccccggggaaccagggcgagcccgctgccagccaggactgtcgcctccctcctgcgtgtggcgcgccccgggcttccaggggctggtgccactcacctgaagcgccggccacctgggcgaagacccagccgagcaggagcgtccgagcgacggcggtctcggggcgcgggacccggggccaggcaggggtctccatgtctaccagttggcggcgagatcgagcgggttccgtggcgcccgtggggctggggaggttgggctgaaggcgccctgggccggccagagggagtgcgagggggtgcggggagctcgcagtcttggggagccggtgccccgcgcgctataaagggccggcggcgcgctctcccgcgcctctgcccgcccccggcgcccgcccccgccgctcctcccgactccccgcccccggcccgggtcacttgccgtcgcggtgggcggcccccggcgagtccacacccctgccccgcctcctcccggtaggaaactccgggaccctgcaagggatgactcaccccagtgattcaaccgcgccaccgagcgcggagctgccctggaggacgcaggcgggtctagttgcccgggtcccccaaggcccccggattcacccaggcccgcgactccgacgtgcagcttaggtgggttgcaggtctatggcaggaaagggagggcgccttggaagaattcttcccttccatttggtgataaagtgggagaggcggcatttacaacatttaatagaaagcacgggctctgggctcccctcgggcagcggagggcatttcccggatgctttgcccacctggggcagaagctcgggacctgcagcgaagtaaacgtgtggctgtgagcagggccctctcccagccacggtggcttcttctaccccacgaaggtcaagaatacctggcctgcccacctcgcggggcccttagcgggtcgcacaggagaaaggcggtgggaatgccggtgtcagccacggtgtgaccggctcggctcacaggtctgagggtcagttggctcaggcatcgcccggtacgaccagagatagtgactgaggaagagcagcctcacatctggcagtttgcctctgggagaattccagcgtgacatctgcagctctgtggttccagaaaggatggttcccacattgaagaagacatctgtgggactgagttccaccgaaatgcagaggaaccaaaaatgaaaatgaaaaatgtaaccagagttgtgtgccactagttttaagctttggtttttctaaattattttctggcttctccttctgggctttgctgt

SEQ ID NO: 34394 - DNA, 1059 bp, Homo sapiens
ggtggggcaggaacaaatcacaatggtggaatgtcatcagttaaggtggggcagggccttttcacttcttttgtgattcttcagttacttcaggccatctgggcatatacgtgcaagtcacaggggatgcgatggcttggcttgtgctcagaggcctgacagtttccactgggcttctcccctccaaagagttcctgggatggccttgggatccacgtggtgggaatcagcccacaggtgggggaggggaaggtgctcttcacctgtgttgcatcagcagcgtgagctgctgctatcaagtgttgaaaagaatgtgagacaaaaagagataatatttgaaatggaaagaaaatagtattactaagccaagtgatcaaatattgccaattttgcttgccagctatcatgaactgataacaaattagcaaaaggccaaacttacatgcacgaagttgtcctaagcagtggccagatccagacataacacatatctctagatatcattcatggcttacaagctttgtagtctttgccctgtgatgaggctatcctcccagcggggtaggaggaaatgattccttgtgctctagctggttgtagtggcttatactctggccaggaggtcagaaaactgtcacagaaccaactctactcattatttgctgtgtgctttggccaagtctcctaactcattggagtctgtatttctttatctctgaaatgacagcaacactcaacacacgttgactgaggacagactgtatgctagtctgaactatgtgtgagtgaacacatagtcatcacttccatgagagtggaatagtcgatataaaactcagtaccacatgtgagtgactccaaatattacagcatcctcatttgctaaatgaactcttaagaaaaggtttttacttttatatttgttgatattaaaatatatcaggatgttaattaaatagacaaatgtctgtgcataataatgtgttattttaattacttataggtaaaatcacatgctattcattaatttgtaaatcttgattaaaatgttgagttttc

SEQ ID NO: 34395 - DNA, 2747 bp, Homo sapiens
tcagtggacactaccatttcaattgcgaagtcaggcaatgattgtcctaaggcaaggtgggagagaagtcagagtaaaccacctcgagagcgccggtctcccggagtgtctgggttcgactcctgcctccacaacttactgggtctcctcgaacaagttgcatcaccaatggccgtgcctcagtttccctcctccgtagattaggaataacaatagcagtgagaacagaatccagcacacagtaaatgctgcttacctgtttgctatgtggaatacgccactacactgttgctcggccctcaggaagggtctgctgagactttctacttcctgctcagggcagaggccgaccacccgcccaaggtcgtggcggcgccggctcagctttagtcgtcaaagtgcacatcctgggagccgctgcctcgaggtggttgaggcgagagggcagggaagcgtctgagcctcttcctcccaccagagcaggaccccagctgacagcgggtgagctgggcagaaacccatgccgggaagaggcggacccagtggaccgcagcgcccgcagtcgccgggccaggcgcagaggcgaacgggaggcggcgctgcaccgtgcccgcccctccccggcccggccccggctccagccccagccccagccccagccccggccccggccccggctcgcgggcgctgcgtctccgcgtacaggaggcggcggcggctcccagtcaccggcccccgccggcgagcgcacgatgcactgcctgggcgccgagtacctggtaagcgctcgcagcctcggccctcgggggaggagccccggggaagggtcgagtcccccgccttcacgcaccttccctgccggacgcttccgcctttcccgcgcctcggggatcccgcccccgcttagtaccttggggccacctggcggggaggaacctggaccctgctccagtgctggggcggaggcgggggagacgcgggccgcggggcgcaaacttggggtcgtcctcaggtgcacctccaggtaagcacttggcggcagggggcttaacatccgctccgcgcagagcaggtgtttcaaaggctgtgtgaaagagcttcaggtggccacgtaaaaaaataatattaattttaaaaatttagaaaaagattggttactttggcccctcttcgagtagatttgggttcggtttccaggttgagtccacctgtttatcttctttttctcaactctccctttttctggaaggtttctgcagaaggagcccctaggcaaagggagtggcgaccccagatttataggaaatgcacagatacggcatggttattcctgttctttctcttttggactggtttggtaagtgtgggtgcttggtaggaaagaggccagagtgtgtgtgcacgtctggaaataactctgtcccaaatgtaaatcgtagttggtgctgcagtgagagacttctgccgttaacccacaataaacatcagtttgtactcgggagaattcttgtcctagactcgctagaaaggctgtctttttgctacaggccatgttctaaggggtgactccattaggaaatgggaattaacagtttgcaatgtgattgctatttagtaaggccaatgtgtctccttttactctccgaacttactgaacagaagttcttttagcacctgccacacccccaaatcaaatattcctcaagcttttggtgcacctttaacaaaggaaaagccagggtaagcctagaaataaactgcatttcctttagctgaacatcacacacacacgcgcgcgagagatatgttgtgtttagcagccaacactgttaaccatagctaacaaggaatgatttttcccactctaatttcgaggtatgtatgattgctggtaaactccatcaggctatgcggttataatcctgagagagtctgttggaagccgaatcttgctgcttttatacttattttagaattgtaggtaacagcagaaaacgtctcacccgacattttcaaaggccactttcacgaaatcatccatgccaggataaggcatgctatttgctgcatggtaaatgattaatttatagagcagggtaataactaccagatagtaattacctttgttgaaaagaattccatctgaataggccctaaaatatcatgtttgttctttccaagtaagaaaggcatttgttcacttatgacccgtttcacatagacaggcttggttacaggcacagtggaaggttaggtctgaaacacataatcagatgttttttgttgcttacgttggaactctcccctaggagctgggagagacagtgcacctacaataccttctgcttaacttcgcagatggttggtgtttttatctgagactgctgttgtataaatgcagggagcagctggcctgccttgtgcctggcagctttgacctcaagctgttattgtgatttaatgatctgccgtagcccctccacagcttcaacctaggacctcactaccaaactctcagcccaacagctgagaatcctggggaaaatctttgtagatgacctatcacagcctgaagaattgtgaaccagctgagaggtggcacggagctggaaactgctttaaaattacatttcatttgcaaaataagtctgaagttttaatatatccaagttctcactatggcattctgttttaagagtcagagtcctttcttagctcactggcttttagtgtcttttgcaacattt

SEQ ID NO: 34396 - DNA, 1076 bp, Homo sapiens
caggaggttgcttaggggacagtgcagagatgtgactctcagcctgtgtgactctcaagcccaagccagtaatcactgtcccaagttcatcttgcctactctcttcttcaccatcagagagctgtggcccacattgtttgtcacacatttcaaagctgagcctggaaccaagccttctcacaattcagtgctcttcccaccaccatcccctgagatctgtcatatcttgggatctacccatagtctacctcccattaacacccattagctacccatgatagtagctgtagtgcccagtccatagagacaaagcaactgtcatgtgatgaggggatcttgcctgcattcacacagccatccaggagagggcagtcatgtgtgcctaagcacgtctaccccacccacaggctctgcaaccgcagactccgagctagatccaacctgtttcccggctttcgccctgaagccagagcgcccctgaacgtttgtctaaaccaatggttctcaagccccccgcgccccccggtgactttttgcccctgatatggcatttggcaatgtgtggacacatttttgggttgtcgtggctgtgggaggggagggagagcttcctggcatctgtgtagagaggcgaggcttgttgctaacaccctccagtgcgcaggacagccccagccccagccccagccccagcgaagatctggtccacaatgtcggtgagaaaccctgccctaaaggaaagtcctaaacagccccaggaacaaatagaagatggctttgataaggatgttcagaaacaatagtgatcactcaaaaataacttgcaggttctgcttctttggggagtgccaaatgccattctttgggggaatgccaaataatgtctaagcggatcttgactcatcacttcagctgctcccaccgctgactgtgccaggttgggaggtgtgcgtatatgtgcacttgacagcacagggcagctgagaggagagtctggcccccattagcgtccaggtcctgtaggacatacttacctttgtctgtctgaagaaatcatccttcctgttctgtggaaa

SEQ ID NO: 34397 - DNA, 4179 bp, Homo sapiens
aagaaaaaaaaatggggggaaggcgacagacagcagagtttgtgtagaacatccctaagtacttcactcaactaagacatcgcttttagagttaaaattcttagaatagtccaacttctgtgaccttgagcaaatctttctgagcttcagtgtactgatctgtaaatgatgttggataatcccagcaatcctcctcaccttacaggactgctctgctgttaagatcaaaagacttcctatgaaagaatactgtctgaaaggactacaaaaatgaaacgggttattaaaaaatgggtttggtgcttaaagggataaatccacagctttcataactaactttccaaaggttctaaaaactgaggttttaccgtttttaaatatttacaataattacagtgatctagcctgtgtatgcatttccttggatctgctcagtattaagcaggaaaagggcaaaagctgctacattagtcagcaaaaaagaaattagcatggatattattaacatccaagaaaagtaagtcacttgaagggctgccaacgttatcagtacctcatttacaatgcaaaaggtagtagagactcaactgctgccagccaagaatcactggggggaattacaatgaatgtgcacaaccaggccaaagtatcacatcacatccaacattttggacatgcccattcctctgaagtttcctaaagttcggtttgtaaatcctggaaggaaggaaacagtaacttgttacaaacttttcagttggtgaggtttgcactcaatcatacacaaaccattcacctttctgctctctaaaaaaattgttagcaaactgttgtctaatacgggcaacacgtttgaaaaggtaaaggacctaaacatttcaactttagatacatagactaaaatcaactccttgcttcaaagacagtatgatgtgcagactaacagcgggagacaagagccacaactctcccttggggtttgacaacggtgcgcttcattacctctttacataattcgcttcacaccgcctacccccgcagccccgggatgttccagctctgacaatgccagtgccttccaccagcggtcggacggtgcggtggcaatcctgacatgcttgggctcccgggaggttaatgggaattaaaccacaggcagccctcctttgtggcgctttggccagaacagcagaaaggagacaatgagcgttctgtgcacagttccgcgccgattggctggtctctccccccagaaacccctgatgtcatgggcttggaatgcagggagggaggaaggaaggagaggatttggggagggggacgcctctcatctctttcccaggccaaaagtcctaaagataaacctaacgcattcttgggctcagtggcaaagctgagcgtcaccaaatcccaatcgctccaaactataagccgcctcagcaaacaagccccaaacaaaagcaacccacaaaaataatcctttatgtcgtgaaagtctaatgtacttcaaacttctcagtgtttcataaaaagtctcaagcctaagcagatatcactcgcacagtggcgcgctcaggctttgtctccatttcccgcaaaagcaacagcagaagcagcagcagcaatctgcctccaaatgcctcccaggcaccgagatcggagactgtgatgggtcccggaccggcttccgttcctcggggcccctggggtcggcgggacattaggcggtctctctccccgtggggaggcgcggagtccgccagcacccggggcccgggcagatggcgggggctgcggcagcggctcgccgggtccctggccgcgcagacgggctccgcctaagggcgagtggccacgcaggagcgcccccttcccggagggcgcgttctgcagtcaccaaacggcccccgagacccccgcagccggaaaggctggcgccgcgggactccaggcgcccgggaacccaccgccagccactagtcctgtcccacggcgcgggaacaaagccaggcgggtgcccgggagccggccccgcaagcccggggactggacgcgaccgggacaggcagagacgctcgcgccgcctcgacggcccctctccaggaaaacggtgagccacagcgcgaagagcaaacgaagcacggcccagcgccaggccagcccaagggtgccccgggggcccccgcgcccgcccgagccaggcgtaccttgttcttgacttcggccgagagcccataggaagggcccttgttgaagtgggtcatggtggttcgggcggcgggaagagacagcgctggggtccggggtctctcgcacttcgcttccccgctcctggccccgaggagtggccgccgcgggggatgctcgaactccctcctctgggaggcgcaggagacggccgcggggcgcgggcggtgcctgggcgactgggtccaactgggtgctacagagcctcgagctccgctgcgaagcacccggctgcctcgctcgccgcccgcacctcggttccccacaggccgcccccgcctccgcctgggccttcgaggattggccgccgggcccgaccaatggagggccgcctcctcccgcctctgcgccgaggggcggtgcggccaattgaagggccgcgggggccgctttccctcccgctccctccccgcgaggtccccggcccccgccccagccctcacgccaccggggccggcggctaggcggccccgcccccgggctaggcagggcgcctgggggcttcccagccacaggccattcacgtcaacctccaggcatcctccgcggcgggccggaccgggccggcggaggggagcggaagcccaccggggctggcccgccgctgacccgccgcctccgtctgcctcctcccgggctctgggcccagcgcgcccagatgccgggcaggacccctccgcccgctgctggaacaccaatagcagcgttggagcctctgggccggaggaactggggcctccaccgacacctgcttcttccctcacctcgcagccttccacacctgttgatctgacctctgccccgctgccgcccaggagtaacctaaggcttttggcctgattcgagctcactccgtctaaacctctaaatgcggtgcgaaaaaatcctggggaatgtgccatgcaaagcctgggcatttcaagtgcttttctggattcgcatcaactcctctttacaggcatctttatccggaattcagctcgtcccaaaccccacgtggtgtagctctgcttgtgtttttgaatcccggggcctctttgaatcagaagccctttgtatagagataagtatcctttaggccagaatcagcctccatttttttcgcagtcccatttcctacccgtaatactttcttctgattttaaagccatttgatagagaagggacagggaacagaaccttcgccccccgcctgagcagctggtagactagatatcttccaaacattatctcatttacttccctggagttacaaataggtagatttcatgtccgttgaggggtgagaaagctgaaactttgagacttaagaatcctggccgaggtcagcctcctccgaagcttcatctcttgccaccactttctggtgcacacctaggacagatttcaatccctgagatcccaggatgaaacctatgtttgccaaataccagctactgtgccagaagagatcatggaaccaggtgtggaaagctgcttgagaagaggagccaaaacatcatagttgaaccgtcctggaatagaagtgagtaaggtgaaccaggtgtggtggctcatgcctgtaatcctagcactttgggagaccgaggtgggaggattgcttgaggcctggagttcaggaacatcctgggcaacatagcaagatcctgtctctacaaaaaatccaaagtttttttaaattaaaaaaaaaaagtgagtaaggcagcttgaaccggaaatgcacaaaactgctatccagtttgcaaggcttttcccaatgactttgagggatggaacctgaaggaagcgggaggaggcaaatagggaggaaagtgaaatgatttataaatgacttgctaattttgtccaaagggagtaatgataattagggcattcttcccacacgaagatgacacaattgacccaatatcattgaggctaacagtttgggct

SEQ ID NO: 34398 - DNA, 2628 bp, Homo sapiens
agacagggtcttgctctgttactcaggctggggtgcagtgactcaatcagagctcactgtaacctcaaacttctgggctctagcaatcctcctttctcagcctcttgagtagctgggactacaggcatgtaccaccatgcccagctaatttctttttttcttttttcttttttttttttttgagacagagtcttactctgtcacccaggctggagagcagtggtgcgatctcagctcactgccacctccacctcccaggttcaagcgattctcctgcctcagcctcctgagtagctgggactactggtgtgtaccaccatgcccgactaatttttatatttttataaagattaggtctctatatttttgtagagacagggtcttgctatgttacccaggatgttctctaactcctggtctcaagtgatcattttgcctcggcctcccaaagtgctgggattacaggcatgagccaccacacctggctgcatagtatcttaaatccatgggatagggattatatcttatatctgttccttacttgttcctaactgagttctgaatacaaagcaggtgtccatttattatttataagttaagattacaatgttacctcctgaggactgctgagtcatttatacaaccatccaaaagactggttaatacgtaacttaaaaagttgctggctccttcagatgtaagccaaaaatacagttctagtctgcgtcagcccacaaaggatgaacaaaggttggcaagtgctgctcttaaaatgcacacatctttttatccaatttagtcattcaacaaatatctgttgagtgtctactgtgtaccaggttctgtcctagactctgaagagacagcagcgagacagacaaagtccatgccttgaaagtcatgattttctctgcttgagttttatcatctgaactaattcagaaaaagtcaaaacgattgttcttaggtcttttacttaaccagaaccacacgggcccaaggacagctgcacaatcagccttgcctttctattacggaacatacctgtgcttccagaataaactccaaacatctaactgtacaaagtcttcttcacatagaatgtctcactgacaactaggttggcaaaaagggctctcaaattccatgttctagtcagtggcctgcttttagtaattcagtaaagcagctgtatccagaaaacctttttttctatggtcctctttctgtcttactgtcttacctggctccctctcaccgagctgatcagtcatcttctccaggaagcctcctttgtcctgctactccgtctgggtaaatacacacttctgggttcccatgacttttagtttttaatctatataatagaatttaatgccctgtattacaattgactgtgtatgctccttagatttaaagactaattcttttattactgtgatgactgtaataaaagaaaaaaagtaagaagaaagggagggtgtgtggtgacattgataagaattctctccagagcccattttttagagtcagatccatttgtgtcaaacccagcaacaccaattattagttgtgaagctttgagcacgttacttatctcagttgggtctcttgaccctggcactaatcatttgcttaatgaaagaatagtaatcattattagaggcttgattaattatgatagcatgactctgtgcaggcactgttttcagcactttttacaaatttccctataacctaacataaccctgtgaggtgagtaatgttatatcccttccatagataaaaatgaataaactgtggcccagagagggtgacctgcccaggttagtcagaggggttccagggtccattcacttaactattacactctagttgctggctgcaagggagaataggggaagagagacaaggatgagctcaaagaaccccctgcttccatcaagaaaagcgtccttcgccactctcatttcatttactgggaattatcctgccaataccccagaagtgccggtcttcagtctaacattccttctgttatggtctgaatgtttgtgtcccctcaaaattctcattgaaatttaataccgaaggtgatgatattgggaagaggggtctttggggggtgattaggtcacgcagatggtgccctgtgaatgggattagtgccttataagaagaggtaagagagctagcctgccctctttactccgtaagaggatacgagaaaaagttggcagtctgcaacaagggaaaaaaaaccttcatcagacacaggatctgccagtcctcgatcttggactgcgcagcctccagaactatgagaagtagatgtttgttgtatgagcttctcagtctatggtaatttgttagtgatgtccatgctaactaagacagaaattggtactgagaagtagagtgctcctttaacaaatacctaaaaatgtcaaagcagctttggaattagaagtttcaaagtgcatgctagaagaagctgagattgtcatgatgggatgtttaaagtcaattctggtgaaggctcaaaatagtaagagaagagctctagaggaagcttttatattcttagataatatataagtaatcatggacagaatgttggtagaaata

SEQ ID NO: 34399 - DNA, 1195 bp, Homo sapiens
ttatcccttattcatttaagaacactttttcaaattgtatgtttctgagtcatttttttaaaatgatatgtttgtttacctacattaaattagatgatgctgtgataccactctttcccaaataaatgtgtttcctttagagataactagttcagcccatccccgggttcaatgagtcactaagaggactcataggactcagcctactatcatgtaacactaatggctatgatttatttcagcaaaaagataacaagcagaatcagcaaagagaaaaggcatctggggtgaagtctggggaaaaccaggcacaagcttctaaggctcctctgtcagtaaaatcacaaaggataaattaaccccccagcagcaagttctgtatgtgaaaacaggtgtgaaatgttgccaaccaagggagctcattagagactcggtgccccacgtttttactggagcctggtcatgtaggcagccccaacctggcacatatggaaatactggcttcccagaagaaagcaggtgttcagcacaaaccacattgtttgcacaaacagtctggcacaatgaaccactcttatcagttaatggtgggaacccttgcaaaatctcagttctctcccacataccagccaagggccaaccttgcaagcctgccttttcacaggcagtagttcgggcctgttatgttaattattttctgcacaatatcatcaacagagtgtcaataatcatgatagtgacatttacaagtttgatggggttctttttgcccccaaagctgatgtctagtccctttctttatcatgaaattaacatttatggagcccttatcacatgccaggcacatggtttaaatcttttaatatttacagtaaatgggtcctgtttttgtcacagttgtacagatgagaacatttagatcatatcatttagaacatatcattagacttgcccaaagtctcacaactaatatttgtagtgctgggattggaccaggagggcctaactctggaataggcactggggaagttctcaacagtttcaccacacaccttccctttcttttctttcgtttcttttttctttttttaatatggtcatcaaaaataattacacattcacacacacacacacacacacacacacacgcacacacctatatctccccatactgtatggacagaacacaaataca

SEQ ID NO: 34400 - DNA, 940 bp, Homo sapiens
ttgaatgtcacatttgaaataatgcacatattcatcaccaacaagttttttgagtccttaaaatgtgcagtgcacagaattactgcccttttttcagagatgtgtcatcagcagctctgctggaactaccctagaaaatttggccacggttcttgctcttgctgtgtctggtcaaaccagcaggtttgatctgggactataacttcaatatgtgccacctgtgtttccatcagaatggaagggattatagccctcatcaagttggactaagtggtcttccctgaatggattatccaagacagcgctcaatgaaagaaaccactgctagctctctgcacataaaataaaatttttttaaacttcaaaaaaattaaaataaaagccaagagccataaacaattgaaagcatctgatgcctgcctggtgttcccggttcctgctggagctcagcttcagcccaggtgagaccagacgctgttgtcatacaacaggcttagccaaacatgtggatttgatttgtcagaaagttaaattggggactctagtgccttttgaaagacgtaatctgctccagagaccttgcaaagggcatggctgaccttgcatctgttgtgaaactggtaataccctcaaggcagggaggaaagcaagttttgacagagcagaattgagaagcatgaagctgccaggaaagcagaggcagcataaagtaagatgataatgataactgatttcttctttgcaattgattctttcaggatgctatcccaaggtaataataagacctaatgtatacgatgctttactggtttttttcaaagggctgtcacatgtatgatctcacatcctcttcacagcagcctggaaaggaggccagatctgcattattacgcccattttgcagatgtgacataggcataaggataatgtgacttttcca

SEQ ID NO: 34401 - DNA, 939 bp, Homo sapiens
atttctcatgatgccatgggttgcctgggtattcctctgttggtttcccctgggctccttcatgtgtctgcgtaagttagtgacagctgggctggaaggcttaagagggcctccctcacacgtctgacagttgacgttggggaatggttgctggctagagagcctcagttcttctccatgtggcctctcatcttccactaggccagactgccttccttgcattggagtctcagggcagctttccaaatgaacaaaggcagaagctgccaggcctgttaggcctaagcttcaggacgcttaggtcatgtctgctgcattgtatttgtcaaaacaagtcacaagtccagcccagatccaagagggtggaaaaacgaactccactcctccaagggagaagcagcaaggtcacactgcaaaggagcatacaaactgggatgggaggaatttatgagcataaaacaaactagcacactaacatatgaaggcctgtggaatttgttctctgtcaaggtctgtcccaatctgacctgtgttttaggatgataactctggtgatttgtggatatgagttaaaaaggtcagagattagaaataggaagcccagcagggagtacatttcagtaggctaggcaagaaggaagagggcattgttcataggctagggatggggagtgcatatggagaaatggacatgagatatttctgaagtagaattagagagaggccagtgtttactatatgctctgtaccagcataggtgatatagggagatgtgagtaagatattagtaagagccagccaacaaatagatactcaaatatttggttaatgaggaacttaaaatcttttttggaaaaaaggaaaacctaacaacaacaaaaaaagattctagtgaactacacgtttacttcatctgattacagaacctctctttctcgt

SEQ ID NO: 34402 - DNA, 2108 bp, Homo sapiens
acttcaattcatgcattggatactttgaaaaggtttaataaacaataagaatatcagctgccatttatatttatgcttctagcactgtcccaggggctttaatatggtacctataacccttccaattattctcattttagagtagagataactaagacacagggaggtgaaaaaaataagcaaacaaaaaaacctgcccaaggacacacgacaggtcagaggttaaaaaaaaaaaattagctgggcgtggtggcgcacgcctgtgatctcagctactctagaggctaaggcagggttcacactcccggctcttggtttaccgaagttctcatttattccactatctcataagaaaaatgaagcaaatcaagtcacactttaaatcgactgaggagattttgctgtagaaaggaatctggtaaatcccttcatcaagtaaataatcctttgtgtgtaaatctggacttatataaagtatatgttttttggcatggttaaggtgagctaccatgttcctttccggaaagtaaagatgatttaaggaatatgaaggaggcctttgttcattcctttgatggatatttattcagtgctcctctgtgggaatgctaagatgagaaaagcagacggtccctgtcttcagggagcatatcatttttcactaccccttgttattgggttgctaaaaaagagaatgtctattttatttgtggaagtaagtcagtagtttaaaaaacttttattttcttttctgcttatcgcagtaatacatctcattaaaaagtgtaaaaaaaccaaacattataagaatgtataatacaaaaagttagttttcagtattgccagccccaaagaaacaaccacggttatagatgaaaattttaacccttaaaactctttctccagaggagaaacagagaataccatctagtaatttccctatcctggctcctgcagtaccttcaggacttggagattttttttttttttttttttttttttttttactgggcggctcctgaccttggggaaaacagaaacacagctgaaagtaaatatggaacaaaactctggccatggggcctgagaaaggcttttttccactgccttttaaatgtattttcatgaaaagacaccaaagacatttaaagttaggattgttctagaaaatccaggatagatagccaccagatgtctatggggaatcagggcacaccacagtaaacactcaatagatatttgctggagggaggaatgaagactgtacttatatttagaaaattaaaacaaccctgaagtacatgctggattttacaggttttcgatttatctcctcctctttttttttttttttccccatgcagagcaaagggaaaaacagctaagtgtttcctggctgaattttattttgctttcagtttctgccatttcagttcctgttatcgtgctttgaggtgcactgaactgcagcaaacccaggggatccaaggctacgttgaaaagcctttgaccacagtgcagggagcagaagacattaatgacgtgatgtcgacacagcccgcactcaggatcctccaggaaaagaacacagagataaccccggatcgatggtactttttgaaaatgctttattgcaaaagagtggctagggttttacaagggctatgaagaaacatattaaggttaataaagctttttattgagtgtttactgagtgttactatgtgctttacatctattaactcatttcatcttcaaaacaaccctataaagatgttacaactataatcctaaccttacaaatgaaacaactgaggcacagtgaagtgcagtggcctgcccaggtaaaaagcaagacagaatttgaacccaggcagcctgaccccagggtccaggtattaaaccattctgctatagtgcctctaagataacagagaaacttgatgaattactgggttactgaattttagtttacataggttgtttttttccccttaagagtagaacaaaacatacctgaagtatggaaaataacatttattttattttatttatttatttgagatggagtcttgctctgtcaccaggctggagtgcaatggtgcgat

SEQ ID NO: 34403 - DNA, 687 bp, Homo sapiens
actagtctagtagactagactccagcttggatattttactgttctcaggttccagtgagataaaatgcttcagcatatatttttagtcatgggttatttttattttattagcattgcctttaaatcacttttttcttaaaaaaaaaaaaaaacccttccagcatttccaaatttatgattccccacttgaattatgcaattccattatgaagcaatggtctatagtttaccctttatccaacttttatcattttttatttagaatcattcccagaaatacaaattagctgattactgaacaagttctaattactccccagagaccatgggagcttagggtttcagtacagcattgttcactgtttggctgtgaaacagacttcctcctctggtgactgatctgttattgatttaagaactgacctaaagggctatttgttctgggcgctttgaagagcgtttgcttcccctgactttcagaactattctgttggacatcctgaagccttaggccataatctttactatgtagtttgtgcagcctggaataatggaatagtggctaattaacctgttctcacccccaaaatagggcctgtgatttaaaacacctctaaaaaatcacactgatgcttcagtctggaaccctgaggcaggtcaattctgttcccagtccagatcatcctt

SEQ ID NO: 34404 - DNA, 861 bp, Homo sapiens
caaatgtctgatattctgtagatgttgattcaactactgattctcaagggcgatgggaggggaggccccccatacacacgttataaggtctggagacattttgggttgccataactggtggtgggggttgggggagcactcttggcatctggtggataaaggccagggatgctgctaacatcctgtaacacacaggacattcccctacaatgaagatttgtctgtcccaaaatgtcaatagtgacgaggatgagaagccctacttcacattaaagaatgaggcattaaaaggccgactgcaggctctatgttcagctctctaccgcctctactgagaactagtgcaggtcagcggctaaatgatcagcagtgcactgccacctggtggcaggatgagggagtgacattgcagaggaaagaaaatataagtccttcaacacttggaggggcccgcctggtccatttctgaagcttcaaggaccttttaggggaaggagaggaaagaggaaggtagagaggagaaggaaaagaagtagaaggaaaggagaaggagcgaggagggggagagaggagagagaaagagagggttgaagagagaggagaggaagaagagagagaaggaggggagagggagaagggaatgagggaggaagggagacagggaaggagggagagagagtgcacaagtgtgtagagtttaggaaacggttttgaatctgtgcaaagtggttctgggaagtccctctaaatcccagggagtttccaggttcctctaggcaacactttaaagacccttggagatcgggatgctcccctttcagacatcccagggttggtgatggcaatcccattcttacaatt

SEQ ID NO: 34405 - DNA, 685 bp, Homo sapiens
ttgaacccaggaggtggaggctgcagtgagccatgattgagccactgcactccagcctgggtgacaaagagagatcccgtcccaaaaaaataaaataaaataaaaataaaatttttttctacaaactagcaaaaacatttagaaatttattggataattccatatcagaataagttattaaccaaatgacagaaatttcctgttacttatataactataagtgattaacatttctaatttgtatcttctgatttctgggaagctctctgtgtttttggaggagcaagcctgtgttgaaaatgtggattttggcttctcaccagaaccaagtgtgaatcgatgcccttttattcctgaagcgttccgagcgatatggatgagatcttctgccaaagcacaaagtgcagttactattaatgctttaaaatgatccagattttctggttcacttaagaagtccgaaaaaaattaaattatagagagatagttcaaggcctgtaaccacaggagtgttttctatagccaggaaattgcaacttacacaattatagtgcattatttaaaaagtgaggaaaattgggggagagaggggtgctatttacacaaatggtgcagaataggcatccacaccaagagtacctcaaaactctgactttcattagaaaatgaatttgactttggttct

SEQ ID NO: 34406 - DNA, 556 bp, Homo sapiens
aaactttttatttttatttttattttttaaggaaaccctcattgaatactgtgaaagttgtcaggataaaaatagagtcacttgtgacaaaatggagctgggaaaggccatgaaggaagggttcttaatgctcaatcgcctgaaaacaagaactgttacaaaagactataccaaaaccacaaccttgtacaaaggccactgcaaccttatgcaaaaaaaaacttctgcaaggacatctgcccagcagttgcctgcctaaccttggactgatgccacccttattattgatccctgtaagcaaggataattgtttcaaaacaacttatgtaaccctccccattttagctttaaaaattgctgtcttcccttgcctctttgaatgtgcccatagtttactcggcatgtgtgttccacactacaatgcttactcttgaatacacttattatctttggagaatctctctctgttatttagcttgacagtatattcactgaaaatttaaacttgttactgaataaagtcattaaaatgatggattttgtcttccattttact

SEQ ID NO: 34407 - DNA, 1264 bp, Homo sapiens
actaataatattttatgatatctaaagagtaaatgtcgcttggtcttcaaggtaaatattgaaaatgccttctgcctcctccaaaattttgggcatgaactattaaactgcttatttgattacaagtcttcctttaattggcatggttctttcaggcccttgataccttcctaccctcaataatctgaatgaaggcaccatttgccaggtgaattatcaaccttaattttggtttctagtccaccaaatgtaacactatcaagtgaatggttctaacatccatccatttgttcaagtcagaaacctggaaatcacccttcagtccttccctcccacatcctctactttcaatccacagttgtggatttaactcctaaaatcttccaatctcatctgaatgcgattgcttttctccagccccacacctatcactccagtcagactccagtctctcaactctggccattccaagtgctatcaccttcttttcacatccttatctgaaatattcaaaaggctcctatttgtttctctacttcggtctttgtcaagacattcttttgacaatgcaggcttgaagtgggtgactctccactgaaaaagataagtcatgtgcggtggcacgtgcctgtggtaccagctactcgggaggctgtctcagaatcgcttgatcccaggatttagaggcaagcctgggtacataacaagagtctgtcttaaaaacaaaaaccaaaacaaaacttcaaaagctccttttgccaccaagactaataacagtaaccatttattaaatgcttatgtaaaaagaaaagaaaatgtcaagaccttccaaatttattatgccaaggggaaaagctaagccctggaaactgactcatgtaacatggctttttctctttggtgtatgtctgttgcttcctgacctttgtgttgagatgttatacattaaccagattccctagtctttattcaaacctagactaaatgacattggagatagaggcctttgtgattgttacctccttataccagaatgttaaacaaatcccttagtgtgtaatcaatagtagtgttgggacttagaaaataatatcccaaaatgaaggccttagaagcaaaaatttttctctggccttctcctgtcctctgtctctcagtcccatactcccctgaggcttgccatagaaactagaatctctcttccccagggcgggtcacagaaaccaagaactccttctcccaaaagctggtcataaaacctaaa

SEQ ID NO: 34408 - DNA, 2051 bp, Homo sapiens
ttcttacacaattattacaagattatagcatttatctcattgtggcaaatactcattttgatttattttctgttagtttttttgtattctctatttcatttactgctgtatctttgcatctctcacaggacttagcacggagtcagcactccgtggcaagtaatgttagtcagttttgttatttccagaggttagtttagtgtttggtctttctaacagctcaaaacagattaagtgaataaagtaatgcgttatacttgaacataaacttagtacatttactcatactatacatgttctatctggatgcaatctcctgccatacccaaatgtttacattgtgtctgtgtgtgtctgtctgtccctgtcaaatatgtgtatttaaaattgtaagcacctacagagttggtggatttagattgtattacctgacaggtcagtgtgttgctcacactctgccaccgcgtgtgtattgttctacagcccgtagatcattgtttttatcctcttggactttgtatatttataaatgtgacaattcattttgcctcatttgtcatgtagcattcgtgtttcctaaactaaatacgcaatacctagattaataatgcacaacagccatacggggaaactgcatgtttgcatcaaaaggcttctacgttctctgttcactaattgtttgaaaaatatacgctacagagagtcttaattatagacaagtgtaaattacttgtcataaaaaaaacctctgggccgcgtcagcaaaccagcccctaccctggctggactgcccggttccggcaaggcagagaaactacaaatctctgcatgcaacactccaagaagtgctaagggtaccagggaagagcgtcgcggtgcactctggggtttgtagtgaccaacccaagtccgacagtcgcctcctcgatacttaccggacccagccactaccaagatactgagagactcccggggcgtaacgtccatggaacgaagcactacccatattcgcaggattaggaaaaccgccacagctcctgcggccgcagctagaacgagaacgcacaccatgcagagaaacggcgcatgcgtccaacttccggggaccagccgctgtcaaagttcacaactacgggtgccgaagcgactcaaacgcggaggacgcacgtcttggtgggctggtctttcctgagctgggaggagtggaggcgacggagaagctgaggtcccagtcacaatccattttacctcatttatcatgtagtattcgtgtttcctaaactaaatacgcaatacctagattaataatgcacaacagccatacagggaaactgcatattagcgttaaaaggtttctacgttctgtacgttcacgtttgtcagcggaacccctgcttctgcgcggattgtgcgcagctgcagccaagcgtaagctgaaaattgtaaagttaagcgctggggaagcttgatttacgcccacgacgaggtcaggcagtctctgcgccctaaaggtcccgaaactccccagttaggaggtgttctggctctgtcaacttcgtgaatgccacctgaagctaagggaatacatcctttctttctttctttttttttttttaatgccaagagaaatgtttctgttgcacacagacattactgaaagtgttcgccagtaaggaccctaggcttaaacatcgaatttagggccctcatccaaaccccctgtctcccaacatgtatgtttttaacttttctcgaggttttcacagctctcagtgtgaccagagtagttgagggtgaccacctaaaggtaagccacactcctaagaggattgcaaagctcagtggctctaggtagcaggatagacaaggcacagtcctacaattaatattcagttaattttatcacaaagcatttccagtgtgtttctcatgtcctcagccaaaatgatgatctgccaacacccccttcaatctcaattttgcttatgtctaattaattaattgttaataaattaattatgtctaattaatccacattacgacaacataaa

SEQ ID NO: 34409 - DNA, 1639 bp, Homo sapiens
acatggagaaaccccgtgcctactaaaaatacaaaattagccaggcgtggtggcgcatgcctgtattcccaggtacttgggaggctgaggcaggagaatcccttgaacccaggaggcggaggtgttggtgagccaagattgcacaatgcactccagcctgggcaacaaagactgaaactccgtctcaaaaaaaaaaaattaaaaattaaaaaataaccaggaaagattaccaccggataaaaaaagagactgggaatctttgccatgctcagacagacttttcatttattcttctgagggcagctccaagagattttctggcagaatttttctgtataagacaacctttgttcacagtgacgttctgccccttatcttctggccacctcttccagagttcagaggaactttattccaggccattgttttttgacctcattcatttcccctacaccctgctccccatctcctcttcccctaggaagaagagtatataagcatctggacttcactgagttatcgggtaaccacattcctgtgatttcccccacctccagcccccagctggttaaataaactgtgtatgcccttttctcctattaatctgcctgttgtcagttcagttttcagcaaaccttcagagggcaaagaagagttccctgtttgaccttacaacctactactgctaccccagctcagtcccctgagagtggtactcatgccaatggaattagtcattgctagtcgtcatcttaactgtcggattctttctgtgaaagccagtgttcttaaaaaagaccaggctatacttgctgtctcattttccctcgttcattttcatttcccaattcactgaaatgtaacttctaccataattattctctaataacatctgtattttcaagtccaaagaatattgcctttttaaaaaatatattattatttttttctttccacaataagacatctgaaagcaagaatatttccttttcttatctttcttgtcttctcttagccaactgaaaaaaaccttttttatgaaattattttcttctgttgacttttttcttttcttttagacaagcatgttgacattgacataatataccattttctttgattctcctcataccactattgttctatctttatattcttcttaggtctctctttttctatctactttcctaaaaattacaaaaacaaaacaaaactgttggctgagcacagtagctcacacctgtaatcccaacactttgggaggcagaggcaggaggattgctgaaggccaggagtttgagaccagtctgggcaacatagtgagaccccatctctacaataaaattttaaaaaaattatagctaggcatggtggcacatccctgtagtcctagctactcaggaggctgaggtgggaggatcacttgagcccaggagttcaaggctgcggtgagctatggtggttccactgtactctagcctgggtgacagaggcacaccctgtctcttaaaaaaataaataaataaaacttttatttataaaatatattcagaaaagtacttgaaatcataaaacggaaacgtgggtacccaccagctagattttgctgtatgtttttttcaggctctcactttctttt

SEQ ID NO: 34410 - DNA, 1338 bp, Homo sapiens
agcctcccaaagtgctgggattacaggcgtgagccaccgcgccggcacctctttaggtcttaattatgtatactgtaaaatgagaataataaaaagaaatccctcatagtattattgtgagaattaagtaaggactaaatgattaagtcatgtaggcttgccacatggaatattcacaccacatgatatttgaaaagtgagtattggtcagaaaggcaaaccaaaattgctttaagagaaaaattacaacatataaagtacactgtatacaagactgcaaacaagatatgaggtaagcgatcaggagccaaagggaagataaacaaattaagtttagagaggaaggcagatgtgaaaccattcaagactttagtcattgcatcagaaagtatcggagttgtgtttcctcaatctctctgcaagctacagctgcaaagcagaaggtacactaacagcaggctttggattgtaggtaacagttcaagcaatctgaggttattctctaccaattagccattcaaattttaagtagaggagtgacattttgaaagagtaccttgacaacaactggagaacagaaagagcaggacagaaggtccactgcctgtttttgtaaataaaggtttattggaacataacctttgtattgaaccatttatgtattggctgttgctgttttccggccttaggtgtagagatgagtaactatgaccatctggcccacaaagcctgacctatttactgtatgattctttaagaagttatttgctgatcccagggagactgttgcagtaacctggggtaagacaagggtggatagctttgcggaagggacagtaagaactttggaaaggcaaacctatagattgtgccaaaatagtcaatgtctctgaggaaatcatgacccagatatcagttgggatcatccgttttgtttttaaactagataatattgactcaagcccctattacacaactcttacattatatagtgtttcatgaagtatcctgccaattttccagacgtgatttcagcactacctctggcccccgctaatgggttcagtttatggactatttcactggactctaggtgtgctatctcctttctgctcctttttgatatagcagtgcaactcggccccatcctgtggtttcttcatttacctcaccagcacctcccctcacaccatgtgtgcgtcttgcagaggtatgagaatttaggggtagtggaaagcctactggaaatttggaagaaatgaggggagttaaagaaatacaagtaacttagaatattacacattttaaaaaagtattttaggcataccatgaagttac

SEQ ID NO: 34411 - DNA, 2933 bp, Homo sapiens
ttggttactgctgttggtgttagagaattatgcatatcaaagataatgatggtgcatttatcaggaaagaacagagctactatcagccaccagagactagcatgggagagtttctgtaggaggtagtgttgatacagactcttgagaggacactgtgaaattggtattttctgggctgacttcacagatgttcacatataaccatcctgcccacagagagttatgaaatagctatgtgagtgcacaaggtagctattgcgcaaaccaaagttgtcaggtactgcacatattgtgaagggactatgatgggacaccgtgtggttcaaagagcactggagccctggtacatcctgagagtcttggggagaaaaaggggaacacgcatttgggggcctgaaagatctttctctctgcttgactgcagggcaggtttctgtccctccctgttctgtggtatagattttgtcttttccacatcagtccaggtcttcagagtcactatgaattattattaccattttaaagatgaagaaattgagcctcagtgaggttcagttagctaaaggcacacaactctaataaactgacagaattccaggttctgatttaaattctattgccctctcttgaaaataaacatggacagcttatatgagcttttgtgtatatattttctggtctaaatctgcggcagatatgtgtgtctttctgcgcatgtatatagtagatcaaatatgttagctctattgacatttcttagaaataaatatcctgttatcaatgatagtgtttacaaattatttatttagaacttacctcttttcaagaaaaggccttgtgattgctctctgcgaattataatgcatgagtatacctctttgttattttgttttgtttcagacaattatctctggttgatgcagatcacttggaggcttttggggctgtatataacaggtcagaacatctatttaatgtcaaactttatctactaggcaacttggaattctcagccagcaccaaatattcaaatccaacttccacaccccgacaacagaggggttccgggtgtaggtgtagtgctggtgcacccatgagggtgtttttcaggaattctggaggtggtgctggagagaacacgcttcttctacacgcgccccctaccagtttggtatgcacctgcagccccaaagaagaactggcgggactcgagtgtggccgtgtcagacgtggcaagaaaaaccagcagttgccttttcatctcttttctgatgatctaaccatgaagtccccagtatttgagcatttaaggcagaatgtaaattcataatttaagaagattttttgttacgtggctagcccaggtactgaccgctgcgggggcgggctcacacagttcccccgctggcaagttttgtgacttgctttggaaaacccgggaattgcaccctctgcccttggcaaggtgtgagcttccaggatctctccgctgcgacttcgggtgttagggtttttgggctctttccgggacccaagttccagggcaagaaggtctgctcggcggcccgcctcggggccccgcccactttggccagggtcggagccgcccggagcgggagccggagcccgagcggccgcggcccctttaaggagcagctctgcggtaacccgagcccgcagtccgggcgggcgcgacggccgccgcggtagctggagcctccgcgactgcacctccaagcggcccggaacccgcggcttccctggctcccgtgagcatctcaccgggcggcactggccagcgccagccctcgggccggcccggatgagcagactcctgtagacacccgccgccctctcccggctcggcgcagccgccgcccgcgcgcgactcgccccgggacccggcacaggtgacgccgtttggagggggggttggggaggaaggcgggcttgcctcgccccgcggctcccccgcgccagccgccaagcgcagcccgcggagaggggtgccgcggcttcccgcccctggcctagcgcggccgagagctcctgcgcctggaggctgggtgggcgtccggcgcgcgggaggcggcccggggctcccgggcgggctccggcaggtgtgtgcggaaggctcagcatcgtccccgcccggcgggccacggcgtcgctccgggagcaaatggtgtcccggggcccgcggcccccgcgccgcccgggcgccccgcattcctctcgcgtttctcgggctgcacgattccggctgccctgtctgcctggcggtgcctctcgggtctgagcttaaagcgggtgggtgcaaacctttgggcatccagggagagctttcttgttagagcccacacacaatcgggcgcatcaagtgggtaagtccccctcccccgccgccaccttctgaaacaagtagctcttatttacccttgcagttctcaagtgggtcccatttttagccactgagtgctgaaaagtctagtgggaagggaccaggcgtagagtcggagggagaaattggtttctatttccatctttacctctgtaacccctaagtgcctcggtttacccagccatgaaatgggattcgtaatgccagcagtttcctacccctccaagacggcagaaaaacctctgtgaaaacactttgagtctaaattcatttaagagtcgctgttgctggtctgtatatttttaattgtacacacatttgagtgttaatgtggtgcacacttttatatgaaattatgaaatttactttaaagactgatcttggataatgtttaatccaaataccagtttggagaagatggaagagtttgtgtggaccctaggaattgatgtgtgaaataggaaaaaagatttaataaaatctttacgcagtcataaatggagttgagaaaaattgaccttggattgtggtg

SEQ ID NO: 34412 - DNA, 1010 bp, Homo sapiens
tagcctgtcaggacttccttagaagtatagatctgtgatcaaattccaatcatcatttgtagcctttgggggtcatctaaacagcttcttggagaaactgatgaggcaaccagcaattgtgagttaattccagtatttgccctggagttaatcaagggcagagtcttaatctgtagttaatctgtaggcttttgatttccttttcatgactatcaacatctggttacaacaccgaacactcctagcagcaagaaaagcctggaggaaaagtacacaggtggctggcgtggtggctcacgcctataatcccagcgtggaggtgggcagatcacctaagtgaagagtttgcgaccagcctggcccacccacatggtgaaatgccgtctctattgaaaaaaatacaaaaattagccacacatggtggcatgtgcctgtagtcccagctattcgggaggctgaggccagagaatcgcttgaacctgggggcagaggttgtagtgagccgagattgtgtcactgcactccagcctgggcaatagagtgggactctgtctaaaacaaaacaaacaaaacaaaacaaaagtacacgggtatcagagttcaccccagcacgttgcttagtgactgcttgcttttatcattgatattccgacctagttgcagcctccccttgacctgaccctgccttatcagattttcttaccttagttgatgttttcagtgtttgacttcacccttcctcagctgtctggtatttatctaatgctttcaactctggtttctctgttatctctgacaactctccccctatcccccaccaactgccttgtggtgtccacctgactccatggagctcaattctgggtcctggcttgtgacatgttactattcattgaattctgccatggcaaactctaggaaaaactgcacattgatgagtttatgcatttattaatttaactttaaaattttggggacctggagaaactttcttggtcaaattaatttta

SEQ ID NO: 34413 - DNA, 798 bp, Homo sapiens
gggaagacagatagttacagatggaggtagtttgtatagttggtagtgtgggatattgaacgttttcatatgttggcttctacttttttgtgaagtaggatgggggtcatctgctgagaatggggtagatggatggtgttttgaaaagaatagggacaatttgggaattttattgtggactctgagagggttggttggagtggcaaatggttggagtggagggcagtgttgagggctgtctgatccctctgtaattctcacacactggcttcaaccttctcatgtgtgacattctgcaacagagctctgattgttctggactcattgctgagtaaatagttgggcatatccaggattaggattttgtcaactcttggcaatggaaagggaatttgggtgttagagtgctgtggaaatgatggactttgggatgtaagctgattaaagagggatgtacaagcagaatagggctaatgggttgggaaaaagctgagaggtcagtggactgataatgttgtaatactgcacagcttgaaggaaagaaggccctggtcaacaaagggaatacttgaagcgttattttcgaggcagaaaacgatgtataggggacaataaaggttcatgggtgggtaaggtggcatggaagacatgccattccaggtgaagataatggactgagtcgtctaggagatgcgagccaacaaatgggcaggaatatggcagggcttgacgacatcagtgagccagggctaatgtctttgagtaagcaaaagtgattgggagattagaatataacag

SEQ ID NO: 34414 - DNA, 2793 bp, Homo sapiens
tctcccaggatcgattgtatcttgagttaaaagaacctgctctccattatctcaagtagcagagcatatgctaaaccatcacagctgtaaatcatgtgcttaatgtaacgctccctttcgacccccacattctcaccacctgtttctttgtttgatcaccaataaatagtctgggcttccagagctcagggtctttgcagcctccatacttagtgttggccccctggacccactttctctcgtaaactgtcttttttcattcctttgactccgccagacttcgtcacccccacgacctggtgttgggaccatcaccccaacagtatcaaatggcattcttagacacttccatctatcgttaattttaactctctcgttttatgttttataaagtgatgaggacaatgatggtagtaatggcagccatatagtcctaacaacagccctgtttaaaagtattaaccattcattatagatttcttggaataggatcagaggagttcagtaataggcacaaggttacacagctagtaaggtcagagctataaccctggtttgtctttcttttagactacatcctattgctccttagtttgcaagtgtgctcactgtctgcttctagatgttttacttctgttacaatggtcccacattcccctgcctcttctacttgcttacccacttttaccagccttgcttcactaactctaaatgtatcagtgtttggagattcagacatttttattttctcataacaaatttgataacttctaattctgttccactgatatctttatgagattaaaatctggatggctttctccttttcttttggaatgaaatgtgagtgagctttttttttttttttttttttttttttttaagagacggggtctcactaatgttgccttggctgggctcaaatgatcctcctgcctctgctggcattataggcatgaaccaccacctccagccaaaggctaatattctgataatcctctctcccactcagaaataggcctgaaggactcttgggattttgactttagaggtgatgtgcttgtttaacagcactgagaaggcaaggttcaactcaggaaacatgggccaggcactgtgtaaggctttatggatataacagtgaataaggaacaggaaatgtagatatttgcaaggagctaagtactctcacagataagcagagagatctgcggagccaattgactgggggttctcccagctaagagttaaggggtcaggaaaaacttttctagaggaatgtagcaggtccaccttaagagctgtgcagtctggggtgggtgtttgtaaacctttgctcagcgcagtttctgagaagtagggagctagctccttggggcttatagatcgctggctatttctagactaggaaagcacttctctcactttaacgtaccttggactcacctggagggcctgcaaaacacagctgctgttcccacccctcatggtttcccattcagtatgtcttggatggggccctggaatatgcatatctagcaagttcccaggtcatgctgatgctgcttatctgggaactacacgagaaccattgggctagaagtactagaactaaccattctctttgggaagaggagagaggaattagaagagccaagatgttatgcccaacttttttcaaattcaagagacaatttcctcaaagcatggaaaatttgcattttggccaaagttgtttagatgaacataacatcaaatttaccatttttacactgactcttttaatacttaatgaaaatcatgaagtcaggttttatctgatattaatttggtactttggttaatacttttaattctttaccagtatgaaaggagttggaaaaagtaatcttttaaattctcaaaaaaggtcttaaatatagtatacttcatgattttttttttatttttaaagttaatattaactagagagaaatttttagaatttttttaaagaaacggttttgctgtgtcacctaggctggtatgcagtagtgtgatcacagctcacagccacaccctcaaacttctgggttcacatgatcttcctgccttagccttctgagtagctgagtcagactacaggtgtgcaccattgcgcccagcctaaaatggtttttaaaatttaattaaggcttaggctgttgctgctatagtattttgatattttacatgactttgaggagtctgctttaaaatactttataagttgtataaaaataaattttggtatttgatcttatctttggaaaaactatttatttgaaggatacagtaagaaatttagcaagaattttggctgaccttaggaacacattaactcgtaacattttgcagcagtctggtctgtcatcttctctaaacattgaatgtagttacatagaatgccatagacttagaacaactaaagagaattgttaggaaaaatagatcagaagaaaaatcacctttgacaggagaaagtcagtgttatgaatgagagaaattatccttaaggaataaaaagttcacctataatttttttaatgcttcatgtttattacatacatgaatctgtcttagtgaggggttataataatacaaatcattcttttttttttttttttttgagaagagtctcgctctgtcccccaggctggagtgcagtggcgtgatttcggctcactgcaagctccgcctcccaggttcacgccattctcctgcctcagtctcccgagtagctgggactataggcacccgccaccacgcctggct

SEQ ID NO: 34415 - DNA, 756 bp, Homo sapiens
aggtgtatactttaatagtaattaatgaatagattaatgataaaattatgttctgcaaatcaaataatctcttctagcaccttaatcctaaaggtaaatttttattcctcaggatgcttgtagagcttgcttatttccttccctccctttctccccactgaggtcacagcttggtagcaaaccagcaggagttgcaaccattttagtcatgcttgttaatgaaaggaatggtgctgtctaatcgatttgttcttttagattaagtaaaactttggcagttgtgtttttaatctccttgcctttgtccctaggcctcttatgtggtctctagtgctttttgctgaatgtcttggctggaattcctaccttctcaaattgcctgtggtcttaaatcctgcatcttggtctgagaatatccagtaggtcaggaagcagagcactaattgaatactgaagaggtttgcctatggagagtaccatgagtcatgcttcagaacatgcctaaaatgttgtgtccagactggcaaaggaacagctgaatttcagaatgaaaatagcagtcacagctgtcagtggagataggccacaggtgatattacaagtattcagagctacttgaagcaagtgtaaatggggtctctgccacacctcaggctgtttcagacatgatccatgttttgttcttctatctagtctttttctaaaagtctgcttactgctttcgttcccttttgatggtccttcagcatgcataaa

SEQ ID NO: 34416 - DNA, 2575 bp, Homo sapiens
aacgtattcttttgttcaatctctttagcagttaattatgaacctactgaactgctggaacgtctgttattttggaaataaaggagttttttttttcttcaagccaattggccatatcagagataactgcatttaaataagccttcatcttcccaattatgtgctcctaattactcggggtcactgaaatcccatggcatcttctgaaaagcattttccctgcagtccatcttgttaggtttcctttctgttccgggaagccagtatcttttcctttatcagattccttttttaccaacagcgggaatggtaatggtgaatggatgcagggttttaaaatcagccaactttgttctgacttccgtaggtcagtgactggagtcactgcctaacaacctaaattcccagatttatctcatgaaatgtgatttctcatacaaacaaaagttgtgagaactccatgagcaagaccagctgcttgtggggactgccaaattttaaactgttatttgaacagcaaaaagaccaggcaaacatccgagagacagacctaactgcagataagtcttgtaatcttgttcactatagtcaaaacagaatggattgcttattctgttaccctattggtattgctcacattttaaaatttaggtgctgggctcaagaatgataattttattattaagcttcaagagtcacattgtattgtatgcattgaatatcacgaaatcgaaaacactgaaaagctagcgtttacattcttggatcatacccccaaaggccaaggattcccactggccgcttgcagcagggctgtctcctgtgaaggcaagagacaaacgaggagcgttatgacactttgctcccaggactttggcgcacagttcccatgagtccaggtccgtccagtcaacatcctgaagccaggactggcaggtcctgaccctccctttttgcacccgtaaggggaagggcccgggaatctggaccttgtctagagtcccggcgccagtaccagttcggagggcatcctggaggttgttactaacccgagcctcttccaggcttcccaggcaccagggttgctaacagctccacgggggcgaataattttgtttattttgttaactgtggttatctccaacactcagttcagacctgagccgggcaaagtctcaccttgtctcctggtcacttccctgcttgtttgtttcttcctaactcccaagtgtctttcgcccagttcatccccacctcagcagcccaaggctcggcggggacggtcggggttcgaagcctgcagctaaacttagagggttcaggctttgctgggaggcctccctgtgctcagaagagccgggggtaagctgggcggtcgccttgggtgcagacagaggcgcagggcctcggcctccaagaaaattcccaaaccgagaggctgagcttcgcgtctgtagttactgagcaggagcttctgggcggaacttctaagggccccgcccgccccgtctgccctgaccctcgcccggactcgcctcgcccacgtcccgtttcgcttcgccccagctccgtctcgccccgcccccgtcccgcccggttgcggaggcgcggggcgcccccgggtggccgcgggcagtgctgctcctggccggtggaggcggcggctgcggcagcggaaggggaagcgctgaggcggtggggcccacagccatggcggagcctgtgcaggaggagctctcggtcctggccgcgattttctgcaggccccacgagtgggaggtgctgagccgctcaggtgactacccgcgcgcgggagggacagggcgccctcaggggccacccgcgttcgctttgcgtctcctccccaccacggagcctgggcaccccgcctgggcccacgtatggggaccgggttagttgaatgatggaatgacacgcccggaggccggagtggtgtcgcagcgggcgggagtgtgaggcgaccccagaaacactaagagagcggcgcggcccactggggcctctgccgccggtcccgctcccggagccgggggcccctgcgtgcgcacccccaggccctcccccagcctcccacccctcagatctcaccctataaagaagcctgtgctgacgccccctcgttgttctgtgtccttcctaagcactatgccctaggcccccccgagagcactccccggttctaactctacacgggtatttgtaggtcttaagttgcaggagggcagggtctgtttggtaatgactccaggcacctggtaggtagtaggtaaatgtttgttgactgaactttttcatttatccagtgctcaacctcaactttatctgcattctatttccaagttgattgcttttctgatacttttttttttttaggtggagtctctcttgttgccctggctggagtgcagtggatccatctggactcactgcagcctccgcctcccgagtagctgggatcacaggcgcgtgccaccatgcctggctgaattttatttattttattttatttattttttattttttaagacggagtcttgctttgtcgcctaggctg

SEQ ID NO: 34417 - DNA, 1443 bp, Homo sapiens
tgtgtgtgtgtgtgtgtgtgtgtgtgtgtgtgtgtgtgtgacagaaagggagagagagagagatttatttcaaagaattggctcatgcatttgtggaggctggcaagttcaaaatctacagagtgagctgataggctgcagactcagaaagagccctgttgcagttcaagtttgaagactctgaagatggatatccagggaaaagctaatgttgcagttgatgtctgaagatagtctgctggcagaattcccttttactttggggtggagttggagggtggggtcagccttttatttgatttgggctttccactgattggaagaggcctgatcacattatagaggtggatctgttttactcagagtccaccaatttaaatgtaaatctcatccaaaataccctcacagaaacaaccagaataatgtttgaccaagaaccaggcccattcaagttgccacataaaattaactatcacacctctcaagaaatatcctgtcagttgctttgcttttagaggtgaggaatgtggctttcagttcatatctgcttaactcattgccatctcttccctaccatgttttcattgctataaaacattaaatactgatatgaatttgtagtagcattggtaagacagataccttttacaaaataagttaacaacttgacaaactgtagtttcttttggcttgagtgactcctcttgagtcacaactaaccatgataagagattccacaaaaagctacatttctgctagcctaggagcataacaaatgttgactgaaggacatatattgatttttttaaaaagtgagctcatctgctttgggatatcgctccaaagctgtaaacttgtgtttgctcagttcactgttggcaagacaccctgaagtagttattaggaaggaattcaggaattgcacttttatctgtgtgatccttcacctggtgcatttctggtgcttctgataatgctgctccttcatcactaaggcatggttagcctctgctaatctttagcaatagaactttcatgcaaccaagagagctatgctgtaaagtgctaatgatttaccaaaattccatgcatgaatctcttgattctttgagaattccatccattttcataactgtcattatttccctctatgtagttgagtctcaaatttacatctcaggtcctgacctctcacctgacctctaaacactcatttctaactctctgcctcacattacaacctacatgtcctgccaacatcttaaatccattatgattaaagtaaacccattaatgatctaatttttgttattgttgactgttgaaattactattaggcttccaggattaatcttggattttcctttgacgtcttccttactctcttacatccagttagcttccaagtatagtttgtagtgattcttatattcacccatcttt

SEQ ID NO: 34418 - DNA, 417 bp, Homo sapiens
tgttattgttgttgtcagtttttaagagttctatatatattgtcagttcttcctttatggttggtttcttttctcctagccctagtcataaagatggtatcttatgtaaacctctgctgatactgtccaacagaactttctacagtgatggacatgttccatatctttgttgctcaatgcagtggctgctagccacaggattgtggcaaaagctagctattgcacaattgaaatgtgactaatacaactaaggaactgaatttttaattgtttttaattttaattaattgaaatgtaaatttaaatacccatgtgactaatggctaccttattgactagcgcagctttatatagatactttaatttttttatcttttgaatttaaatctatatgaggaatttatttataattgggaa

SEQ ID NO: 34419 - DNA, 2225 bp, Homo sapiens
ctgttcctcaaatatttccccgggtccacaatagccctaaactcctatctgaatccttgggaatgagggctgcaaaaaatatatatactaaaaaactatctcattgggagctcagtgggccactaaaaacaggagcacagattgtttgggcacagccatgaaaagcaaaaggcactttccttaggttcatatagaagtagtttcattactgtttggattcattgaactagctctagaaagcttgatgcagctttagaaatggtcatgctagaaatgttcattgtctgcccctctgtgggggaagtgaggagggaagaagggttaggctgcagaaactcatccctgtggctatgggacaagaagaggttttagcagcaggcatcccaaaagggaaataaagcaagataaaaaaaaatgtggagattgccacattttagttcaaaaaaccatattaatgaacccaaatgaaatacaccttagagaccttcatccattcatttaccacttgttcatgagggtctactctgtgactacatcctaccaggtcccaaggacatggcagagaataagacagacataggaaggtgaaggtagatcataaaccagcccacaaataaaaaccaaagggcgttttaggtatccatgagtttaataaaaaattaaacacgttgatgtgattgagagctggagtcagtgtaggtctcactgagaagatgctactagagctgagatttgaaaagcaaaaaagaatcagccttatgaagatcctgagggaagaacattccaggtagcattaacagcaagggcacaggcctgaagatcataataagcttggcatttcaaaaacccaagagaaggtcataggggaaaccacagtgtgtgagcaagtgaaagagtggtagagggtgattcatgaagatgagtaggcattgagtcatggagaaactgttaaaccacatcaggcatttggactttattctgtgtgcaataggaaactactagaaggttttagctaggaattgccatgatctgaattttgtttttgtggcttcaccatagttgttctgtagagcctggaatgtggagggaagtggcagcagaaggggaagtggagagatcagtctagagactatggcagcacttcaggaaaatgatggtgggtgctgagacaaagatagcagcactggaaacagaaaaatacttagttgacttgggacatactttgcaaataacagtagacaggatttgctgacatgttggatgttggggtggagaaaagaacagaattaaaaagactgcatggggccgggcacaatggctcacacctgtaatcccagcactttgggaggctgaggtgggcagatcacttgagatcaggagtttaagacaagcctggctaacatagtgaaaccccatctctactaaaaatacaaaacttagctaggtatggtggctggcacctgtaatcccagctactcgggaggttgaggcaggagaatcacttgaacctgggaggcggaggttgcagtgagccgagatcgtgccattgcactccagcttgggtgacagaatccacctcaaaagaaaaaacaaaacaaaacagaaacagaaacaaacaaaaacaaatgaacaaacaaaacactgcatggtttctagctgaagcaacacttagagaaatggctaattattgaaaaggggagagaactgggaataggttcagggagagggctatttattttgtgacctttcagaaattcagaggagatgtcaggtaggcaattggattaaaaaacagtctggaggtcgggagagaggtcatggctacagagttaagttcagaagccatcagaatatcagtaatggaaacagtcccagaaataagtgagggagatctggagaagcaaacgaaggtttcacaatctcacggagtgttatttgcaagataatattaatgatttttagagagacttaaggggatgcttatcaagaatggcgtgaactgtataaggcaccgagcttaaataacagagatctaaagccagaaaaaaacttgtcaaatctgcacttatcttttttcttcctataacttctctaatctgtgattttataactcctgaatatcctccatgcctttccttgaagatgctgctgtcatctgcattccctttcactttcagacttctgtggcatctccttttgtgattacagtaatatcatcaggatag

SEQ ID NO: 34420 - DNA, 670 bp, Homo sapiens
caaaaacaaaaaattgtgagtgctgccttcaagaagctcacacttgtttagaaacaaccacagtgaactagtttaaaaaacaaaaataaaaaagtaaaaggaataggtctcccaagaataagtcttgaccttttcaatactacttccatggcagatgttccttccagctgtgaatgttggtattgatcattatgagaacatgacactgaatataggtcagtggcaggatttgttgccacatcaggagataaatgacttgctggacagaatctgatcgaggtagaatggattgtgaaaactctcatgctgggctgcacataaggttttgaaactagaaagcagataaaacaaggcaggcagagagacagggcaaagagcagggattacagagggcacatagcaggtgaggcgagcacacaatacagttttctgacagcagatgaatttccagtggggcccggggacccactgatctttctcactgatttattcattaggtggaaaaaatgtgggttaagctttaagacttcaaatttgttcagatactagaaacggaatattcagaatatagattcttaaccaaggtacaaaatctagtcattgagtcactttggtttcaccagtcttttccttctttccctgtaggaacttccaattgcttcctaaagcc

SEQ ID NO: 34421 - DNA, 668 bp, Homo sapiens
ccaattggttaaccagactactttaagtcaagatttgaaaccaagggaacttaattatcttgtagaccaaaaccagcattttgggaaattaggctgttagatttctcatctgatttctgggaaggccaggtgacaactcggatttagtttgacgaggtgggactcagtatgagtgatttcattttgacttttagtctggtctgttggggcttagagtaggaacttagtccaaaacaatgacctataatctttactgaacaattccaacctcttgctttaattaacatatctcatacttcctcctttgtccttcttgcctccctctcttttaaaggcccttgtgattgcatttaaagcccacctagataacccaggaaaatctttccacttagtcatacctggaaagtcccttttgccatgtaaggaaggagattctgtgcatagcttgatgaaggggttggtgggggttggggggggtggcaattattcaacctaccacatctaggatcactttcaaaactagtttaccacaagcatgcacatatttcaagctatttgagggaaatccaagctaagacagaatccaaaggaaatgaactactcaagatgggagtagttcttattattaaaggctactcatcaacaagatgtgatttagaaaactgtac

SEQ ID NO: 34422 - DNA, 2103 bp, Homo sapiens
gtttgacccaaacagcaatacacatatacagtcccatgttttcacttgcattcttcaggaggattagtctggctacctaataaatgaaactcttttctctctcttctctctattgcagattttgctttccctagggattcattgtttatactcaagacacatgccgatttgctttcgcttttttttgttcttcatacaaccgtgaataaatgttccaaataatttaacttcagatcaagactatccttttggtgctccaataatttaactatagacctcagaaataccctgcaaagttgttattgttatttctctattttatagatgaagaaactgaagcccagaaagattatgtaacttgatgaagtttacatacctagaaagggctagaactgagctccaaatgcagatctatctaattctaaagccatgctgcctcaactgactgtatcttttcaattagtcaaatggagtggtctcccaaaattatttccttccttagtcatcctttcctcctttgtagtctttataatagctaccatttctttccttcagttataaaaggatcagttctcaaaatatgttcatgcaaaataaaagggaagtggggaactgaaccttctttttctggtgataaaatatttctggatactaagttataaagtagcttgataattgttgtgaaatcaggaatacattcattgatctttgtctctgtttctggcaccaggttcctaaaactcatggaatttcctaagtggtaagagagtcttttgttattcataaggagtctctttcaatcacacctaagtttatgctaatgaggtgacttagggcgggaatcctaggtagcatcaaggtggtgctagccactagaaagaccaaaccattagagagaagtgaaactgctcctataaactttacagaattaatcagggaagaagggagggagagaaagaaaacaaaccaagcttgcagcacactaagcattaatcactaggccagctggctcactgacctgcttcctcatggttgtttggtgactgtttcatcagaatcatgtagaccctgtcacaggatcatagttccccttgactgctctattataacaacctgaacattgtgaaactttaagttttgcctttgcaatattttttcaatcctgcataccagtgaaactactgatgcccgctggtctgaagaattccccaagaagctgactcacgaaaaaacgcattttctacatccagatgatttcatcccccttacctaactaatcaacaactccaattttctagcccctcacccaccatggtcctcttaaaagtcctggcccagaactcctcagggggacagatttcagggtctcctcccatctcctcactcagcaccatgcaattattaaatcctttctctgctgcaaagcctgctatctcagtgtaattggtctgttactgcaggggtcatacaaacctatggatcctataacaataggaattttcagacctacacctgacctccagggaaaggaggggctgaagattgagtgctataaaagctcttaaacaagaaggttaggagagcttccaggttggtgaacatactaaggtgcccagaaaggtcatgaaatctctgtaccacttctcctgtcatattttgccttctgcctcactttcatttggctgttcttgagttatatcctttataataagccagaaaatgtggataaagtattttttctaggttctgtgacccattctaataattatcaaacatgaggagaaggtcattggaaccgccaatttatagtcagtcaataagaagtgcaggtggttcaagacttgcagctggcatctctagtagggtggtcttgtaagactgagctgcttcaatttgtgggatctggagctagctctaggtagatagtaacagaattgaattgaattattagacacccagttgatgtttaaaatattagaagactagttgttggtgtcaacaagcgtcctagaattttgaatgctgtattctttttttttcctttatctttcttttttttttttttttttctgagatggggtttcactcagttaccaaagctgg

SEQ ID NO: 34423 - DNA, 1519 bp, Homo sapiens
agtggaggctgcctgggggcgtcctgcagtcagggcagagagagtgtggagagctgttgggaggtgtcccacccacgcccccacaaggaggggaaaccaggtcgccgcggtctgcagcagaacgccaggttccagaggacggcaggcggagggcggagggagaaaggcgcgcgaaggcgcggaggaggcgtcggctgcggcgcccactccccctagtcccagcgccctgccgctcgcctcccgctgccgggcgccggcgcgctcggctctttccgccgccgccgctgccgcgcggtggcccgtgcgcctcggcaccttcggcaatttccgtcgggccccagccgccattttctcgccgcttgtgtggctcgctggctgcgtggctcggttcttgtgagcgaagctttgtccggttcggcaatggacgggtatgtaatcgggccggcgagaaggtgtgtgtgagagaggagttggaccgtccttcggcccggtcccgggccggggagaaaccctcccgcggcccctcccagggctgggctgccgttacccaacccccgccccatcgcacacacccctccctttgcttcccccggcgggctttggtcgagaaaatgagaagaaagcgggcttggaggctggggaggcataggggcgatggcgggggtgaggatcccggagtgggagcgggcaccggcttggcggcgggggatggggtgggaaccccataacgtctccccggtctgtccctgccccctctaggagccatttcgatccgtaccttgggacccgacccttgggttagcggtgcctgtgagagcgagtgggatgggcagagacaggcctttggattgggggagcctctaggggaagaggagagaggcaccccatgtggaccccagccatgagcaacctctccggcctcgcccggccctccgtggtcgggagagatgccggtggcgggagctccggggaaagcctagtgggagccgctggggaaggggggagggcgtgcggcggcgggaggaagggggagggcagatgtcatactcctttgttttcatttgagtctggtagtgggggcgggagggaggaaaaaatgcctttttgtggggactgaaaacattcaaggcttggcaaaagggcccagaaattaaatcatctaaaaaacgaagtgtttgaagccgacatcagtcacatgggcaaaggccaacagcaatggcagaaacaagagcagatagtcaacaaagggctatctctttagctactttggtcagtttctggaaaaacgactataaaaacccagaaccatgctgcatctttgcgaacctgagtcaagacggaatgctgagtgaggtgagaggcaagactgtgaaatggtagggaccgatgtctcgctcatatgcttcacacctgaaaagactcagtaatttaactcaatgttagaaagggggcacgcttaaggtcaaaaatacagcagtatgcagctcttttgggagtgtaaacatagtatcatttaaca

SEQ ID NO: 34424 - DNA, 564 bp, Homo sapiens
gatattaaaaaggataataagcctctaatcatgccttgatctttcaggtgaccagtccccatcttaaagtggggctgccagccatcagtcaactcattagcatacaaaatatatcattttggagatttattaggaatttagagttgtatgccaggaaatggggttgaggaccaaatgtctattttacaatgtcacaatacagtattatgcattacagtagttgccatgctgtgcggtagatcaccagaacctattcttcctgtctgaaactttgtactttgaccatcatcaccccttccctgttcactcctccctcccccagcctctggtgactatttttctactctctactaatgtgagttcagcttttttagattacatatgtaagtgagataatgtgttatttgtctttctttgtttgacttattcacttagcacacacagtgtcctcttaaaatgacatttaatatcccatttctagttcgttattatttaagtaatttgcaagtacattctcattttaaaagattaaacgaaaggaacatgtaaagaataaagctgggg

SEQ ID NO: 34425 - DNA, 1037 bp, Homo sapiens
ctgctgtgtttcttatataaacttaaagttagttccaaaggcttgataagatttagagccttttttttttttgaagtgtttcttgtgcttcctattgtgtctcagtaggagacatctaatatctggttgccccacttttagtgattttaatgatgctttaagactgattgtggatttgggtgttgacattctgatcctttcgttacttttttttctactaatgattttagtatccaataatggttgctgccttaattaatttcactagtgggttgcaaatattgctttttctcccctaattcacatattccttctctacattaattagctgaaaatctttataaagtagaattttccttcatcaactagaattatcaaccttgtaattcaatttgtgcaggacaattagttaaattcttgcatttgtttgctaattttaagttggtgcccagcttttgttttcaggtaagtacttaaaccagcttatgaacaggtacagtatagattcttcccactgtctgctttaaacttttgaaactgtcagttgtttgcaggttctggtagcccagagtggtttgaaatggtgaccttagcccagaagtatgtaattatttaatttggccttgaccagtggcccaaaaaaggaagggggtggggtggataaaggactaaacaaaattaattaaaatttagaaatttttctctcagaaggaattcatgcccataaaacaaagaccaggatacattcgtattttatcggtaaataccaatagattataaatcacttttctcgtatacataattgtgaaaaaaaaaaaccatccaggtatgcatgttatttattcattgagaggatatacatctctcaggtgttttttgtcgtatgtgtacttttgtgtagtctgcctgtttattctttttgaataggatgatatgtacaattaaaaaaaatcttttgtgaaatgtggttttcttaaatacattattgcatttcatacacagtgatgaagggaaaaactacaaagctagacagattg

SEQ ID NO: 34426 - DNA, 956 bp, Homo sapiens
cagattaaaaaactgagacccaatgaggaactgactttccctcatcacttagttaattagtgacaggtcctgtattggaactcgagtttctgagacttcctacagttacaagccaaaggactgagatgatgcttggacagcatggcaggagttgacctgagttagaattggtgagttcagacatttaggtcttagcgatcacttaaaaggagatccagtattctggcttcctgcctgagtcatagcagttgtgagagtttaggaattactcctacaggaaggcagtatttgcaatatgtaactctttctgttctaggatccaaactctcataggttctgtattaggttgctaaggctgtctaaacaaacaaccacggaccagatagcttacacaataaaaatttatttcctcacaactctagaggctagaagtcagagatcaagatgtcaggaggattggtttcttttgggcctctttccttggaagacagccatcttccttctgtatatgtttgtgtcctaatctctaagtacactagtcattttggattaggtcccatcttaatgatctcattttagctgaattaccccatctccaaatagtcacattctgaagtcatgtgggttaggatttcaacatgtgaattttaggggaacataattcagctcataacaggatacaaatgctaatacttaagtatcttgtacctacctaattctgttacacactgagcacaggagagtatattgggaagaaatgtatggcaagtagctttatataatctttcccctttcagtgttagagataagatgggatttcatgagcaagtctcccagatattccatgggtcttaattttctcacccataaaacaaaaatcctgacctaactcacagaggcacagtagaagtgaatagatgtttgccaagtacctcagggctctagaggaaagtaat

SEQ ID NO: 34427 - DNA, 645 bp, Homo sapiens
ttagcatttggtagtatttcctgccaaggaattttgcaaaggaaattgctatgctgtggtattgcatgaaggatgtaatttgctggggtactgaatacctaccacaatgaataaaaatacgtactcacagcagaaaaaaaatcctggactagaaaaacctgccttgttcttcttccctctgtgagtcacagtcaggctggaaagaggacaagtacacagctctggagagaaaagtaaacgagatcaggtgctcatgtcatgattacactcaggtggaagaaaatacttttcgagtctggaatgttctagacacccacatgtggctttgtaattaatatggtgattgaacacatttataaaattctgggcaaggaacagaagatagattaatggaaaaactttccattagtgtagtctgctaagaaaaccccagagatttctcaaagttctttttggaatatctcatttggaggcttacataagaagaatcatagaaagaaaacatcgtagtgataaggggtcttggaaatggttcatttctaacccttcatttcctaggcaaagtgtattttcagcattttagaatcgtatcaaatgagagtgaacctctaggtgaaaaatgggccagggaacttgaatttcttt

SEQ ID NO: 34428 - DNA, 906 bp, Homo sapiens
agtgctatcaattctgcaggattttaatcagaaacaatcttttaagagccatacttcaccataggatgcaaacatcttgtctcctaagaaaagcattgtagagagggtttgctaattgatttttccttaagaacaatctgtttcttttccagtttattataggaaacactggcatttgtcatttttccaatatttggagcttgctgccttaataaatgcacatatcagatgatgctctctccctgtctgatgggcggatggtgttgggcagaggaaggtcacaatgatgctaaatttgctgctgagcaaaggatcaaagtgtaaatggaatccagaaagctgggaaatgtaagtgtgccagtgtaaataatctattaattattgacagctaagagactgaaaattcctatttagtcatgacatctttattttcatactgatggaatcatttctggcatttttaaaattaaaggttttttttttactgtagatataaaatatttcaatttatagtacatctctgctggtgttttcttcttcttttgacatttttgtctgatttccacatattaaaacaatatcagatatgacaaaaggcaagaagagctccaagtatgaaaaatagaacaatggtgttagggttgcctatacattaaaaaaaaaatctgttccaacacagagggaaaacaaacctccaggtacaaagtaagtgatgtttgagaagcttcaggcatgttagctatttatagaaagcaagtgacattgaaggtgctgacacttatgagaccatttagcagatgttacaggagtataagccgtttttcaaacattttcaaatatatcgaagaaaagtacaaagcaaacatgaaatacattagggtccttgctgtaagtttttgaaattat

SEQ ID NO: 34429 - DNA, 470 bp, Homo sapiens
agaagcttgtgttctgctcattgctgacttctcaatctctcactgttctattgctattctcttttttgtcccttttggcaatgcagatttttggatccctccatgagaattatgatgttaaaatgcagattctcaacacacctcttacccactgactcaggatcaatgctagtggggcctgggaacctacatttctcacaagcatgctgcatggtttttaagcaccaagagtttgacatcaacagctctgtgttgtgccaaagctgatgactgttcttctcaggaatttgctcttcttgcaggcacagattttaatggcttgcacagtaagtgtactaacacccaactacctgcccttcaacagccacctgaagaaatgctggttaggcagtttgatcagttaataagtaaggtaagcataaggaaagtatattaatatgctaattacttgaaagataacatgacatact

SEQ ID NO: 34430 - DNA, 649 bp, Homo sapiens
tatatctttacctctccaaaacgagagaggagtcactcaagggtgttattcctattaaaaccttgtagtcataaacttaacttcccagacaaatctttaaggaatatttggctcatagttatgtcaagtctatggtggatttgtaatgaagtatcctttctctatttgctattttttcaatctttaatgttttctgatgaaatttcaggctcttgtcaaattgaggtcattactttgtctactggcatggatatgcaggcaaattggccagtgtgcaaccctggatgactcaacttattgccaaatggcagttagctaacttccatttgcaagaagaggagacagcctattgtcaggaccaacttggtggggaaaggatatatagtctgtgtctaatgcacatatctaagcaaaatgtgatgcatatatttttccacattcgtagatgctctttcttgtttttttccaatttatattgttgacataagtgtctcatcgtccaaatgcttaaattgtgtataataattccaaacagcattcgaccattcagatttgggcattgggcatcacagatatgttaaatctagttacagaggcagagctagagcatggtttccatgccttgaggggagagacatttttcagtaac

SEQ ID NO: 34431 - DNA, 1902 bp, Homo sapiens
aagtgggagctaaacactgggtatacatggacatatagatgggaacaacagacacttgggactaccagagaaagggaggaaggaaaggaggtaagggttgaaaaacaactcactgggtactaagctcactacctgggtgacaggatcattcatatcccaaaccccagcatcacacaaattacccatgtaacagacctgcacgtgtacccttgaatctaaaatgagagttgaaattaaaaaaaaaaagagaacacaaaaaacacaaaacaaacaaataaacaaacaaacaaaatgcccctcaaatcagaaatgaactattgatcctcctcccttactcttttgccataaagctgttctccagagtttacttaaaatggcactactgtttgttcacatgctcagcccaaactatttgaagttatttataattccctttcctcttgtatcacacattcaacccatcagttaatcccattgaccttctctaaaacatattctgaacacaacattctccctcctccaattcctccattgctactacactggtctaaaccacaactgtctcttgcttagattcctgaattagctttaaaaataattgccctgtccccattcttatgctgtatagtctgtctgctacacaacagccatggtgcccatttatttagaaattgaaattagatcatataactaccttaacaattagaataaatcccaaaatccatgcagggcctacatgatctctggttagtcctccaatctcattgtcaactattcactctcctattcaacttacttcacaccatgcatccttattgctgtttctgagcattctactatatttagccctttgtctttgggatttctgatctatttatttagtttgtgattgcctagttcaccttatgtgactaactctgactaatgtgccagtgttaagtgtttactgtcaattcatctcatgactcagtctgttccaggaaatgcaaagattaaaaagaatttctcttgattgcagcttaatattttccttattctaaaatgtttctttctgtcttgagcaatacctaactactagtaactaccagaaatgttagtgaaagtttgcctactcaggggcttcatctcataagaaagtaccagaaaagccaaaagtaatgcgccagtctataacaaatctgtgtttttgataatctaatttttaaaagttacatttactttctgactgccccttatcacattacagttcagggcagaacaaccagaaactacagaaagtaaatggacagggaaagagatgtgccattgttgttgataatgtgccggcacatgactaagctgtgatagttcaatgtttcttaatgttcttaactcaatgcctagatttaaaaagtcacagatcagagctgcaattatgccaaatacctggtggttttattaaacccccaaacagatttcctgttgttgctcccctctaaaagtttcaaaatatgcagagaaaaatgaggacagccaaatgaggataatctgatgtgtacagttgaaaataaagcatcatttaggaagaaacaaagttttctgttatgtagtaatgatgcaaagggctagagaaatctataaccctgaattctgacagtgcagataataatctgtttttcttgcacaatgaaatttactatcagtgtatgaattttaactgtgtgtagatatatatgcacactctaacacatatatacataaatatatattacactcttactaagacaatggtatttcgtaaaaattttttttttcccacagctctttgcagacactaaacttgagcttctgaatggcagaaattgacttttaaaatatatgacttcttaaaaaaattcaactttgattctagattcaggtgac

SEQ ID NO: 34432 - DNA, 296 bp, Homo sapiens
tttggaattggtttccagttaggagattgtctcaaatgaaagcaatacagatctgagtggaatttttaaaaagctgtatttccagagacactttaagtctggcagaatggcatgggattgcttaacagttgagtaccatttaactatgttaacatttatgactgtgccaatactgggcaagggttattccccggcaagaggacctgaagctgtggcactcagtctggctacacaaagaacttgctttatttcatgggaagtgagttgccactaaatctcccaggcagaatgggctc

SEQ ID NO: 34433 - DNA, 1152 bp, Homo sapiens
gttttccattcacttaatagaaggttagacattttacaaataagagaagaaagctgcatgttcttttctgatgaatcatgaacacatactaaggttaatggaatttgcaacctatctatgaggactttcaaaactgaatagacccagtagcaacaaatagggagaaaggggcaaaaactcaagcaatcaatcctagaaaaaaataaataaataacatgaggaaagagtcaaagatgtttaagacatctcaaagacagtaaaattgtaattcatgctttaaattgatttttccttaaacaaaacttttttttggagagtacatatattcattaagcatactgatacttaaagtgcttttggtgagagaacaaaaacaaagttaggtataaaacaaaattttcaataagatctctgcaatataaacaatgtcaagagagacttcatgttggtataaaatctgtgattatcaataagcaccacctcgtgtttgtctggggggttgtaatagttctcagagaatatggcttccccaatgatcatgacaaaagagccttcagtcttcagccaatactcctaagttgtaaaatgccgtaattttaataactttatttttcttgacttaccttatctccttctctagtcaggcaaatccatacgcctccttcctgacagctcacctatcgcagttggaaaccttaaactgactgcaccataaaagactgactacctcagcaggaagcgtgtacaaatttctctttgcggtagaagtaccttaattttaaggtctttgtgaaggtggtgcctctgataccttcgtttaatttgtcttattccttatcttctctcttgccttatcttgaactctgttggctctactctcagccgctgagtacttactagttttctggtccaatattgctttttagcctgaaatgcagtctcctttactctcgagtcatttgtggcttctaatacatgactcagtcttgtccaccagttcttccaatattctaggccagtcagatcacgtaactagaccctcccttttcctgccaatattcatttcttagcaatcttggtgtcccaccttgtctctactctgccctgacaatctctattattcttctgtgacattacattacctgaactctt

SEQ ID NO: 34434 - DNA, 275 bp, Homo sapiens
tctaaaaaccagggaaagaagcatgtctttaaagttttttttttctttttctttctggatagactataaacaccatgaaagctggagctgctctgcattagtcatcatctatctacagtaactagcatggtatttggcacgtatcaaagactgaaagaataaatgaatgaggtcaccagaggtttaggagcaaggggttgcattatcagctaacccttttaagaagattaagtagaaatggataccataagttagagaagtgaaaaataaacaat

SEQ ID NO: 34435 - DNA, 690 bp, Homo sapiens
cttcttttactcacgtaatttaggcttcagatgcatttctcaattgctcactgcagaatagctgcagaactgaaacaaaaccttcagtacaaaaatgacaacccttttgtttccactaaatccgtattctgtcatccactggcagggagttttccagtcatgttctctgccagtccttaccagtttgccaattatacaagctgcttcccagacatcagacacaaattccacaagactgctgtgcaagcgtaccctaattaaccatcagcttaattagacaatttactgtgtaattagcaggcaattagtcaacacctctcagatcttattgactgctgtgacagcctttcagtctttgcacattccaacattccaatacacaacagcgaccatgtttctagcactctgaaaccctgtacgacatagttctggacggagaagtgggtaatattatataacaaaggaaaaaatcaatatggagcctgtccaattactgaactgtttataaacttgtcttttatttaataccagaagtctaacattaaaactactttaatatctgcttcaaaatggttatagagccaacttcttaatatgttctatttcatgttttaatgtaaaacactttaaatttactatgaattatacccccgattggctctgcctatagtaacttgagtaaattttcaa

SEQ ID NO: 34436 - DNA, 757 bp, Homo sapiens
taaaagtcataagatcttctgttaaccaaaaagaacaggaggaaagaatttgtgaccactccttcatagtttaattggttaactgccacatacattttctaacacctgataaacttccataagtataaaaccactatgacaacataattatttctgcattatctaaactttgccattagcagcaattttctttttcttctttttgaatgtaagggcctgaaaattaccagcaagaacagttattgaaaggccacaggttggaggaatctagagaagtccattgtggccttattggtaccaggtaaagtagaatgagatgaggaccgagagacaggcaggagctgtttgctgacatgatttgtacaaagattctggattttattttaagggctaagagaagccattgaaatgttttaagcaaacagccacgatctgatttaagatgtcaaagtccactctgacggtggtgtggaggccggaatttaggataagagtagaagcagcaagactcttttaggaagctggtatactattctgtgagaaatgatgggggctgtgatgtgggtggtaccagtggagatgggaagtgactttctaccctttaataactgatcacataactattaatgttttagtctggcatacagattatggtaataagaattataacttttattgacagggtattttacatgttacgaatcattttaatatatttatttaaaaaaaattcaatctaagcctcactagaatactg

SEQ ID NO: 34437 - DNA, 2627 bp, Homo sapiens
aaagcattcaaatttgatggaaaactgagcctttataattcattctaattcttcaacacaaaaatgaactttggtaaatcaataggatcaactgaggcatttatgcttgaatgtgctcccctaagcttaatgtatttttcctcactgcattatattttaatgattaatttcatgctctttcatggtattctagctcatgaatcacgggtattactttgagggaaaagtaaggtgctgtgagtgatgaaagatgttactgattaaagtgttgcacatatgaactacataagagctgaaggtgtttgaacaccagcaatctagattaaaagtaatattaggcaaactggccatatagactaaggttgaattgagtggagggagtgggaaggatgggcttcttaaatgttcttagttgaaacaatatatgaaatcaagcttggcattcaatgtttcactggcatctttctcctcagtagaatgtaagaactgatttcgaagacaactgcagagaaagaaatcagttaagcagataacacaccattctgaaattaaagagccaaaagccacccatcctaagtcaactccgatatcttaaatcaatactgccttaatactgtcagaagcttgtttttcgacttagtaaataaaattttttaaaaagttaagtcaaagtcacaaggaccaaaaaggaatagactaccctaaatgaaatatagaaaaagacaagtatctattatcctgcacacagatgaacaactatttgttaaatatatcatattgctcaatatcaaaaagtcaactctccaaaacagaaaccaaaagtaaactaaccagagatgtccacataatacactttggctcttgttactaaaatgatttttcaaaccaagttatggagcctggagaaaacaggactacttcctcccagaatataaagtttcttcaattacggaggcaaaatgtggcaaaagcagctattttgcaaacaggtggtttgcaaaacttttacttaagccgccaaaaggactgacgaaaggaaaattttgttatttctaaagaaaacacacacacacataattttctaccagagtagaagactcaaataaagaaaagccccaaacaaaacagaaaactaaaaatcagtttgtcttagctcaaaagtgctgacctaggtttagtatgtgtaaaatcactgttgataattaaatccttttcatcgcatatattaagatactagagagaaaggaaatgccatgtcgtttcaggtaggaccttatttacataaaaaaagattttttttaacagaaacggagtgcaagagggaatcaaaaaccgttgagaggagagaaaaatacagttagtttttctgagggcactgcatttttcatgttctgaatacttcgttccattctctccatgttaaattatttcataaacaatactatgactagaggcgactgctacagctgacacacagatgttttatttctatgcttcacctttgcaaatagcaggattcagctattggaaatgggggcagtggaggtgtccagaaacgacatacaggaggtgaaggggtagaacgtgtgggaaatgggcactcctaccccctagagtccacctctctggaactccagtgcttcttcagtcactgacattcagaggaggacaagacaggcttcctgaaatctcttccgaagtaaacaggtcccgacgcaaagggcaacccctccagtagcggaaagtcctcccctgagctccccgcctgcccacgcgggcctgtggctccgcgctcctccgctcccccgcagagctcccacgggggaaactttcccgcgtctctcactctccggggtgcgggggccgcgggggcctccccggcacctacccgcagagcactccccaccaccccgccaccaccgacgagccggcgcgaagtccgtacctcgatgtccgccgagtccttactgagcacaggggccatggcagtgcctacagtctcgagtctgccagtgacaaaccctccttgcgtcctcaagctccagccagagagccaagtgacagcagccggagcgcgagtcgaaaacaggcagactagggccggcggcgcgggggcggagcgggcgcggggcggcaacgcccccggggcggggctgcgctctcggtcctgcggctcccgcgccaggcacggcagccgcagcccggccttcccagttcagcccgctccgcgccccagcctgcaagcagaagggagggagggagtagagcacccgctctggggactggcctttaatctctaaactgctaaaaacagagctaggcaggcggggccagataggagggatccccaggcaaaggtaaaagcagtccgcgctccaagcaacaacttgcactttttcttttcttccacagaaaccccgcgagatgtagatacattgtttgaggggcaactgcattttcaggaactcctcaaggatgaaatagtagatgttcctccatccatccaccaagtaggtgggcggggtttgagctgcagtggaggataccaaagcaccggtcttctgagagttcacagccccagcggggaggggagggaggcgagcaaaaacatccacagcccgcagcag

SEQ ID NO: 34438 - DNA, 1179 bp, Homo sapiens
ctttgtgtcttaaacagaataaccattctgaaagtattttgacaatcttttggaagaaccgatatattacgtgcttatgccattgtatgtgttgtgtatatatagatatatacatgtatgtctgtatgtatattttaaatcatccatcatactttttccaattgttgcttaaaatgagtcatcactagattcattaattcaactatcttgttttaggcttcaatgaaaagagcttatagatttttcctttttttatttatttttcttttctgggggttggtgttgcgggtgctgattactatcactcttccaagtagcacaaatacatttcacaatgtgaactttgataaatgtccaaatggattttaaaactaagcaaattgaaccgctttttgagtcccataatttattccagccatctgtgtcacacacacgtttgtttcttaaaggctttatacattttttaatttttttgcccatcttccaacccagcagcaccttaggatgtaacagcattaacatatttcaagattaactttgaccccctgaagaatataataagaagaaaaatgagaaacatttttcaatttaactattttcaatttggagattaaaaagtatagaaccaaaaacattcttttggcatgatactttctatttaaaggccaccaaatgtttctttctgggagattgtattgagtggttaggatcttggcatccactattgttctagggaaagattttcctggcccacacttgttgttcctgggtaatgaatgactagagtatatggacagagccaccttcccatctgtactagctttaactaccattgattgctgtgttgcatcctctgttgaaccatgcatgcttaatcattaattttacttagagctaataaaaatagctgactttattgatcatctactgtatgcccaggacattacacatgatcttttatttaattaccacaataatctgaaattaaaaatgtagaaactgacacttatgtattgtattggagtttcagatacctaatttctttcttgggggtggtaggtaggagttattgaaacaccaccacaatatcgtgaattttatttatttattttaaatgcagtatactttataaacagctttttttggttttataaacgtccaaatggattttattttggt

SEQ ID NO: 34439 - DNA, 514 bp, Homo sapiens
aatacccacacagcttttcaatgctttccaagtagtctccttcagttttgcttcctcacaattaaaataaaatatatacacacactgacccacagactcgcacgctttaagaaactagaacaacgcagttgatatgctttctttctacccaagtagcagtgccagccttttccctacctacccaatgttccaccagcttcagcacctggacgaatggacagctcaacccgggccgactgccggcagcactcgcagcagaactgacgctctgagctctaaccaaagctctctcgtgcttgagcggggcagcctgacttacgagaacaccatttcctacgagaccactgccgctgggtgcatattcaattcaagcctccttaagctgtcggatttcccccacccatccaccctcccccccttctccaccctccacacaaaaacaaaaaagggaaaaagcccaataccatcagggcgtttgttgatcaacttacacttcgcttttgaatatttagat

SEQ ID NO: 34440 - DNA, 1230 bp, Homo sapiens
ggaggccaggtgtcgcggacgggccccgggctaaactctcgtctggcgaagtgaagagcgcaaagtctccaggcccagcgcgccttcgcggggcaggccggacaccctagccccgggccgggctcgctcttctctgaagccctggagcgggcaaggggcaccattctggccacaggaactctagtttcagcagccgcagcccgccagcgctggctcggaccggggcctcctctgggagagtaggagagcgaaaaaatcaaccaccaccttggatttcagatcgaggaaaggaagccaaagcaaaggtgtggttacacaggacatccatagacaaatcgttgcctctctaagtgggcctgagctttgcggctccagaagcgcgaggcgcggttggtgcggacgcgggggcgtgggagtcatcgctctccccgcagccctggccgagctctctgctgtcctcccgagtttgggccagagaccacggctcactccctaacgccctcgcaaggacggctgcccgtcgggccaagggcgccccgggctggaggccggagcaagacggccccgcgggactcgggagccttggtaaggcggaggctcagaccccgttcacgaaaacgcctggctcctccaggatttgtcaggtcttaagcagctccgagaaggctccgctggctcttggggaaccccgctgtgcggctcacccccgtttgtctctctcaagctctcgccctcctcccctggtcctcccttctccagatcccctgccctgcccgaggtccgggccgcgcgggctgagcccaatacgcccggagaagagcgccggagccccctgctggccggacgcggcaggcgcggcggcccgctcggtcccctccgccccgcgggctctgcccagcccggacccgcctccaccctccagtgccctggcgctgggggcgtgctaaaagcaacagaaaacaaaacaaaaacaaacaaagcgccaaaccccactctcacctcttctactggtcaaaggtaagtgtgagttcagcctctccctcgtgcgtctctgacccttctctggttctctgggctgaggtctgaaggagccaaaaggggcccccctgaaaaagaaattatggccgctttttagaatatgttttccaagcatcaaaatctctctctctctctctctcacacacacacatatatatacacacacacacgcacacacttcaaacccacact

SEQ ID NO: 34441 - DNA, 576 bp, Homo sapiens
attatgtaaacatatatcacatattaaatatgtatataggtatatatgtatatatatgtttaaatacctgaccatcttctactaagttatgattcaaatgttccgttatctaggaggcttcctctcctctgcagggcccattgtcctagctacacctcaataactgctttcttttcttttttttttttgtcttttcctcaactcaattctaagctctctaaggacaagtatgttgccttactcatacttgtgaactcagtgctcaggacactggcatgcatagaataaacaccctctgaatgtttgcagaatgagtcagtgattagatatgagactggatgaattctcctgaagagtaaatgctaaggagaaaagagtgtcttgtaggaggcatttgcagacagacgaagctatagagagggacaatgcaagtaacctcaaatgagagtgtggaaaggcgggaaagcagccagagcttcattgttatgaaaaaagagtgaaatgtgctctgttgaagagttgaagaatgaacaaaggatatttagtttgaatggaagctcagtaatgagaaatgag

SEQ ID NO: 34442 - DNA, 678 bp, Homo sapiens
ccttacacataaagccaggcctctataaacttgtgtctgctgtttcgcagcagattactctggaaaggggcaccccagagccctgactctctgaactgcagaataccttctgctctgggggctgttgttaccgtcaatacaatgcaaatatgaattctctttacaactttgagcagtgttcttttatagcaccagatgactggtcttagtccctccggagtcctaccagaggagtggatgtcctcatttctgtgaagtctccactccattctgtgctccctgtctggagccagataataaatataatcccaaaaacaaacaaaagattttgcttgctggccaaatttcagatcaatagagcagctgggcaggagccaagattcagaagcttgcatggtgagagaggctacagatcattaaagatgaacagagccataaaacaccaacacaactggcacaaccaattgcagtgcttttggcaggctctgcacagagtccatggattgaacattccgggaaactaggacaaccctcttcacacagagagtgggtggagccctctcaacttacttgcaaggtgcactgtgggctcaggcagggaagctcattttgcctctcagggtgattgagcctgtgtgttgcatatagtgcttgagagctgtgtgcttgtccaaaaca

SEQ ID NO: 34443 - DNA, 1896 bp, Homo sapiens
gccttggcaatgcaaggactgaagattatttctcggtggcaattttccagacttgctagttgtccttgggtcttggtaacattctgctcattaacttcaggaagacgtccaggagtaaagatgcatttgaaagtggctgaaaatagtttgtaaagctcagctttcctggctcgacagtgaaatgaccgcacaggccagtcactgggtcaaaaatcaattaacaaaacgggaagttttcatgtctttatttttacattagctcgaaaatcacaaccaagaagaaaggcaaccactgaatacaggaaatacagtattgttattgctgttttttttttttctcttggcaaggctgggtcgggtgccttccagcctcgctgtggatcccgcgaagtggacggttcgcttcgtggcttcttcccagaccccgccactgcggaaaccgtcactcggtggcccccgactgggtcaatgcgaggacgcccacctcctacctttgagtctctcctcttctccagggtacagccaaccctttctccaacgtagccggagtccgagagtcccagttccgcccctccagcccgccccaggccaggtggggatgcgcccggcccgggccagcgctggtcccggcagttccgcgtctgcgcagcgggcgaggggctggagcggggccggccggggaggtgcaggagacgtgggagccaatgggcacgctcgggggagccgggctggcggcggcggtggcggccggctgggcgcgcactctcgggatggagggcgagcgccgggcatcgcaggcgccctcctcgggcctcccggccgggggcgccaacggggagagcccggggggcggcgccccctttccgggcagcagtggctcttccgccctgctgcaggcggaggtgctggatctggacgaggacgaggacgacctggaggtgttcagcaaggtgagggcggcggcggcgagtcccgggaaacttccaaggcaactccgggcgttgccagcattgcgccgacggctgcctctggcgcgcttgccctcccggggcggtggctctgagctggggacgagtgaggtcccccgggctgctggaccccgcctgccagctctggccgcacccggggccgcgtcgcctcggggcctcaaaccgcagccgctccctcctccgcactttgaccttccgttcggcggggctgtggcttagtggagtctgcaaagttgtgatttgttttccctttctgcttctctgacacagacatcttcctcgcggcagctcccgaacctgggaggctggtggctcaaaaccgctcccgccagctgcttttcgggcgaggccagccctgaactctgggagagcagccaagtttagagaaattattcttaatttagtgttgttgcttgtggatttgagacttgggtgagtctcgggtcttgtgggaataggttctaggaaatctccctgaacaggagaaaacggttgtttctaacaggaagctcctccgctgaggagctaaggatttttcagatggtcagctactgccacccaacccacagccagtgctttcgtttttccttgcccccgggaaatttaggaccaaaggctcttatttgcttattttactgttggagggaaattgacttgtgggggctagtggtagacttttggtacgtgtagactggtgtttgtaatttcttaaagggttttagaaaagaaaaatacctttcttgcagggaggttgaatgtcactccagtttctcaagttgctgctgagagaagacctgagttcagatcacaacgctgtattcattactaagaagcctgttcattttaacgttacctggagatattaggtaaagcaaacgacctacttaaccaccgcatttactctggg

SEQ ID NO: 34444 - DNA, 752 bp, Homo sapiens
tatctttgcatgtgaaagaaccattatttgaatttaaagtttactgtaattatccttatgtttcagttaattttatttataaagaataacatgtagcccttcctttcccatctttttctttcttttatttagacaaaactattgaaggtgactgagcagatgaccagtgttgccaattgaaattgaagctgaggaggcatcctgcatggttggggttgagaataaggctgccttggcctacgtggtcagagcagaggaggaagccggtgtggttgggagattggttacatacaggggaattgagccaataagtaaacatttgggataataggagccaggtttctcactgctgactaaaagagttataaatatggaaaagggaaaggctagacaagccatgacatgtcaaattagaaatagaggtatataggccaggggcagtgactcatgcctgtaatcccagcactttggtaggccgaggtgggtggatcacgaggtcaggagttcaagaccagcctggccaagatggtgaaaccccgtctctactaaaaatacaaaaattaaccaggcgtggtggcaggcacctgtaatcccagctactcgggagtctgacgcaggagaattgcttgaacccgggaggtggaggttgcagtgagcccagatcgcaccactgcactccagcctgggtgacagagcgagacgctgtctcaaaaaaaaaaaaaaaaagaaatagaggtatatcattctaattt

SEQ ID NO: 34445 - DNA, 1379 bp, Homo sapiens
ccataaatactctactcacttatttgctaattgttttctcagatcattggaatgtaacattcatgaggagacagattacataatttcaccaccattgtattcccagagcctaaaacaatgtctgctacatagaaggcattcaaatagaaacgaataaatgaaattttaaaaactgtgctatagtagtttttaaacattacaaatatttattactttaaaattagaaaaagaagtctcttttttgtaagaaaaagaaaaagtgctgtctaggaagaaaacaggggagtggggtggatgatccagcagaagttgctggttttgtctcattgctttgaaagaccaaggacatggaacatggaaaatgcacgtgggtctgtgaaagtccagaagttgagctaacaaaggagggtccaggaaaccaggtcagaataggattttatattctcacctacctaattaagtatagagtggatggagttggtgcaatagttgggaaagaagggacatgcctgggtttcccttcttagttatgcaaagttaggtagattagtgaatgctatgcaacaagttttttttttttttaatccagtccctagtttacccaactggggcaaaggttaacataccgaaagtaaatcgatagaccaacaacctctgttcctacataacatcagtcagaataccatttaaagataatttaaaacacctagtccccatttctgccttccccacttcagtcccaactattttctgtctctgcttaactgtctggattcctggatatactccacagatagtttagctagcatccccaactcaccctaaagcatttttttcagttgttagaatcctactaaagaacatccattgctccccaaacaccagaattgtttcagtttagacagcaacgtgatttggcattagaggttgtcatttatcccgctgtgcttcagttctcttgctctatataatctcgagaactttcaatagcaaaatctctcatatctgtgcttcccattgccagccctattcagctacctaggagcttcttcctcttttacttgtggtctaaaattaacatttcaaattcttcccactgccataatctcttctttcccccagattaaagaaaaatgattggtagaatagcatgtaagatatcttttcaccgaaccataaagaaagtattgtctacagtccatcatttgtaagtttgtctttaggtaaatgttgctcatgctaaggctaaacttctttgccataaacactaaaaatagttcattttaccttacttttggatttttgctaaattttttttcaaaccatagtttcttaaaagtgttttacttcttgtagttctcattcattaaagaatattt

SEQ ID NO: 34446 - DNA, 1737 bp, Homo sapiens
ttattcattagttgagaaaattatgagtttctattttctgaaatattcctatctttcatgatttaattttcttgttattgttggttttgtttttctctttatttggattatcaaatttattggcaacagaagaaaataggttggagctagcaacgacatatatctaagaatcattaaattcaaaatataggttttttgtgaaagaagaaaggtatactacttcttgtgacattgacatttatgttttgggtaattatcgttgatgcttgataaagcttgatatcttgctgttgttgttgttactgctgctgttttccaagaatcaaacctggggaatttgtgtttgattctgccttcccctcttgttccaaaattcattaatattcttattaaaacattcctattgctttcctaacatatattttggtgatctttcccactttcttggcttggacgcttaattaactgattttgattctttcatatttggtggtgaagctatttaagatacctgccattctgtgcaaatctctgatttcatctcctactatctttttgcctgtatttgactcatacaaaattagtcatactttaactagatttagatatgactcatctgcataggatgcattgtagttggactttgtttctttaatagagctgacaccatctttttaaaatttaattctgtccttatgttattttctaatcaatatttttaataattatgcatggttttattccctcatttatctaattctttttgcttgtgtgcttgtatgcttgtttttgtgctccctctgatccttttataatgtatgtgctatatggtctatgtgcttttccctaaataatttggagggcatagtcttttaaaaattatatcactgaatacctaccagacttcttaaggctaattagaattaacatacaatatgagtgctatggtagatattactgttcaccaatgaacagttcccctgttcttccctgcataagagaagctgtgctcccctaagaccatatagttatatggggccctcagacttgttctgggcaataaaatgtgagtagaagtgactgcgtcgttgcaggtaaaggcactgaaaaatctgtggcacaccccattctctctccctctcttgaagcacctgtgaggttccagaaggtggagcctcagtcttcctgggacctttagtgcagagctccagttgtcaacttgacagcgtacatgagtaagaaataaaccacggttactgttaagccatggacactttagagttaaattgctaccacgacaaatcctagtctaccctgactgatccaaatagaaaagagactacaagcacatgcagcgcaacctaaaattaacgctaaaatagttggcactggctgaaaataaacatgctgattacaggaaagacagtctcatagtaaaagcacaggctttgaaagcaaccttgaggttgattaatgaattgtatgagtttggctattttcttaacctctggatgtttatgtcattcttatttgtgagatggggttaataactaccttgtagaatgtcttggagaattattaaccaaaactaatatatgttaagcacttggagtctagttggtcccaatgaaaacagatacaataattattatgagtttcttttatttattcaaagtatattacaaaacaaagcattactaaaattttttgttagtaaaatcttatgaatattaatga

SEQ ID NO: 34447 - DNA, 2030 bp, Homo sapiens
caccagtcaggtagccagtccggttttacctgcctccaaataacacatttctaagtattacaacaaaacagacctgacagtttttatgtctctacctctattagaattgtttgattcttgtttgaattgaatcaaatatctccattagacattattatcatttttctttactagggatcatcccggttgaagggactgtatttttaaggcatgtagtcaggaactcagcaaatatttgttgaatgaataaatgaatacttcagtactcagaggacttgctgggtgcttaaatcccaaattctcttcttttcaataaccagccatcagcattattcttatatcagatgttcatgttaacagttcttcacagattaatttagcatgattagtaattacaggaacatagtttgcaaattatttactttttgagtgtgatgttaaagggtagtccacaagactacccccacttctgacaccatttcaagtttaggatctctaagaccatacttaggtttaataatgcactagaaagactcacagagctctctggatgctgttatacttatgatgacagtttaggatgcaggttaggttaggctgaaaggcttacatcctgactctgactaaagaatcctgtcgtgagttcctcaaatcttgtcgggagttcctcaaattgttgacatactaattaatacgtaacctactaacatcgaaaagaacactgatttgtttctgagtcatgaacttttactggttgtcttgcatgtagaacattttagcttttatgttgtaatctgtagccaatgattataacctccgtattgcaccccacaatgaaaaggacaattttggtgtgaggagtcctcctcccttcttctaaactttcctgtaaaagccttccaactggtagtggactgtggaatatgcccaacttttttggtgtgttttcccaggtcagtcctcacagttggcttccaacaaacttttgtcaaattatttctgcctcagcagccttaattttggttgacatgactcaaaacttccattataaattgcactgttaggctgtctggcacagcctaaattcccaaataagacactcctatcaggtatgacattgcaagaacatagagattacctcccagaagctgagggcaaaggccagatctctctttggaaaaggttaaattctttattccacaaagaatttaaataagtccaaggtttgtttttgtttttgtttttttccaaaaacactcttttcacttgtattttgatatactttctgaagtaggagatctagaggtccaattatagctacggggtcaggatgtgaatgtgaacgtcatcttcttggcatgcagttatttcagtgtctctacaagtgtaagcatagattagcatcaaactacagtagagaccaacctgcaattatagctaattcatgtgaccaaattagggaatctaaataaggagaaagattttagtgtccttaatttaggatccagcccaataactagactctgaagccaggcctatcctgcactgttatcccaaaaatcagtcctcttcttaattctaccatcttttcctatagtgcatttcagactccttgctattcattttttttgactaccaaaagataaataaatggaccaggttcagtggctcacacctgtaatcccagcactttgagaggccaagatgaggcgatcacctgagcccagagatttgagaccagcctgggaaacatagggagactctgtctccagaattagctgggcatgttggtgcccacctgtagtcccagctacttgggaggctgagacaggaggattgcttgatctcagaaggtcaaggctacagtgagagtgagtcatgataatgccactatactccaggctgagcaatagaatgagaaactgtctcaaataaataaacaaatagattatttatccatctggatctccaagtttcactccattctgtctagagttgatctttaaacaatgtgaggttaggagtgctga

SEQ ID NO: 34448 - DNA, 2912 bp, Homo sapiens
tctgggattactggtatccctagccaaaagaaaacatacaattaataaggtctaggatgacactatctggtgcttcaaattaattttatagtttttcatatacattgtttagcacaatcaagaataacccaacaatgtattttaaaaccaagaaaaataagagacaacagttctagagctacagggcacctaggttatgaaatttttatacacagactttaagcatttaataatatgtccaaagatacaagaaaaacatacactaagaactttaactaagaaaaaagaaactataaaataaaaccaaacagattttctggacatgaacagtataataattgatactaaaaattcaatgaatgagtctaaaattagatcatacatagctaaggagaaaattagtgaactggaagcaaaattggaataaataatcaaaatgaagcatgaagagattaaagtatgcaaaatacagaatagaaagtaagagatacaggagataccatgaagtctaactttgaaatcccagaagaaaagcaaaaagtgaatgaggcagaaagaaggaattttaaagttatagagaaagcctctttcaaaggaattaaaatcagctggctttagcaatactttctgcaacaatccatgtcagaagaaaataaaatgacagaattctcagtcatggcccaagaattgtataagcaacttaactgccattttcctaaattcagaagcaaactgtgaaagttattctcttttaactaaaagaaatgagcattgaagtgcatgataattatattaatatgttttacattttagtgataaaatggttttaatatgttattatgctcttctggactttaaataacttttcacatattatatatatatatatattttactttagtacttgtgaatatgaagtttattagcctataaaaatccaaagcaaaaagtatcctacaattgctttaggtaaggtttaaaatataccttaagtttcaaagaacaagacagcaaatatttgacatagtcctcagttaaatattcttaacaaaataaatgtgaccaagaggtagctgaactccagggaatttttgcctagtgatgtgacactgagtaatcaactgaagataaaatcaatgcccagggaaatttttagttgtaaaagctaatttttaataataaaatatgttcaaatttcataaagtttctctcccaaaagctgctgacaaaaattttgcaatccctgggcactacagaaagatgtctcatgtgagagccaattaacgtaaggtgtatttggattctgtttgatatagcatgagatgagcttgatcagactagtatttagcagtgtgtgcttttgaagttgagggaaatttgtttataaattgcttaactcatttagcaatgaatatctctggcatactaccaggtaccaaagttatctgaaaagattcatttacttctaaaggtgaatcatttactactcactctctagttgggtgaggtcagtattggtaaaacttttccaatattgtcttaataatattcatttcccagactcataggagggaaaatgtactcggtacacacagcttctggataattgtgctctattatatcaagcttgatgagttggctcaaaaaacaatatacatatgaaatttcttcacaattccaacaccttgtaaaggccactggattccacatccctacaggattgacttgaagatcatttcaagaagggggtccttttagatcatgtggtaatgctgtcgttgtacagaaaataaaatttaatgctgaaataattatagaggcaactccataatagcagtgatttagaaaattattctctttaggaaattgaaatattttttgaaagcctcattgaaatcaaagagaaaaggaaatagaactctgagcagagaaaaagcaaatatcaaacctacagagcatacagagcatagttcatgtgtgagtactagcagaaaagaggtcaacaacactaaaactagaatccaaaacagggttcaccagtcagaacaaaagtcagactaagaaagataagcagcccagtccagagtcattccacagataagcatgaaactattagatgaacaaggatattgggcaatctatctcatgtatgaaaggagaactgaccaatagctttggactttgtatgatgccgatgtgggtcaatatcactctgctctcaccaatcaaggggctttatctggcacttacacactggcaggacaacgttttcaatgtaagttcagtgattttaggtgtagccaaatcttccctttaatgcaaagccttcttagttgacaaactcatttgatctgaatagattttcaaagatcaaaacataggatgagcaaataaaataaacataggatccaaataaatatgtcaacctatggattaaacagtagaatggaggggagggagtaagaatcagtgaactgaaaggtagaatactcgaaattattctacctgaagacagaaaataggatgaaaaaataaagagaccaattggattataacaggtctaacacatcaccggtgttctggaaaaaaaaaaagagagagaaacaaaacagggtttaaaaagtattcaataaaataatggatgaaaacttctcaaatttgacaaaaggcataaacctacaaagtcaacagctgggaaaaccccaaacaagatcaacctaagaaaatttactccaagatacattgtaatcaaacttgtgaaaactaaagaaaatatatatatatatatattggaagcagggaggaaaatgacatattatgtatagacaagaaacaatttgaatgacagtggatttctcatcagaaaccacagaggcagaataaagtggcacaattttcaagtactgaaaata

SEQ ID NO: 34449 - DNA, 548 bp, Homo sapiens
acaagggccaatccgggaaaaaagaaaatttatgtaggctgcaaaaaattattaaagaaatgaagacattttctacaggccatacaaccatcagttctgagcagcagctggaatttgcacatctcacttaaggcaatatttactgatgggtgctcaggaaagaaagatgaatgagatgagccttccatcctccacagtcagccttcatggctctaaagttttcattcttcttgggtgaatcatgctcctaggaatgataccatcactgctagtttcctggaatggccagcctcccaggccggttggaggccaggcagctgcacaagtctcttgtggttcccgatatcagggggtcacactgggtcaaggcctggctctgccacacagagtcctccactctgaagactgcacctctggttgccaaaatgacaacctgcaattctttaaagtcacttccatggttactcgaaagacctccctccccaattccttttctttgtattagttgaaaagcagtgcttacgctggtttgaggcgtaaaactacag

SEQ ID NO: 34450 - DNA, 1054 bp, Homo sapiens
caggcatgagccaccacgcccagcccactatttttaaccatttaaaaattatttagttacgtaactgacctacactgctgagataacctataaatttctatatattgatttcattttacggatgatggatttggctaatcatctaaagacttgaaaatcaaaactgaaatatctggattttcttcatgcgacaatgaggagccattgaaagtttttgatcatgaaggctatggttacattgtcactaaaatgtcttagaaagaccattcagaaagtagtttgcagaataaactgaaggtgggagaaattggtggcagaaaggtaaaataggaggctaatgaaataatccagaagagaggtcatttttaaaagtgtggtattacacaagtgtgcttccactgaaaggaattttatttggtttgggtgatttggttttggtttcaattttagtgttttgttccttctaccccattagtgataccttttctattgtcttttattctttttttttttaaatttaccaaatacccagacttcaaagagatatctttttttctttagaggaaatacagctattttcccaacccactccttccccaacacattctcagaaacttctggcttgtgaccttccattcgtgttttagagtccagcctctggttctctgtaactataggagcagatgttgaaatcagccacagtgttttatattcagctcccatcctctcctctcaaagtacatacaaatgtgggcccctcaaagaagccacctttatatgcagtcatagactataaattctttgtgagattacttctcagcaaaagagagacatgaaatgtctaccagccagcattcccaaatgaatcttgacttttaatcccacaagatctttcaaactgaggtgaatttctttgcagtgagactttgcaaatccacaaaaagtatttccttttaagatgcccattcctgaggtttttgagctaaggaaaactgactaggcttggcaagtgcagaatttgtgattctagtggtctgcattttgggtcccagac

SEQ ID NO: 34451 - DNA, 3665 bp, Homo sapiens
tgttcaatgtttgggttgtccttttaacctcttcagctgaatgttgatatgaaagcgcttaatagcattcaaacacataataataaggtagttggtaattaggatttacttcagcaaaatttaattaaagaacctgtagggaaaagaaaacagacagagccaattgtacagcttcccagcctctgctttgacctaagagtctcactgggcttgcctgcctttttctaaaggatgggcgaatattcacacagtgccgggctccaggcagttaccaaatgtctcatcacattttcaaaggctcactcctctctcttgcgtaaccggtgaggtcaaaatgggcaccttcctgaaagccaagagtgtcatttctgaacagcgtccaagaaagaaaactgcattccatagaaatccaagtcaagcaataacaaaaggtggcacttggtgcttaagccacactaaataccttggtgggccaacttcttaatatagtcacattaacacctttgatttctccatgacctaaagattccaaagtttgcaacaaagtgctgagcaggggggtcgggggtggggtgtagacgggggagaacgaaccaatgtaaatttaccactacatgaagtttaaagtagctatagattgttgtattattatcaaatccaatcagtggaagaaaggcaaacaagtgacttggcacttctgcctcagtcaaggtaaggctctctcccctagagctagcaagcaggtaaacgagctttgtacaaacacacacagaccaacacatccggggatggctgtgtgttgctagagcagaggctgattaaacactcagtgtgttggctctctgtgccactcctggaaaataatgaattgggtaaggaacagttaataagaaaatgtgccttgctaactgtgcacattacaacaaagagctggcagctcctgaaggaaaagggcttgtgccgctgccgttcaaacttgtcagtcaactcatgccagcagcctcagcgtctgcctccccagcacaccctcattacatgtgtctgtctggcctgatctgtgcatctgctcggagacgctcctgacaagtcgggaatttctctatttctccactggtgcaaagagcggatttctccctgcttctcttctgtcacccccgctcctctcccccaggaggctccttgatttatggtagctttggacttgcttccccgtctgactgtccttgacttctagaatggaagaagctgagctggtgaagggaagactccaggccatcacagtaagtctgcatacagttataactcattaacgttgttacttagaggaaggcagaccgtggccggctgcccctgtcgctgagccctcgcaagtggaaaaacagaactgtcagccttcatggacgagtctctgtttctctcttaaccctcatgaccctctgtaactctggggcttcagaacctgagtgcagggcaaacgttcttgattttcaaaaaggctgtgcctgcattttaaacaacaatcaaaagctgttaaggcagtctgattaactatctttcacactctgtggtgtaccttagaaatgcagtttttccttaaatgtccatttgactggcattagataaaaaaacagatccccaacttggaaacttttttaagctatgaatgcctcaaaaagttagaattttttttaaagagagaaaaagaaattttaaaaatgacctgaaactttatatttgtagtgtggtagcatgttccagaaagcctaaaataattaaaatgaatgttaatatacgtaatttaagcattaaacaagagaaaactaggtaaaagcacgtatcagattaattctaagatatcagtttccagcagagtcacaaactgaataagatcctgataaaggaatgcagtgcatgcagtggatttggaaaatattttgttaataccgagaaggaaaatcgtacattttttatgtttgttccgggaaaaagtcaaagccagaaataaattacttttcttaaatgatccagctttctttttaattttataaaaccctgtatttggcagtaacttggaaatctgtgtcacaatcatttatccctagctataacttttgatgtaattgttttaagaagaaaaagatctttggaaagcaatatcccaatttctcagcattttctgccactgacattaggtataggaaaaaaatgagtactttttaaaaactgatgctagatcagggattttttgttgttgttcttaaaattttcattgcataactaattatgctaatcctaatttagattttttactaattgatacaatatcttagtttcacccaggaaacattcagtaaattgaaatgtcttcttagccaatagtaagacaccagaagtctattgataaggttggcacttttccataaaacaatgctttgttaaatgtctagcttctaattattacattttcctctcttcagaaaaccttggtcgggattattgtttgttttgttttgtccttttttgtcattaaactcagccaccatctcagctgtcctgctttaagggacaggaactcggctctgctctgttgtttttggcatgggccttttacattacagctgttgtctaaaggttactttattagactgcgtgagttgtgtggtcacaggctccactatttctaatgcttatatctcctaattagctaattgaaatagacaagtagacccttgttctgaatttgcctctttcagttgggggacaccctcgctcaagccctttttccctccagtgtaccttataactcttaccaaagccacacatgttccaaagatatggctgtatacagttatttctaaggctaggaatcttagtcactgaaggttccaaacgcaaatagagacagaaaatcctcataatgtcttaaaagccatcaagagagtaagtagcttcctgaatatgcagatgtatgcttttttgatgattaaaaaaatttttggattattccatcagcctaaatatatcccattagaaaggattaaacaaatctcccaagtaagatcacaaagtaattctagcttggaagtaatatacttgtataaaggttgtagggaaaaaactggaaaaagtttatgggaacaaatttctcataaaccagcctacacctcaccaggctaaatccagtcacatttgtcaccacctagaggaaaagtggagcagtggtgtgtccatggaaacaacacatccactctcctccctcttggacgccctgggacacgccagctttcctcgccctcgcccttgccttgcccaggaagccacctcagctagtctctttccccctaggaaaataaaatcacagagtatgcagagagtttgcaagaattatttcatttttggaaatgcttaagcctcagaatctccaacctagactaaaactcagagagtatcttctcattttagctttttcctagtacttacctacactgaaataattttttgtatacttcaagaatgaaatcagaaggcaattccccaatgcacccagacatagcaacacatagacctcactttggaggaaaaaaaaaaaacttttacactctaggatctatttgctttttacattaaaattcgtttctccaattgctggctataaaataaaataa

SEQ ID NO: 34452 - DNA, 1219 bp, Homo sapiens
ctagaatccaatttcagagaacagactcaactgagaaaaagagagtaagaagaaagctgacatttttattctcctccaggcttacctttaactgtaaggaatgtgtgttatcaacacagtctctcatgcctttattcaattaatggttattaggcacctactatgcaccaagccttgtgcatttaaatgaaaagaagtgaaataaggggagtctggaatgtgaggagtggggatgggagtgcattgtaagttaaaatagagtggtcaggatggggttcacaaagagggtgacgtttgagcctagatgtgaaggaggtgagttctgtcaaaagttagacaataaaaataatcacaagtacaagcacctgcctaggactgcctccatttggaaaggagccatataaagtcctgacactggaatttgagcaacagagccagattttgccggccaaagctgctcataatgaaaaaaaaaaaaaaaaaaaaaaaaaaaaaaaaaagctctcacatttcccctgatcaactccctactgctttccactcccaaatacccaaataaatttttcttgacttgtaaatataggaatttaagagacatggagttctttacataaaacagaaatctccacagtacaaagaccaacattaaaacaagaacatgagcacggatgggttctagttatttctttagcacatgttccctgttacaagtgtctctgggcactctacctcatcttgttccctttttgtcaatatctgggctcttctaacagtcagtaagacagttagtgacccaaaagcaagacctgctgtgtgatttgtggggcccaaaacacaagggaattgtggtggcccttgttcaaaaaatattcaaaatgtcaaggtggtgacaacagagctttgatctaagtgctaggcccttctgagcatgatgacctgggtgacttcacaggtcacaaacccaagaagtcagccctgcttctgtattccagactggccatacatatttttccttattcgttctatctgaacaaataagagagtaaaaacaagtgtaaactagtctgtgtctttaacaaaggcataccctaacacgtgtttggatcattgtattatttagagctctaaggaattcttaaagtactagtggccaaagaatgcataatgccccattgttaaccaacatacctcatgattaagacatagttagaggaacaac

SEQ ID NO: 34453 - DNA, 496 bp, Homo sapiens
ggaggccaacaagctagtaacatttgcatatgagattaataccttctagcaaacatgtgcaaagttgaacacatggttttattacttttatcctttataactgagtttcccaattttcttgagcaaccttgagaattcagccttgagaatttggccctgctcgcagtcttgcttaacatccctagggagtggatccagctaggaagtgccttttgaaatcaatgaaaggccagtcattcccccgggggtgcagaacagtgtctggcctggtcaaggatgcttgtatttaaaagttcagtgcaatgagtccaatgttgtttgagtatgcttcgggtttttgttttattttgttttgacagaacatgagatcataaccagaaataactttccatgtttaaaatcagattttacatctttcactgggtgtggccattttgtaattaaagcacattgagtttcaacattttattacttagcttagtgacaggatgcaagc

SEQ ID NO: 34454 - DNA, 941 bp, Homo sapiens
tcccaaaagagccctgcgcttactgcgaccactgaaccatttactgcctgattgtaggcacaggtgcactgatttttcagtccaaatatccatgtgcacaaatttatacctggtttagaaatcttgtcctaacactttccttgctctcctctatccaatagcccacacccaaaatgacacccccagtaagtctccataggaggtatgcccccagcaacttgttcacatcctgggttcttctttcctatccagctgccctgcagttgtccatgacctcccttagccaaactgccctgtgccaagctcccggccagacactctacttcttgaactgtgtccaaagacctctgactttaattggagcacacagagcgcctgacagaaatgtcataagcatgaaatgtaaaaggtcaactgccgaggagaatgatgcaaatacactgcattccctttgggaaggataagctacttatgattaaatgttctctagcacggattttttttttaatactccaaagtgcccttctgaccttctgccttcttttaatgaactttcatttgtcccccaaatagttagaaaccgccttccacagatgatacaaatgggcaaaggtgtatgtgaagccttggatgtctgtgtgactacgtgtcatgagaaaagccaagtgggctggtacagcagctatagccacatcccacataacttaaggaaaattcctccacaaaaggagctgaaacccaggaaaatgcattctgctcaatatcatgtaaagcaataatttactcaattaactaaaaagagagcaggcaaaattcaattcaaaagagaacccaaaacattgatgtagaaatataaaagttaaatttttttgttactggttatcatttatcaaagtttatcttattattatttccatccaagtttaacccctacttaatgc

SEQ ID NO: 34455 - DNA, 687 bp, Homo sapiens
gcagcaaagtaagaactttgaaactgaagcaatgagcaagagagctgtcaagctgaccacatcttgggcttttactggtgtgacaatagtgcagcatttttgagctgccaggcccatgaccatcttcaagaaggaagccaagaaaactgacagttctcttagctgacacgaatatccacagctgtcacctcctggaccagctgctgaatctaatcagccatcctctgaggcagctgactttagagccttagtgtatttggctgagaaaccatgtgtgttacgtggctgccaagggccagccttctgcgtgattgccagtgtctctatgtttttatagaggagaggtcacgatgctgccccctggagttcatttgaatctgacacgcagctgtacactggccaagataccagctcagaatgcttgcaacagtctagtttcaaatgtctgtctctttgttgctgtaagttccttatgctgtgtcaggccatgtgtgccctaccccccgcccagaaaatgtagcctctataaacagcagcagttgaagctactgtactatatttggtccatttctgcatctcttcaccctcctcactataatatggcccaactcttaggaaactgaaattaaatcaaagtgtcattttcaatggtagaatatgcaagaattttaagtactaaatgactat

SEQ ID NO: 34456 - DNA, 539 bp, Homo sapiens
agcctcctgagtagctaggaccacaggtgcacactaccacacccagctaatttctatttttttgttgttgttttttttgaatagagacttggttttgccaaggctggtctggaactcctgggctcaagcaatccacctgtctggatctttcaaagtgctgggattataggcgtgagccactgcacccagtccatttcccatgttctaaagtactgaatacacaggctctaaaggccaaattccaactgcaccgtttacttgtctgggcaaattacttcacctttctaagtctgaatttcctcctagataaaagggataataataatacacctctagcttgtattttatgaagataaaaatgaagaatctatctaaaatgcttagccactgactggcactcagtaagcactgagtaatttttactcataattatcaagccatattaagaaattattactcatattaagaaatttttactcattattatcaagccatattaagaaattattttcaagccatatttgctattgctggtgcaa

SEQ ID NO: 34457 - DNA, 1212 bp, Homo sapiens
aaacatacacttgttgggctgtaattgtgcaagggtattaaagctcctgtaatacacaaaacatttcacattaagtaagttttggagcaaagtttctgataggttttgagaaatttttgagttaatatttcagtccctaagacttaaatgacactaacgttcctgcctaaagggtatcctctagttctcagagatgaagatttaaaaagcaaacaaataaatacttagaaagctattatatttaggttgtggattctgcttctagaattctgattcaaatttcgtactaaaatgacataagaaaaaaatggtcgccccaatttaccagcattccaaataaccatagtgatttattggggggagaaataagcaacaatcggatgacttaatcccgagcttcttgataaggaatataagacgaagagtcttagaaaaaaaaatcagctgtataatctgataaatgagcagactttgttcgaatgctgtgacagtaaatttcagaagagagctaaacattatgtaactagagttcatggaaatgtaaagacagatcatactagggtgaagagaacaagccactggggaattaagaaacttggactttggtctctgctctccccttccctacatcatgtttgccaaaggacttgttctctcaggatccctgaaccttcaactacacaacaagaaaactgtaagaaatagaccctgaggtatcttcgagctctaaaaatgctataaacctttgactctgaatgaacctccctataattagagattataaacatggcacaaagacacaataaaagttccaacaagagcctttgattgaatatacggaaagacaacaatattgtcaacagattcctactgggaagctcaggtccaaactgactgtgtatttccctaaagcagcttttaattaaataaggattaagcctaaactgagagctagtacaaataacagatctaattgtatggtcaaacgaaagtgcaacaatcataataatgtaatcaaatatagtgcccatatgctataagacgttgaagagaaggaaaacaaaataaggagcaaagcgcattactttgtcttctctatgtgaataaaaaggtacagaaggataataaaaagaaggaaaaagaaaaggaactaatgtttactgaatatctattaaatgcaagacacagttatagaaaacttacattcattat

SEQ ID NO: 34458 - DNA, 2173 bp, Homo sapiens
cacctgagtgatgaaataatctgtacaccaaaccctcgtgacatggaatttacctataaacaaacctacacatgtacccctgaacccaaaataaaagtttaaaaaaaaaatgtttacttgacctcattagaggaaaaaacatgaggtgttttcttttgaattgcagtatttaacacagtgtctggctcacagtgacactcaataaattcttattgaattacaaaaaaagaaaaacactggatgaaagtaaatacttgtttctttactgcaaatttcttaggatatttaatatcctactgtacagtgtgaactctaaggtatattatatatcacacagaatattccaaacttatttttctatatactctctatgtaacagagtacctgttaacattttgcatttctagagttgcaaaaaatagtttgcaaaatgctgttatagatttatctttaataatcagcctacattttaccagagaaattagagaattgttcttaaaattatatgatatcaagaaggacaagggtttattatattttaaacaagataaaataaacttcatttttctcttctcttgaagtgatagcacaattaataaaaatagtaaataacgataaaaacttattttaaagcctgttctggatggggaatacacagactacttaagtaatacagtcatctggaaccaaaaataagaagtatgatagtatcttacaaaagaaaacagatttaagtgaaatcttctaaatcaagtaataataaagattcaataaacagtaaaagagtgaaatccaaaatgtaaacagttaatcccagcacggtaccttcaatctgatctcctggcctgaatgtcatctgactcacgtaaatgtcatgaacaggaacagactgtggactatgaccatgttcaggaatcattccatggcatgactgtgttacttttccattgggataattagccacataactaatgtgcaacagaagtatgcaggtaccaagagtaaatccagaaactgccatctcaaaaagaagggtaaaagcccattattgtcatatataattaaaatataaaagcttttacacaactggaccataattctagataactacttgctttctgtgttcagcaaaccatattctcaacatacctgataaaaagaatgtgatatgtgaagtttcacccgaatttcaatctcagctctacaaattactgtgagactttgggcaaatcatttaatcctccacttccttacctgaaaaataaggaaacaaagatctcttttcaatgctgttttttttttctcgagacatagatctcgctctgttgcccgagctggagtgcagtggcacaatctcggctcactgcaacctccgcctcccgggttcaagtgattctcttgcctcagcttccccagtagctgagaatacaggcatgcgccaccacacctggctaatttttgtattttggtagagacggagttacaccaggctggtctcgaactcctgaccttaggtgatccgcccaccttggcctcccaaagttctgggattacaggcatgagccactgtgcctggcccaatgttgtttaaataaaaatgaaaatatagctcaaaatctgacaaggaagataataaataatagctttctttattatcaattggaaataataaactagtcaataaaagcaaaaggttttactccacgtcatcctagaaagcttaaagaacaaagaagaaatgtttcttctggatttaaatatcatcacctgaataaatctatgataagacttttcccaacttcctattaaactgatcatgatgactgggtggattatttaatttgcaatactgaaaactgaggataacagagaaccaattggtagagataataattctactacatgtagcccagatacttctgaattaagaaacacaattgtcagcccacacaatcttcttccctcccacagctccaatcttcctcttagcatctggataatagaaaaccagctactttacctcagtcccacactcttgtagcccagatcaaccactttgcttcatgcatatattcaaaacctgcaaatcacaggactcaacaaggctggaggtgatgagcagtgacatgatacatggcagtaaataaagttaacaccatggacaggttgcaga

SEQ ID NO: 34459 - DNA, 1202 bp, Homo sapiens
ataaaaacttgctggttttgaggctcagggggcatcagggtcctacagatatgtgatgtcacccccagcagcccagctgtaaaattcctgtctttaaactgtctctctttatttctcagccagctgacacttactgaaaatagaaagaacctatgttgaaatattgggggcgggttcctccagtaatctggggacagtgtacatttcttagctcagcatttcatctaggatttggggcaaacctggtgggcttagcattgtcaccaaaaacctagactggggatagaggtggaaataggtgttcacctgctgagtagcagagttaggtaggaagacttttagaaaaataggtaaaaccacagaaggataaggagattgacagagtcagcaagttaagactaagcacaagatatataaagacagcaataaaattttgtggacaaagggaaagaaaaggattgtagttttactgtagagtcaaaggaaaggagacatagagaaagacgaaaagaaatgaacactcagtgatgacccggcagttagaaaccacgtctgatggaatccttataagcagcagatttatcttcttattagagatgaggaaactgaggttaaggaatataccctaaatcacacatacttttaggatttgaaccaaaatctaactgcaatagccatgttcttttcactgttcatcactgttccctgtttagagagaaggtgaaaagtaaacaggtccagcaaggatcaacatttcacagggacaaacaaagtgagtggggagctattgggacaaaggttgaaatctaagttcgcctacctaattcagaatgttaaatctgctttataagagactgaatagcaatgtagagatttatttcatagaactaaaactccagaaagaatgaatgtaaaaatccatagatgcctgaaaacagcaagttgtcagtaagtggtaattgccactatttataatatcactattaactttccatctcctcaatatgtgctaatttcttctgaacactattgggcttagataaactgagatttttgcatgtttcttgcatttgtatttaatttgttcaaacgtaaaatatttcagaaaatgtgctccttttctttctagtaatttaattttaccttcatagaaaacttctatgccaaaaactaagttgactttgatagctgaaactcaaatt

SEQ ID NO: 34460 - DNA, 1735 bp, Homo sapiens
tcagtatggggtttttttttttaacttatatcctctttggacctacagtcattccacaataaagaatgcaagaatcttctccacacgccacaagtcttagttaaccaaatcttctgtccattttctcataaccattaggagccctccaaaagccctggaagatgggttttcctttaccctcaggcattaaatctccttaagcatctgcaaaaagttctgagttactggcctaacataagtgcagcttaatctcagacgatctccgggtctatctagtgtacatgaggtacacccggacaccgttaagtatcagtggtgtttgcactctcgatggtttgcagactggccacaccttacctactgggtctgcattcaggaacatgtgtcctgtctgttagcactagaagtgatggacacgtgttggctggaatgtcaaggctgtagccaggccccttattttagacacttagaaatcaggactctgagaacttaggccaagtaaaaattatcaaaacaaagaaacaaaacacgtggtggcacaaaagacaccagaagccaggtcgtttgcccctcaccattcagcccttcccagcaaaagatcctactgtgcagctcaacctagctcgcagccggtaccgcgggattttaatgtgcaactgtgagctcgcaggctgttaaaggaaggccgcgccttggccggtgcaccttccccagggcaaggagaaagcgccgctcccggcctcagccgcagcaggctccaggtcccccggcccggagccgactgagacggtgcggtgcccacgctctcgcgagactagcggtcggggcgggcgggtcgagcctcccggaagtgggccagaggtacggtccgctcccacctggggcgagtgcgcgcacggccaggttgggtaccgggtgcgcccaggaacccgcgcgaggcgaagtcgctgagactctgcctgcttctcacccagctgcctcggcgctgccccggtcgctcgccgcccctccctttgcccttcacggcgcccggccctccttgggctgcggcttctgtgcgaggctgggcagccagcccttccccttctgtttctccccgtcccctccccccgaccgtagcaccagagtcgcgggtcctgcagtgccccagaagccgcacgtataactccctcggcgtaagtgctaggaatgccgctggcctcgcggggaaacgcattctttctatctatagctcgctctgtacatcttctgtctacggcagctattccagaggcaacaactgcttccctctgttctcatctccccattggtggctggcgacccgaatttgggaatggggagattgcccacctgttatctttgagcagactaatctcttgtaagcagaagtgccattcggagtctccagagccctgtggcttggggctgggaatgtccccctgacttcaggctttcctaagtgtattgcttttctctgagaatggtctaggtttttaattttttaattgtaagaatctgtaatacagcatttttatttcggtcttattcgttgtgctcaaaggcaggaaacaactattaatttgccttctcgaatcttaatagttataagattcattctctttcattgctctgctaggcataaaacacacttcgaacatgtaagtgccgctgtcagctctggagagtttaaggcaatagttattttcgatattttaactcctttttgtttcatagg

SEQ ID NO: 34461 - DNA, 1045 bp, Homo sapiens
caaaacaaaacaaaaaaacacaaggacttaaacgaataagatacttgtacataaatgttcatagcagcattattcataacacccaaaaggtagaaacaactcaaatgtctactgatggatgaagggataaataaaatgtggtatatccataaaatgggttattgttcagccagaagaaggaataagttctgatacagattacaatatggatgaaccttgaaaacatggtgctaaatgaaagaagttaaataaaaaaggacaaatattgtatgataacacatataaaatatctagaacaggcaaattcttagatcacagaaagtatattagagggaagagatgtggtgagtcattgggaaaaaatgagagtaaagtcaatgaacagagctgacactgctcagtggcaacacattgtgaagtcctgctatcctgggtgtaggtgatattaaatagttcttgaattagatgctaattctgccctctagaagggggttcccaattcattgttctttatgttccttgatttgaccttctgggagacagttcttcctttattatattttttagttatatgtgaagagggtattggagaatatgcactctttggaggctaaccagtatcctgagctcatttcctgtgtatagagggctgtaggccaaagagacatgttaagttttgtctaggctcttggctcctttggcaatacaattatcttataaacattactggtttcttatctcttagattccaatcagcttcatttgccaatggccataacacagttctttccttgacatatctccatttatctgtctacttaattctaggtaccttgagcctatcaagcttggtgggagaccaacacctttattccctgttcatttagccatttcatccaattgaaaggacttactaggtgatatctcaatccatttagagattttaaagataggtatgacagggataggcttggtttgattttttaaaattattattaaaggcttccattagaaaagtatttgccattgtcaactgtgccagttc

SEQ ID NO: 34462 - DNA, 1761 bp, Homo sapiens
tccaggaattttctcaagactgtattgcagaaaattttaaaaccagttattctactctaatacagttacttatttttcttcaatatcactttttttctaagtatgtctctcttggacatggttttaatcatttgcaatataaagagacataggcttaatttatagcagccctgagttaacaaaaagagataatcctattcgcttatttgataatccagctgaacctgaagtactgatttcagcctgttcatcacctgaatgggctgccgtggttagagggtttccaacacagctactggaacacttttaaaaggtaatgctgtgatccatgcagccaggaaggggttggtccctcataactctgcaatcctctgggcccagttttctttttcctctcccggttgatgacactaggcccattggtggtacggctttgggtttccttcagtctcaagatctcagtcagggtgggtgaagtggaagaacaagccttcttgcagaccactggttggttggcagcctttgccatagctaatctggttgttttcaggtcagtgacagtcacttttaggagagggttcgtttgctttcaaaatccatctccccgttcctctcagggttctttgccccaaaggactttgcccttccttacgcagtggacaccttggcaccctctgcaaacagacagtcccgcagaggccctcgacgagtgtcactccatctgtttcgcgctcctaggagaggtgtagcagaaagcagtgccccaggcctccacgcgacggtgaagcaggaaccaggggctgccagcagagcagcccaggtgcgtcgccttagggacagagctgccaagtgccgagctggggctgccagagccgagccgggaacggcatttgccagagccgaggcggaagccggagcatttgggggacgggaccgcgggaacccggaaacgcctgggctgcaccgagctggcggtggctacggcgacgggagccggcggcgctgcgggtcagcggtcgcgtaggacccagcggactcggcagcctggggcgcccggcggagctgaaccgcggcccccggtggtgggctcagccggtcgagctgcgcgggaggtgagtcctcagcgcacctggggaggggcgggaaccaggaggctagcggctgcggggcggcccgggaagctcctggaggaggaggaagaggaggcatgcgagggggctgatgtgaagtctgtaggggtgaaggggacggtatcgaagacctgaaatacagtgctagctaagtaggggtgggagcagatgaggtgacacgttgtaactccgacggacgacgtgcggaatgtactgggtggaggaggaaaaaaggcccgaggagaggggtgtgtcaagcgaatgaagacggcagtgtgtgcctcagcgcctggtgcgtgcggagctagtgacgggtgggcccggctggggcccgtcattccttcagtgaacatcccatgagctctcgctcggtgttgagccctgtggtaggcacagatgcacccgaccagcacctggagctcaagaagccgcaggaacttaaagaaatggaaaggctgcccttggtaaggctagtaagaacacaaggactgtttgaagtggggtgagattctcatcagaacaggtgtgtgggtgcattgctttatagtaaaagacgatcttttattatgttctcttaaatgcagtatttgaaaattaagtcttttcgtttttgaaatcaacattcgacttt

SEQ ID NO: 34463 - DNA, 2855 bp, Homo sapiens
tctgagtcaggattccaggagtggctaagctaggtggtcctacctctgggtctctcatgaagttgtagtcagccaaaggcttgaccaaggttggaggatctacttccaaagtgactcactccgtggcatttggtaggaggctacaaacagttcctggacaactggatctctccataggctgcttgagtgtcctgaaaacacggaagcaggcttccccaggctccaagccccaaaatgaatgaaaaagagacccgcaaaggaagatgcagtgccttttatgacctagcctctgaagtcaatactgtcacttctgttttgatctatcaagagtcactaagcctagtctacactcaaggggaggggaattagagtccacctcttccagggaggaatatcattgaatctgtgaacatatcttagaactaccatacctagtttcagtacttttaaacattcgccattttgctttgtccctctcttttccccacctacatatacatacacatacatgttactccctaaccatctgagagtagggagcatgcggtgtatccctatccctcgtgtttttctcttaaggaaaaggatattctattatacaacacggtagttatcaatatctaattttaacattgtgatactttaaagtccacttccacttgtgtaaattgccctttctagcaatgttcccatcaaatttatttttaaacaatacagtaaaaacgtagagggccacaaagggtgacatcggtcaggtaaggtattttttttggcagggaataaaaaaggtcctgggtctagggaggtaaacaagcgtgagccagctgagttctagcgggggtccctgaacaccaaaaggacaagactgtttctgaaacactacattatctcttaagttacccattacttacggaaaatgattttttactgttcccttcggttcctgtcttggttagaacacagctggagattgtgttaatagcttaggacgtctgtttccgtgagcaggtaacaactttttgaaacaaattccctcatctgctgaagaagggggacaaaaacggcccctatcgcccagaaccgttgcgaggatttagctagctggtgacgccggagcacgaagttgtacaggtagccagcagcacccacgcgagcccgcggttaccctggccgcgcggctactgtagagtgggctggcggcgagcgggcggggcggtatcacgcgggaggggcggggcccgctcgtcggctgatcgcacgattgtgacgcgccgccggaggcaggccgggccctcaagatggcggcgggcgcccagagcggctcggcccggcagtagtggtgggacggcactagctgctggggcctgccgccccgggagtggctgcagcagcgccaggaatcgaggatggtaaaatgacccaggggaagaagaagaaacgggccgcgaaccgcagtatcatgctggccaagaagatcatcattaaggacggaggcacggtgagctgagttccgcgccggcgagcgtccctcggggcccccatccggtctctccttcagacccccacactgccgtctctaggcgtcccggtgcctccctcccttcccccaccctgtccgagctgccggtgcctcggggtcgcggacccgcatgccgccgctccgggaatcgtcctccgctgctcgggcttgcggcctccggggcccgtcctctttctttcccgcacctgccgccctctgctctggccgcctctgcaggccctgcggcctcgaaccccacgtgcgcctccgccgcggggaggaatgtgcggggctcccccggcggcccgcccgccgcgcccctcgtcgccgcagcctcgcctcgccttcgccgccaggccccgcggagccgtcgccgcgcttgtcaaggggctgggaaccatccctgctctcccatatgttgctaacggggtggcgtctggcgcggggatcccgctgcggccccgtagtacgttcgctttctgtttccacgtctctctgcgtcggtgctccggctctgggctgcttacagtaaaccctgaccggagatgggcttccctcacttcccggagtcggaagcatgacggcagacacctggggcctacattcgaacctgctagttttcaaagaaaagtcatcactgtgtgtcttaagatcaaaagtattagaatcagtcatggcctaaggatcggaggaggacactttgaagggaagaaaggtttgctttttagaaacagttgtcatcacagtaaactttatgcagtgtgtagttaaccagctggggacgtaggatttttaattgaaaaacaaaacaaaacaaaactgttttatgctaacatttctccgttgctacactgtgtggtctttgttgcatccgctgataccgcgttctgaaatagaatggaaaggtgatatatatgtttcacttacctgaagtgtgcagaaattgtaccattaattccatttctgtttatatcttattggagccgcgatcaactgctagcacagtagtaaatgtgtaagtaggccaccattgaggatttgctgaattcagttgaaaaacgtgacaaaattttatgacatttcagaacacggcccagtcaatatgccaaagtttagaaaacttgagacatatgtaatgactttggaatatatttttagtttaacgtttattatatgttatagctttgacatttattgaaaaaaagaaacaaattcctcaagttctttttattgaacttgattaattaaaacattactttgattagatcggttatgaagagtcatagctcttttgaccaagtaggtaagaactatgtggggagaaaaatactgttgc

SEQ ID NO: 34464 - DNA, 1410 bp, Homo sapiens
tgaccctgccatgaactggctgtgagccctcacgtaaatttttttaacttctctgggccagagttcttatctgtcaaaagggaagagtagggctataatcttcacgattccgtgcacaggtagggtttttgacattaacttgatgtgagccggcttcctaactcctcacacccttcctccagtcccctctgcaacggccgacttggtgagagaggtaaccaccgggccctctgggttccctatccgcttcctaggggggccgactcgacacctaggtgcaaggtggatcccacgggccagaaccgccatctttccccattggcctgaccccaaccgccacccgcgggcactggatgacgcggaccttacctctcctcacagtctttgcatttcacctgcaacgggactagttggtggaacagcacttggctcatgttggctcgctgcctcggctggtgtgcagaaaagcccaacaggcccggccctcgggattagcctgagaggtccgggtcctgataaagtttgagtttggcgctcggcttctgcggaggaggcggggagggagaaacgaggggaaggcgtaagagacttggccctcgccagccaccatcggattcttccggttctgcggaggataaagggaagacggttgtggtagttccgggtattaacctgtgtggcgcgggggctgaggcagccatgtttgttaagggaaggagacccgaaggaagcttctaacttttcttctggttgccggatgctggacaccggaagcgagccctagaattatggcgacctccgcgacgtcgccgcacgcgcctggttttccagctgagggtagatgcggttactatgtggaaaagaagaaacggttctgcaggatggtggtggccgcagggaaaagattttgtggtgaacacgctggagccgcggaggtgtggtatcgccctactctctcaagagtcggaaataagtatcctggtcctgtcggtgctggaacccggcccctcccctctttgacagctttctgcttgtgtcccctggattctccagctttcactttaataaacccagttttgccctccttgcggagcgattatgagttctagtgatgagaaattttttatttttctaagtaaagcgccagcagtgacccatttattttgatctatttatctcgatcttaactcatggtaatgctaggttttaatttttaccccaagctaccgctccgtcttcctgctggaaagtggtagtttagaaaaagtagtgattgaagtcccaaaggtttcactagttgtgttctaattgttatttcatgaaagagaagcacttctcgtgaatgcggttggaagaaactttcttttaaaaatttagacttgaggcccggcgcggtggctcacgcctgta

SEQ ID NO: 34465 - DNA, 1096 bp, Homo sapiens
cttgtaaatgtggaagctgtgacaaatttttgtatttagaaagtatgacaatctgaaaatcaacattttacagaagtgacaccattctgttgaaactggagtatactgcacttatatatcattatttctaatatacacctagttattagagaaattagtgcactaaaggacagtggtggtttttaaaaatgatttcttcactgtggcaagtttgtcctcctctgtccaaagcaacaattgaaccaacaggcccttctaatcttatgccagcaacacaatgggatcgaggccaggttcttgtgcaatttgtgaaacctttggtttgcagagttgttagcgtagtggctcggctcatcagctctgagcatttgaatatctaatgtttcaaactgttagtcctgttctgatttatattcatccctgccattcctattaacttaattacacctgcccacaacttaatttacttgcctttgttactacagtttgaactccagctacatttttctaagaaattaaattgctaggtttttatagctgactgcactcttagaacttctctacagactttatgatctttttggactttactttttagcacatcttaggaactattatgaagttttctcgcagcacacttgaagttaaatagctttttccaagtttaatacagtttgatggctcttctcggggtgtagatgagtgggggcacttacattgcccgttggaggagactctgccttctgctcagccaaaaatcagtgtgaatccctttgactgttccatctttccccatatcaaacctaaattattgatcttccacctgttctcatttcttctgtcctgtctcttgttgagtcacaacagctgttccccatgctctgcgtggtaacattccacatggtactccataaaagcctgatatagatgacctctctataacagaactgcaattattcttgtcatgcttcagttgtttctgtggctctcctctggactctctccaaattctcctgctcagttttagcaagctggcctggagttctctcacacggtctggctagcacagtaatttgcttgtggttaaaagcctttg

SEQ ID NO: 34466 - DNA, 1540 bp, Homo sapiens
tctatttcatatttgtatctccagtgcctaacacagcactggtacatagcaggctcttgaaagtttttgtaagatcggggtcaccaaggcaggagcatctagggaaagggagaagaggcaggaagaagaaacactaagcaaataggggtaacaagtatcattaccggtatgtgtcagtgcttggtgctaagactgggagaaagagaaggaagtgcaggggagatggtgatgggtcacagccttggtgacaaaagggtaggaatgatatgtggtgcggacatagaagtacaaggcaaaagagtgacgccgagctgctcagttcttcggaagcagggacccctgctgatattctataacttgaacggcctcttcctctacacactgtagattccttgagggtaggggtcgtgttaccagtgtttggcatactgtgggtacgcaataaatgctaaacgaatatatctctggatccacagcgcctatcacaatgcctgggcacctggaaggcgctcaataaaacgctagctgggcctcggggtacagatggagcaggacggctgagtcgctgcagaagcgcttccaggtaaggggagggagtgggtttccactccagactggtcgactcgctccgttctctgccctttattttgcatgcatcccttcacctctccatcacgcgtgccctggacgcctggcaccggaggagaaagtaaaacaccactcctggatgactccggacaaatcactccttcccggcctcagatctgcccaaacgtgcttaccagcttccccgcattcctgctccaggttctcagcatacggactgcagccatcttaccccggaaatgacaacagtgccgcaaactggagagactctcctcggcgcggcctatcaggagatgggaaacgcgcctccccctgggcgaccaatagggagggaagaaacgagcctcccacccaacagccaaccaaggagtagggcggagcctgagctaaaccctaggatctgggacccagcggggagtgaaaagagcctgggggacggaggcggggcagagggcagcccaaatttaacactgctgtgtaaatacagatgcaccaaagataatctttttagtgtatgtgatggggaaaatagagagtgttaaggaaacacaaagaaaggtacttacctcaagaaagttatgttgcagtaggacctgagcgatgagttggaaaacatttccccgtcttcatcttgtagtgtagccgccccaaatacagaaaatagaatatttctatacgttgtagcaaggctctggacaactagttgtttcacaagtccatacagcagtacttcccaatgactgccttttttactcccatttatgtttttgattaccaaaattggctaatcaatttttttcatgaaagatgaacattacctaatgtctaaaataaacatgttatcatctttctttttacagactgctatcagatgcagctaactagcatatgcaatacatgtcacagacacatgatcttgatttagttgtctctt

SEQ ID NO: 34467 - DNA, 1604 bp, Homo sapiens
attaaactagtgattctgcctttcccgcctctcaaataaatggtgtgtcaccctagaaagaaagataacacactccgcatacacaaacacgcacaccgcaaggaaccaaaggccaagagtatcaatgtaccagggcgcacacacttcgagagacaggttcggtgcatcgcaggatcccaatctttcttgcatcttcagctctaaaagtcggcacctcggggtatgccaggatcctcgagaaaacagatataaacacatatttacccacaaaacagagataaagcacaagcctgcgggataactggaggagttatcttacagttgagactttctgcaacctgcagattttgccgtgcccagggcacaagtttttcagggctcctgggcacccccgcgaccgtcatctcacttccccggcagcttcctcgccccgaccgcagtgttcccagcgcggctcctttaagccgagctacgcgcatgcgcactgactgcggaactgggcgaacccgggggttcgtttctgctgactccagtgtcccgagaggcgccgcttcttccgctttctcgtcaggctcctgcgccccaggcatgaaccaaggtttctgaactactgggcgggagccaacgtctcttctttctcccgctctggcggaggctttgtcgctgcgggctgggccccagggtgtcccccatggcggggccgcgggtggaggtcgatggcagcatcatggaaggggtgagtacagagcgaagcggccggggctgcagcctaactaaggaggggagctctcaccaccggtgtgcttacttctcttctccctgtaccccaacctttgcagggcggccagatcctgagagtctctacggccttgagctgtctcctaggcctccccttgcgggtgcagaagatccgagccggccggagcacgccaggcctgaggtaaatctggctggagggggagttgggccgtgaagctgggggatcggggggtcgggctgccgggctggggcatcgggagtccgagtggtggaacccagaaggtcccagacgcaggtatgggcgatccagggcggggcactctgcctgggcggtggcctgggttgtaaagtcttgaaagcctggaggggtgagtttagaaatggtctcgagttttctctgtttgactaaatagtgtcatttgctgaagagctagcttttaaaatgttttctcacctcaccgggcattccaaatatccgaacagcacgtatgagctggcaagatagatagggcagaaatgcttgtgacgccagaggaaaccctgttttataaccagtgcattctggttctgctgtcagttttagaatcataaaacaggaaagaatcctgagatgtgttatcccagccttcattcatacctccagagagctgttatgaccagaattatctgttgtggagagggaaacaccttgacatttgaccttatttcttctgtctgggtagctgggcatgccactagttgagcttcaggtacatgcacctgctagaagaggacccaggtttgaagccacactgattgctttgtatgtattctgtatttattacattttaataaatcagcggtct

SEQ ID NO: 34468 - DNA, 2492 bp, Homo sapiens
atataagaaatactagattttttttcaataaaataatttgaggcctggcgcggtggctcagcctgtaatcccagcgctgtggcaggccaaggcagggcggattgcttgtgctcaggaactggagacgagcctggccaacatggcaaaacccggtctctacaaaaaatacaaaaattagccgggtgtggtggcgcacgcctgtagatccaactatttgggagaatgaggcacgagaatcgcttgtactcgggaggtggagattgcagtgagcagagattgagccaccgcactccggcctgggtgacagagcgagaccctgtctaaaacaaaacacacattaaaaaaaaaaaaaccacaaacaaaacctgcaattggccctcgaagggctggttccctcagtcagctctgcacgggtgcgccccctttctccctagaggtcaacaagcgactgcgaaggaaaacgccgccacaagtttcttgctgtttctggagagacctctcagagcgcatgctcttcggatagtcggtctgtagcgccattttcgtatggaagggactgcactctgattaggtacagccttaggacgcccagcgttcaagttgttcaaacagtacgtagagcctcgcagagacaagtcaatggcctcttttagcgggactcctgcctggagcgcttcagctgagactatgtaaagaaattcctttgtgttaaccttcctccttggaccagtggactctcctctctctcctgttccctccgcgcccgcccaggctggctcagcggtctcgccccgcccctccgggaccggagcactgtaaagattaggcatctgtgatgcttttgcgctcacattggcggcccagatgagagggcgtggagaaccagatgggaaactttttgtcccgtgagaacaaagtacaagttatatcagagtctggtatgtgtagaggaaaccaatacatgtactgtgagctaggagctggtgcttctttttcaattgtattttttataaagatgcagaccccctcagtgttgggcgtggggggtggctgaaatgttagctagaggcgaggcagggcacggagatctgaggtttttacgagtgtgtgtgtgtgtgtgtgtgtgtgtgtgtgcgcgcgcgcgcgccctacaagagtttagaagagcatgggtgagtgggcgagaaagaaagagaatgagagagagagagaaaagaaatctggagtgggacaagacttagagggtgcagaaaagaaagggggcgccagcacatcctagcctccgaggccgcgacagcgcctttggcgatgtccactctcaaccccgccgtttcattcataagtttctggcctacaggccccgcccgctcccctgggccgagggccccgtttcctgaacagcaattggtggacggcaacaaagccttagcaaccggctcctagtgacccgcggggcgcctggtaactggggctgctgcggagaaaggagcggggctgtccctttaagggatggccgcggagtcgtgaaagtggagggggctgagggagggcggggaggaaggtctgggggcggacccagggggaggaggaggaggaagagtaactgctgaaaggaggtggcgaaggaggatccggagcagctgctgccagcccgcgggcactgaagtcctcccggctgccgctcgagtagccacgggcgcgatcgggaccagaagtctcctcctccatgatcactttggaagccgggggaagactttgccctgccctgagagctggtctgcgtttcccaggcgcggcggcggcggagcagcagctgcagcagccgagtccaaataggagcggccacagccaggggcgtgagcgccccgcgcggagcgagctcgggttcccctcggaatgtccccggggcgcccggcgcgctgaccccgaagccgcctccgccttcggcgcctgctgcctccctcggccaggcttgttgttcgggactgtgagcttcctggctcctgggcagtggggaagcccccgggggcgagtgacttcagctggccacgacccagccctcccccgtgcgtatctcgcttaagatggcagcggagtcaggggaactaatcggggcttgtgagttcatgaaaggtgaggagcagccgccccgcatcttccaacgctttcttgcccccaactcttcacttcccgcgccactgtccccaccttctcctgaggctgccagtgtcctgcagccgctgcgcgcgctctcgtcccctctagggactctcctttctccgaggaccccctgcttccggcttctctttcttgtgtcccttgctccctctgcagctccctcggatggcctctcggcctcgtaatgggacagcaccggcttctgcccgtactccggcactcagcagctcatggggagcctgctccggatgctcaccggtcacctttactccaccatcgcaggcttcggttttcgggacacccccaaccacacc

SEQ ID NO: 34469 - DNA, 541 bp, Homo sapiens
cacctaaatgtatcactttcaggaattcagatttttttattttggatttttcttacagtgaagaacatctatagttttttttgcatagtatttggtaggtagtaggctttagatcagaagtggtaatatcatactcttgcctcatccttgcttaggtatttgtttacaaaatgtggtagggttggaaagtaccttaagttcctgtctgatctagatttctttgaagtgtatgtgtgtgtttaattagaaaaaccaacttgggtcatataaagtattttattattgataaacattgacatttgtataattcactatgaataaaggcacaaatattaactttggaagactaccaaagtaagcgtatattatattaggtcagttaaaagctgtaacttccttattaattttttctcagatttaggtctaagacctaaatctttttgtttattccatcagccttatcctggctgctgaatataacccaatattatctactatttatctttttgggtaggaggatttgcaaacatattcttttggt

SEQ ID NO: 34470 - DNA, 792 bp, Homo sapiens
aaaagagaaagaaagaatatagaagcaacaagtgtagatttacattctattagacagtgacccattagacccggacaagggccttaaaccaaatactgtggctcaagcttagcccacaaggagcccagaatggaaggaacacatcatagctctcttaggttaatgactggcatcccaaacagatttctttttagcaagaaagatagccagagtgcttggagattgggagcatgaattttctttcagggacaaaggatggagaccgttggaagaaatgatttttaagcccagtgctctgttctccaggatggctgctgatgaggtgactaagtttacccattcgagtcatctgtcctgatgaaatgtacaccttatccaaggtcatgttgatgttagagcctttgttgacttttctttgtctctgtgttccagtttcacctattaagagcaaataaaaagaaagggtctgaactaagattttaacatgataatatagctaagcaagaatacctttttcttgctctagtcagcatttcctccccaggttgagtacaagtaaatagggctttgagttatgaactctgaaaagacaaacataaagttaatcccgttatctgagaaacatatttaccttgcaggaacatagtactttctatatcataatcttgattaagttaacatctggtagttagaacgttttattctcatactcttttaatccccaatttgttgaatttaagaaacttaacatttatgtatcactgtgagggtaaggaatgcaatatgattgga

SEQ ID NO: 34471 - DNA, 1369 bp, Homo sapiens
cctgtctaagatttgaaatggagagtacttgtgtttttccttgaggtttcctcaactgtggctgagtacaaatgacccagagagaccgtcagcacaaccccgtaggataaccatgtgatacctgaagtttaaatattcctgtcatccaacactgttgctccctgaatagaaaggtctcacagtgttagttatgcttttgttaagtgaatagatcttggagacttgaacaattctcttctccccttagtgcatttctttctttctttttttttttttttgagacggagttttgctgtgtcacccaggctggagtgcaatggagtgatctgagctcgctgcagtttccgcctcccgggttcaagtgattctcctgcctcaacctcccgagtagctgggattacaggaatgtgccaccatgccctgctaatcttttgtagttttagtggtgatggagtttcgccatgttggccaggctggccttgaactcctaacctcagatgatccacccgcctcggcctcccaaagtgctgggattacaggtgtgagccactgtggcccccttagtgcatctgtattaagatttttattttagattgaaaatgaaaggaagttaatttgttacaaaatactgatgtcagaataatttgctgaaccctttttactgatctttcatttcactttcctttataccatataaagaaaccatggaacatgttttgttttgaggactttggtattgtatttttatcctctagtgcttaatagatacaacttatgttcagtaattatttgttgaatgaattgaactggtgggacagaaggtcaattcgttggccaaatggtgtcatcatttgtttgcagaggcctgcagggccagttaggcaacataagagagcaaactagggggttggaaaaggaaatagtggggcttgtggtgagctgtatctgagcctagattaaacaccagccagagtttttgagctctgtggaagtaaaggctttggatagaagactaatgaatatattctccatatgaataatagaaatctttaaaatgttctagactatttctgttttccagttcactgggtactgtgattcactaaataaatatgtaaataaatgaatatatatatgtgtgtgtttatatatataaatatatgcacacacacatatttgcccctctatattgatgtacatatgaaatactttaccctataaaaaagttggtttaacaaaggtcgcttgtctaatgtttatttgctacatctctgtttattgataattgatggagcttgcaaaaacaactttgttctaagttatatgcagtttgaagaatttctgatttctgttagtgataacatgcaca

SEQ ID NO: 34472 - DNA, 1390 bp, Homo sapiens
agtgtcaggatggaccgcgctgccagaagccgacgctagcgagggaggtgtgaagagttggccagaatgaccaactcctcctccacatccacctcctccaccaccggtggctcgctgctgctgctctgcgaggaagaggagtcgtgggcgggccggcgcatcccggtgtcactcctgtattcgggcctggccatcgggggcacgctggccaacggcatggtcatctatctcgtgtcgtccttccgaaagctgcagaccaccagcaacgccttcatcgtgaacggctgcgccgccgacctcagcgtctgcgccctctggatgccgcaggaggcggtgctcgggctcctgcccaccggctctgcggagccccccgcagactgggacggcgctgggggcagctaccgcctgctacggggtgggctgctgggcctcggactcacggtgtccctcctctcccactgcctcgtggccctgaaccgctacctgctcatcacccgggcgcccgccacctaccaggcgctgtaccagaggcgccacacggcgggcatgctggcgctgtcctgggcgctcgccctgggcctcgtgctgctgctcccgccctgggcaccgcggcccggcgccgcgccaccgcgagtccactacccggcgctgctggccgccgcggcgctgctggcgcagacagctctgctgctgcactgctacctgggcatcgtgcgccgcgtgcgtgtcagcgtcaagcgggtcagcgtgctcaacttccacctgctgcaccagttgcccggctgcgccgccgccgccgccgccttcccgggcgcccagcacgcgccgggccccggtggcgccgcgcacccggcgcaggcccagcccctgccgcccgcgctgcacccgcggcgggcacagcggcgtctcagcggcctgtcggtgctgctgctctgctgcgtcttcctgctggccacgcagccactggtgtgggtgagcctggccagcggcttctcgctgccggtgccctggggagtgcaggcggccagctggctcctgtgctgcgccctgtccgcgctcaatccgctgctctacacgtggaggaacgaggagttccgccgctccgtgcgctcagtcctgccgggcgtcggcgacgcggcggccgctgccgttgccgccacagccgtgcccgcagtgtcccaggcgcaactgggcacccgcgccgcgggccagcactggtaacctagccggggcccgagggaagcggagatccccggcttccgacgtccttgggcaccgtcgcctccttccctcctagggcatcccctgcctgaacgaagacttccgccgcgaagcccgatagatcgggggaaaatggggccttcgaccccagcgggctacctgaaccaag

SEQ ID NO: 34473 - DNA, 551 bp, Homo sapiens
gatgccaaagaccattaggacctaaataaggttttcttattaagtaagtaaaaaattggaaataaagaaacattggagggaaatctgaagttttcgtgttggggaaggactgcttcatttctgtgcttctctggaccctttcctctgagatgggggaggtgaacctgagcctcacgtttgtttggattgtgaagccccaggggcttctgaacagactgttcttgattctaaggcaggactgctgagagtgcaaagttcagccttaaaaataacatctctatctctcaactgggcaaagggccttgcactttggaatgagacaaaaggtaaccatgggattttgaacttgagcaaagagagggggattgtgggttctgggaagctgcttttttggggctttttttttttaaaggagaaaaattgacagtttataaattggccaacttgctagcagataatcagttattattgtcacttgtagatagtgtctggcaaaatagagagctggtaagaactaatgattgctagggactctggaaccaacctggtgt

SEQ ID NO: 34474 - DNA, 549 bp, Homo sapiens
gctatcagctgcttcatttttgcacagtcagggaaattttatcctctggtaagggatttgagaacagttggctgtggttgcctaaaagactccacaaggacaaatgtccagagcacagtcacccccattacccagaggccaaggtctctttgtttatacctcttgtagcttttcctgcattcctgtcctgtctgtcccaatcttataccctgttctgagtctagagagagtcacagtcattggaagtgactcctataagaagccaatatgtggtgtaacttcttccttcattcattaatttgttagtttgttcattcattttaggagaattttctattgttaagaaacacttgttacataacatcaatgttttcctaactatgagtcataaagaggatactagctgcctttgttttgttcctacaaagacacatgaaaatagggtttctaaaaaattaagtactttgacaaatggcattttttgcccccttaccccaatcaagtggttggaacccatttactgtggaaatttttgacactaaaggtgaa

SEQ ID NO: 34475 - DNA, 1122 bp, Homo sapiens
ttgagaattagagaagaaaagaatgaaggaggttgggatttgatgaagaacatatttgtgacagtgaaactcagtcgtgggatttgctgtttatattgttttctttccttctcaaatcaacatgagttgtacagaccataataaaagcttcatcttgagcctgttattgcatcaccatttggctgatgtttcactgctccatcactgtgggaggttaacactcactgaggggtggcagtaccctctgcatttctctgggaaactccaatgattcatccaaaagtgtgagaagccaagcagcttttatcacccaggagacagctgtaacctgacctcaattcatgccaaagaagcctgaggaaagtgccctggaagtgaacagcctgctcatgactcaaggaactcaaaagtcagagttctgaccagtattgttggggtgggtaaaagaacttcactccctcagatctgaaagtgtccttgccagaggagagggagaccttatttcaagtgtgtttgaataaacatgacatacataaacttgattttccaggttttggagaaagcatacatttgtcctctgcatcatgaaataatgtccttggtggctcctttcagggcctgtgctgcactctccttagtgactattagcattggagttggacaatttaagggcaggagtggagacctgctacttataaaggatgactacacttatttagggatactgctcacgctgactctcagagcaattcttttgttccaacagctgttcccagggtagggtaatattggaacagaggcttatgctgcagtatccattgagtgggactgaggccccttcagtagctgaaaatccccacttcagtgctactgcttcagctactgcagctcttactgtcttcaaaaacaatggtaaggattcctttaacctcagaggaggaattagctttttgcagagactacaaagaatccataggatacaaacatttctatagtccaggaaggagtcccacatataaaaacaaaactgtaatatattttataagtgatttgcctaaatatgtgaggctgtattcactcagtttctcaagaagcatttcttgagaagctactgtgtgccag

SEQ ID NO: 34476 - DNA, 1720 bp, Homo sapiens
atgcataagtgagcttgtaaatggtcagaaaatttggggaagaatatagaagaaatcattatcatatctaactggagagtgggatagggagtctaagggaatacagaccatgaggaggaatggtaactcttttataatgttttataatggaaaattacaagcatacacaagatggaaagattgatatattgacctttctcccatttacttatcacttaagttcaacagtaactcatattacttgattatgctatccttttgttctgtttgaaaaaacatttaccacttacatgtcttgcttttatacctaaaaaaacccgacataatgaaagtaacatttccccatgcccttgcaaccacagtttgctagcttaacctttagtgcacgcaagaaagcttcggggatgaggggtctggagagtgttagccactttgctcttgaactcatgtcacctctgtagccagagggacagcgaaccttatccagctacaatcaacgatactttatttaaagagtaacttcaaaggaagattgcccactctgtaggggagagtttaatatgcttaccactcacacccacaccccctagtccatgtttttataaagggacaacttgatttatcctgcaggaatgttttatctctgtattaaggtttactccatttcccagcagagcccaaagctaagaaaacagtgccttcctccgcttcaaaccgatgagacttgggcagctgcagttgttgccaaatgttacccttggtcacagaggcatgacggatgcctcatgctagaagttcaggggagtttggaaaaatatggaaattcccaggcactatttgggggcacagtgccaaagtctgaggactgaaaatgagaatacctgcctcccagatgcattcattgatttactcacccatcattcattccaatatcgtacccttggccaggctttgtgctagagtcaggattaccaagttgagcagctcacggcccctgaccttctggagcttatgaaatctgtaatgaagcttagtagtttgctttgcttttcttcctctgccagaattgttctttcctatcttgtccacctagtcttactcatccttcagaatttagctcatgaggcaccatctcctatgaaagacatttacaatttactgtttcctctgcttaagaacacctcttctgtcttgtccacctgtgattactcaccctgcaaagccagtcttcatccctatagccctgcctgacccctcagatccaagttagttactgtgcttagcagattgcattacttactctgacatgcttgcctccctttaaagcccagcctttggttcaccatttcccatgcagcatgtggcacatatttatatttgttgagttaatgtgtaaagtagtgtaacagcataatttctctcgattttgtgccacttagactctcgcaagtgcctccaaagataatctctttggccattagcccttccacagctgctcctccttctttctgtattctacaaaagcatggatcattttatttcaggctctaaataacaagagcagatgaatgtctcagtcccagcgctaagcagctaaaatttattgcttgtccttttgaatagatattggtattaatttttaaacccttggttgatcccttccacttcaaatattttaagtataagaagaattagaacttacaactatgaagatgatatc

SEQ ID NO: 34477 - DNA, 2703 bp, Homo sapiens
tttaaatatttctacacttaaattaaaagaatgaaatatacgctaacaaaggcaaatacaaaatactcttcccagaacttacttctgaaacctagctgtttttacacagcagttttaattaacatttttcaaaattgtagaataagtacatattttcaaaaataaaaccaccgaatactccatacacacacacaaagttctcagaacgagagcaaaacatgcatatatcctcactacaaaaagaaaaatactaatactggagcattttgctgtgtctccttacctcgagtgcagtagattgcagtagggccagccgatttatttccctgcagcttagttatcataaaacggaaggggcgtctcgtttgctcatttttgtttttttttctaaaccaagtagcgtgcatctatccttctccattagctggattaacaacctggaaaaagtgccgcccgcaaagtgagcgcctggagcaagggacagtccccgagtggccgcccctccctttcggtgacgctccacttcctgtcggcctaaaaggcattcccaggaagctcggttttgtagtttccagcccacctccgaaagccaatcctttcctccatttcttctccaaggtaacaacttttaaacattcacgtgacggaccaccttccctcagccaaacaacttccctgaaaggcgcccgaaggagccttcccatccaccgcgggtgcccaggaaaggcctgtggggctctcctccccgcgctccacacgccctcgcatcccaccgaggggccagcttctgcctgcacgttgctgaaactggcctggaggttctgacaagaattagagcggcggccgttgccccggggatgacctggaagcgaaagagaccggcacgaattctagagtttcggggtttccgcgggttgagattgtacgggaaacaatgcattaaccaaacctaaaaatcaaacaaacacgtctggtagaacctaccattaaaaagcttctttcctatactacgtttaacagcctttattttgaaagacattgattgatgccaggcatggtggcgcacgcctgaggtctcagctactccggaggctgaggaggatcacttgcgtccgggagttccaggctgtagtgagcctcattgtgctccagcctaggtgacagggcgagaccttgtctcttaaaaaaataaagaaagaaaaacattgatcgcctcctgcgtggcagtccagaagggtcaagcgctgttttcggggtggcgtggaatggattcctaagatttgggcgcccatagagttaacgcagcaaaacgatcacttgcgtttcctgcggactggcggcaatagaacacgtggctgcctagactcttaatcactgatatctaccacaccaggatttaatgccagttgggaggaaatggcgaaagggcaggcgctggagcccatgcatccgggaacactggtggtaggcggtcgggtgggcgtgagcgggctctccatctcccagcccagtctgcaggtcgccacctcaggattttcttcctgagtccgggtggcaggattccatcccaggtcagcccctcacaccccctggtagttgccacctcctggcgtccctccaacagctccagcacctttctcatcccgcccccgccgcaagccacgccctccgccgcgcaggccccgcccgcgaccggcctccctcctttcctgtcccaggacgcgttgcgcggcccgggccggaagtaagcgaattcccgggtgtgtgtctgtgtctgtctgtgtctcgcagcggcgcgcggccccggacaagcgctggggattcccgtttgaggcgtcactactgtcactgccatcaccccacggagccacttctagaggggagtagacccggcccttcgccgggcagagaagatgttgcccctgtccatcaaagacgatgaatacaaaccacccaagttcaatttgttcggcaagatctcgggctggtttaggtgcggggtgctgtgtttgcggggagggggtgtccggcagaaagggagaaggcccagacctcaggatggcccgaggtccagtgagggagagtcaaaaactccccgtcaacccctagctgtgaagaaaggagcatgtgaactgggagggtcttgaagagggtacccagcctcggggtcccggcacctccttaactctcccggctcttttccacgtgtatcattcccaggtctatactgtccgacaagacttcccggaacctgtttttcttcctgtgcctgaacctctctttcgcttttgtggaactactctacggcatctggagcaactggtaaccaaaggggaaaatggtttgggcggaagctgggtgtgagggagacgaagcactgtttgcttaatgccacgtagctcctcactaggaggttcaggtcctacctttgttacctacctctgctgctgagttgctttctcatacccacaccaatctggtagggctacagttcttgagtaagatctgggcctatcctgtgcaacctctcttgtcacgctcccctccagttccatcagacaagactgacaagcccctccttattttagcagatgggcagaatctttcatttctaattgtaggccttaggtttacccactttgttggaattgggagaaacttgtttgctgcctctctcgggggggagtggcatttggatttcac

SEQ ID NO: 34478 - DNA, 2124 bp, Homo sapiens
gatagtctatttaagataagatctctctggataggatacaaaaaggcaatcgccattccctatggacacacttcaaagggggaagctttcagcttggtttttgaatatatataaccaactcattaaggctgtgtcagctcctcattagcactcaactcagaaagggtttcttgactacctcatgaaataaggggttttgataactatcccccaggagtataaaatagctttcctatttactggagaaagccacaaaattagacttgtaaaataggacaaagcaccctttcattttccaagtcacttggttggtgtaaaatttccattcttctgctcctcagatcattaatgaacaagggatgcgtttcaaagggtttaaacaagcagacctgaaaattctgttcagcttagtgtatgaaaatcagatgttagatagctttcttcccaggaggctggggaacgctcagcacctaccaaggcttccttccctacagttaggactgaggtgtaggcttccagatacactcgactgcagcgtctaacaacttccaggcccttgactgtgatgtccttggcatctcccaggcccaacccgatgagataaagcatttcaaacttgaggagaagagagactgcaagacgaagtggacagaaaaaccgtcagtaacaccgaggacatctaaaatctagtgatgaacacgatgacaaccaaagtagcacaagagaagaggcaagtcacaaggaggggtttgggaaccttatgtcacgcttaagaactgggataagaggttttaaacaaccctaccagttttgcctcttgttacacaaacctaggagcagccaattacccgctgagagaatcgtaggtagttctctggcctttacaaattcttaactaccacctttccgcagaagcaactgcaaaagcgccggctccgtgcagagaaaaggcccacgccgccggcctcacctacggtgccgcaaaatgctggtgcctttactgcactttacgactagcgggagggggccgggctagcgggctactgggctgcggagaccagagcccggctccactgaagaaacccgccggctgctggggcagggcggcgaaaggtcagtcggccgagaggagtccgtggagccaccgtttcatagcctcagggaaaggatcgggcgtgctcacgagccctctaacccatggcttaaacacccgcttcctaagcctgggtaagtgcagtagctcttcgctcgagaggagccacgtggaagagagtcgggaggggccctgcgccctactcctcctctccagaaacagggagggctgggaaggattttcctgatttgtccccggatttggccgagtgcacagattttaattccagtcttctcatcctcctgtagttcaactaggtgtcttcctggtgaagcgtgagattggcaaacccagcagtgagtgtgcttctgatttcccaacaaggcaatgactccttgggtttgtccccaagaccttatgcctggagtgccccaaggatgtttcagtcaccctcagtgtcaggaatcccagaccttcctgtacctaaagaagtgacctttaatagtgctcagggatttcagacctctcaagtgtttctgccgggggaattcttataaagctgttggttacatgtaattagaaatagggaagatttgttttgactgaaaatgctcttcccaaggtgacctcatccaagttaaaaaagacagctgtcattgcttttcttagcaggcagtgttggttactcagaattttcctgttgcctccccgacaatgcccaactccgcttccttgaaccttggctttttttcattcccaggttccatccacctttttgcacttcctatctataaactcttcgtggctgtgttttatcccctctcattacgttgatctattcctcacaccacatacacaccccaaaaaactcaaaatggatcgtagatgtaaatggaaaacctaaacctataccagaagaaaacataggaggaaatattcgtgaccttatttaggcaaatatttcttaaaccaaaagcgtgatgaaaaaaattgataaattggacttcaacaaagtaaaaatttatgctctt

SEQ ID NO: 34479 - DNA, 601 bp, Homo sapiens
agaaaaaaatgaaagaataacctattttgagaaacaggaacatctgatctatactttctaaagactgtaacaatcttcacaacataatttctctctaaatatgtttagtacatttaatgtgtttttagtatgttagcaaataaatatattctctctattttttcattctctgctaattgtatcccgcttgttgtttagtttatatgcatgaagtaactgaatgctggcaagagcttttagctgggctcagcttttagcaagccaaaaaattttgaaagaagacgggcattctttagcttccaaaatgttgactctggatttagcagccactaagtaataatagactacccactgcctcaaaggtcagaaccacagactgattaggacatcatgattatgtgaagaaagaaacattgggttatctagtgccaagtttgaatgggattgtgttctgtgacctactttccttagatcagtttgctctctatggatagaacatgcagcagtattctctggagactattaacagttattattcaaaatttaaaggttttaaagaagtcatattaattattctagcctacgcagcgatattatcgat

SEQ ID NO: 34480 - DNA, 897 bp, Homo sapiens
tcagttcccacctatgggtgagaacatgctgttctcactcataggtcacatgttctaacacacactaaatttataagagtgatatccctttcctattcagatattgacctgcagaaaaataaatcttttataatttaaaacaaaataaaaaatgctattgaaattactccttaatcagcttaacaggttttactagaaacatcctacctatgcctgactcactgtagagagtataaaccagacaggaagcaatgtgtcttgcagtgaattaaagataagcgaataaaatcatcttttaaaaagaactaactcactgttaaggtcttttctgattatgggctatgttccatgggtttagtagtaatcattactttatttcaattgtagatttacttaggaaataaatagtattttcttattgattgaatgacttaatttattctgatgttcagccaggtttcttatcaaaagtggcagaaactaattggctaactgaagtgaagggaatttctagagaaggcttcagggtcacagaacttagaggagactggggcatgggaggcttgtaaataggcaggaaccaaaaggtcaccagagccaaaaagcatgaagcagctgggagttattgcatccacgctggatggtctgatcagggtgccaccaccactgctgccaccgtcctccagtcctggcatcactcatacctacgaagtgccatgagcaaccatctgactcacctcactcatgtgctgggctgcccaagtcttagttctcactttaagactacacagttaattccccaagaagaaactggctaagtgtcttttacatagcaagaagcagaaacatatgttttcgtcttttaaaaataattttgaattttgttaatggcatagg

SEQ ID NO: 34481 - DNA, 2109 bp, Homo sapiens
agagttgtagtaaagaaaggaggagggagcaataatcctcatgttcatgtggagttttaactgagtggtattaaaaatgcaaccatcgtaatgtgatatggaagggccctcaaatattttctattaagaacaaaaataaatcatctcatatcttagatttgcttcagaataatctgaagtgggatgagtaagtaaagcacagataaaataaggtgggtcatgagatgataattgttaaagctgggtgatggatacatggaggtttgttaaacagtctctaacttaggatttttttttttattttccaaaataataagcttaaaaatattatgcttagaaaggttggagaccactgcttttatactaaactatcaagtaattttgcttaaaaattcttgcactgggtacccaattgatgacaaatatgagagtagtcaagttgttaaagcaaatattaaagtgggttacggaatgctacataagagatacaattcaatattcttactataggggtgcccagatctagtttttacacttaatctaatttttatctcacatcaaatattggaaagaaaaaacatagcatttgtgtacccacaatggattataagatctattgactgagaaaagcctaaaaattaatatgcatttatcacaattacctgttatgccctttttcctttttccctctcttcctgtctctatttttctctaatccagtgctatttaccttaagtttgaagataatgacctatttcataatttaagtggcaaacacaaattagaatacatccttttgggctattactcacaaccacttcgtctgcgacaactgttctacttttctttagccttggcaagctattcagaacaacatttccttcttttcattcttatgcagggtgattgtttggtgctgatacaacattgacttttcccataatttagcttagagtgttttacactggggagttccaatgtgtttaaattgtaaaactttttccgagcatttttgtagcagaactccatgttctaatagccccggcaaagttgtttttaatactttttctctacgaattttcattaaaatttaattccattttaactttgtcaattttccccaaagataaattaagacacacagagagattgtcatttcctgtttgaagtctcattcctgtgtacaatgtcagtcttttttatttaggcctatgccattccatcagggtaaataactttctaactagtcatttaagagcaactcccgggaaactgtgatgcaatcccacatatcagccaggtgagttacgttgggatcaaagattatgtgatcgcatgtatgtgtgtttctttgtcatataagttatactctggcttatcactgcgtgataactttacatcaacttcccacattcttatcttttgaatgatatgtatggtgagctgaccagtgggttttaagatgtagtagcagaagaatccaacagaaaactgtggagattttagctgagataggaatttttaggttggtcatattcgctttggggatgaattgccatgattttgtgctctcaaggtattgtcttctgctttcttcagtaggttttggagatactttcagaaatgtctgcatttcttgtgaaaatactagagctagtgatgtgttcctgtagcatagcgggctttaatttttcctgctcacatacagcctaatagaattttgaaaaatatggtgtgtcccccttgcacattgttaacagctgaaaacttttcttatacgttcaaatagtcacagaggatgtgatttccctggtgttgtaaatattctccttaaaaatataactgttacatcactttttaagtaataactaatgtaatctaaatgttatggcaattcaatacccctactatccatttaaaaacacattatacatattattaagctttctttaatagatatttacatcatttttttccttaaactcatgtttccattccactttgccaaggaattttgttccaatatatgtttatgcttgaacaaattgatgaccctatgtttcacttcaacaaaaatatttatataaataaaaatttgtgtaaatttac

SEQ ID NO: 34482 - DNA, 1511 bp, Homo sapiens
aagaacagcctggctaacatagtgagaccttgtctgtactaaaattttgaaaaattatccatgagtggtggcgcatgcctgtagtctcagctacttggaagaatgaagtgggaggattgtttgttcccaggagatggaggctgcaatgggctatgatcatgccactgcacttcagcctgagcgatacagcaagaccttgtctcaaaaaaaaaaaaaaaattctgcttagaacatattaagttcaagatgtcacattgacatagatagctagagacatttggtgggcactccaagctctttcatatttgacaacaggcagctctgtttaaatataaagtagaaacaatatagcattatgttaacaaaatattctgctgaaatcaacctttatcagcctttccccaaattcttagtaaaatgcagttcccatttggggaattgagtggaataatttgctaatataactacaggaaaataaccaagccagccaagatctcacttttatcagcagtcagtcagtgagcaaaggtttttaataagaagctcccagaaatctcattgcctcagacctcagacaggagcaccacatacctgcaactcttaactttcatagacggcaagttctcccaggtagagaatgaaagttgacattgatattgccaccctggtgccctggcctccaccgctgcttggatcactgctgaggtcactggaccttgcctgcatgacacacaagattgcacaatcccaaacctgctctgacttacaaaatactgcccccttgtccccaccacccccgacttcagtatttgactttttatttcatctgacctcaggtgattcaacccctttaggcaggctcaaacttaagattcactcacctactcctgcctgaccaaacttgcctcctactacccgtgctgaacctgacatcttggagcactttgtgtgagacactgtgctgggaatgctctctacatggactacatggtggtcacacaggtgtagacgcttttagcactcatcaaactagatatgtagatagctcaatttaaaaatacctcagtttttaaaaaatgatgttattctaggtacttttcaagttttctccccctctccagaagcttacaatctgaagaaggcatgatatggaacaatagcaggcaatatttaagtgccaagaaaataaccccaaaacaaaggctatggtaattggattgtaaaggaaaacttcacagagaacatggtactgatttaaacattagaatttagtggactgaagaagcaaaaagagagagaagcaattattttgctacattaaatatggttgtgctctcctttattgcaatatttttttccttggatccatacatgacatgaccctcgttatcctcttgcttctgtaggtgatctctctcactaggcaagggaaatggtatgaggcaaggtgtaagtatgggaattaaaagaaattttaggtgacagtgagtagaccagcctggatttgtttt

SEQ ID NO: 34483 - DNA, 570 bp, Homo sapiens
tgtcaaagcatttgtagctagatagggaataagaaggaagatggtttctaaaagtaaggaaaagcggtagtatcacatctctctgtcaattttggatgcagcccatagtcaaggaatatagagaacaggagtaaaggagaagattgataagacataggcaactgtaaagttcatgttcaggatcaagctccacctcagtgatgaacggagagttgggcaaggcacggaaagtgaggcataactgcaggaatgcagggaatgcagaaatccagaggctcctcagcacccaggcctaggcctgaccacacagattctcaggctgctctcagcaagactcagttctaggcctcacccccacattgagcttagtgctcctaatatactgcctgccccctggcaatggagtctggaagaggagtgagccttaactctggggagcaagaaacagcatacccaggggttgcccccaattccaggaaattcaggtctgtagaatcacatggaaatataaactgttaacttcactatcattgaatggaataatttacattacattaaaatataccaatg

SEQ ID NO: 34484 - DNA, 3748 bp, Homo sapiens
ggagtcttagaggaccgttatcttggtttccacattatatgcactgtactgttgttgaagctgtgggtatgtattgggtgcgtcgctgtcgatgaatgctttaaaacagctgtgaattaactgtcacttcttttttttttttttttggcaaactcacaaaatcccagaagtcaggggtctgttgtttgttcattctgcctccttctgagtcattcaggtacagggtgtgtctgccaattgaaactgcacagcggaggaagtttttgagttcacatctgccgggatgggaacgcagtgcgaccagggactgggtggaaacttttacaacagtaatgcaagggcagaagcgtcctgtcctgagcttgtcacgcaggcagatctgaccaagtccgcctctcagcctcacgttcttaagtagcatctaagcaaaagaaaagggtgggcaaagtgctagtaatgagatttgaggcctctgagtcgactcccaagcagaatgtgagagaagggtgccggctcctgctgggcagctgcagttgctccgcagctcctggccgagaatctccccctttggaaattcctgagctgcccaggcgttttgaatctctcaggactcagcagcagcccaccccctcaacgacctctccattggccagaatctgggacacacagcctgactttgtgctcagctgagggaaacccctcgcccaacaccaaaaccggcgctggttcatttctctgtgcactctgggaaagccactgcccctcagaccgcagttgcgagtagcacgaggatctggggtggcggggggagtacaggaacctcccggttcattctccctcccgggctgcttgtctcctccgtacctctcgcagccccttcccagcctctcctccccagagcgccgccgacactcgccgggccgcggctcaggttttctgctgctcgcgcgaaagtggctcggggagctcctggccacaagctcagcacaccgatcctcctagggctgcggggggtgtgggaccagggcggtgcgctacgagactccgggccgtcctctgcctcctcagacttttcgagagaaaagttttcaaagtctctccaccttttttttttttcaggggctcgggagaatcctctccacagccagggatcagcgtctatctgggcgagggcagtgatttatacagtagaatccaggggttaccgggctccgccccttctctctctctctttttttctttcatttgttgtttggggaggaggggttcttttttttttttttttttttttttttgcttctgccccagatctttcctggacagtgcgtctcagcagttcagatccgggggcccccagctgacagagggcgtggggggttaaggcattaacccctcccagcctcttcctgaagaaaccacccagccttggcgcggcgctgggtgacttcgcgtagcaggcagggaactggccgcggcgagcgggactggccattggagtgctccgctgcggagggaggggaccccgactcgagtaagtttgcgagagcactacgcagtcagtcgggggcagcagcaagatgcgaagcgagccgtacagatcccgggctctccgaacgcaacttcgccctgcttgagcgaggtagggggcggcgaatggcgggggtcgcgggcgcggggagcccggttgtggtagggcttaggtgtcagaaacgaatttttaagtcgaacgaggcaaacaaaaacttagaaaacatgcatctccgggcgctgaaaatttgcatctctgggctactaaggagcccatctcgatcagattgttcttgggcacttgtgatttatggagttcagaaaaaaggttaattcccaactgtggaacctacgggtgtaggggcagtgaaaattgcagttggtcggaggaataggagggaaggcgttaaattttggaaatcctatagacaaagaatatggtgggtggtgtggagcgtgggtaatggcttaaattagtactgcccaggagcagggtataaaattagttgggggaaaatgcggagcttcttggcttgagcagcctctgctgttcgcggagttgctgggattgttctcatctctattacctcattttattgcattgctgcattaccttgaaatatttaagcaacttagaagtagacttctgctgaccagtgccgtcttagaaagtttctttgtaactttctagtcctaggagaggagtcaacgtgttgggggactgcagtaaataaaactgcccacgcaaatttagcaatgcaccagggagcagtttaatgtgagtttctgaagagtagttttgcaatcgaaattagaaatgtggtagcatgtattatggctgtcatgagtagtttgatttctctcttttgtgtatgttttggctaaactaaacaaagcaaaaaatatttatgcaatcaactaatgtacgaaacttctgggatttgctgcaatctgttatgaatggttttaactgaatacctttaaatttacttgccctggcttggggtggggggtggggtgggggggcgcggggggaggcggggagaataagaagaagaaagaaaaggcagtcgcttcacggaggcgctaagctttcctgtttacagcaaggcggggcgggcctggctgcccacacctcactgcgccctcggaccctaagcacacctgctcctagagagttattaatagagcccccaaatggcttacgctttcaaatgattttcctgcaaatctgatttcttgcatggcacatggcaattaggaggtggtgctagtatctttgaactggggggctgggggtgggcatgggggacagaggtgtgtgtcttcgccctcagactggcagttgagtcttttccgaggagagacgtgggctggtattgagcgtgcagctaagctggtgactgcttcagagaatctcatggctggaaatccgggggtgagggggtgtggggtggtgagagggcaggagtggagttaaaatggggtgtagttctctaggtttcccattcctcccactccttgttttccttttcatcatctttttttttttgtcaacccacagccaacatcgtaattcccatttccctttgagtgaatgtggccatagagtttctccctctctttttcttccccctcttccttttttgaaaaaagaaaaaaaaggaagaaaaaagataatttgatttttaaaaaaaatctctctccctgagctctccccaagtttctttaaaacaaatcaacaacaacacaattggagcagtgccttagctagaatgaattatgccagtatgctgtggctctttccctgactctctcctctgacttgtttaaggctgcggtttccgaggccctctccagccaaggaaaagctacacaaaaagcctggatcactcatcgaaccacccctgaagccagtgaaggctctctcgcctcgccctctagcgttcgtctggagtagcgccaccccggcttcctggggacacagggttggcaccatggggcccaccagcgtcccgctggtcaaggcccaccgcagctcggtctctgactacgtcaactatgatatcatcgtccggcattacaactacacgggaaagctgaatatcagcgcggacaaggagaacagcattaaactgacctcggtggtgttcattctcatctgctgctttatcatcctggagaacatctttgtcttgctgaccatttggaaaaccaagaa

SEQ ID NO: 34485 - DNA, 3757 bp, Homo sapiens
ctcctttggataaaaatggtgaggctaaaaccaaacaatacaaaaacaaaaaaaagctgaggctaggccaggcatggtggctcatgcctgaaatcccagcactctgggaggccaagatgggcagatggcttgagctcaggaattggagaccagcctgggcagcatggcaaaactccatcactacaaaaaacacaaaaatgagctgggagtggtggtgtgaacttgtagtcccagctacttgtggggactgaggcaggaggatagcttgaatccgggaggtcgaggttgcagtgaacctagattgtaccactgcactccaacctgggtggcaaagtgaaactctgtctgaaaaaaaaaaaaaaaattactgaggctctcaggctcttcctcttctgcttgcctagagtcctggggaagggctgaggtctatgcaacctcatgttggtggggaggaggtggtgtcctcagccacagttccctgcttgccttggctctcctccagccaattatctccttctcatttggtactgcttgccctggggtgattgcttgagtgggtgtgacctgtggttggtctcactgggtctggttaaagtcctgttgtgtgctctggctgacctgccctcatttcagtttcccctggtgctagagatccctttgaagtttggttggcctttcatccagccctggctttacctgcctctgataagcagagaggcttgctctttctgagtcctctctacctcgctctgactgaccatgtctgacctacctaggggtgggcttggtccctaggtttgtatgggagcatgccacacacagagccccctcttttgagttcatgaggagtctttttaatagtggcccccactctgcctttggagttaactttgcttcccttgtgcccctttccctacctgggccaaactcagaagagctgggggaggggagattaggacaaccttcaccagttcatttccctctctctctgctttccacagttctccacactaacaaagggctagtctgtctgtctttctttctttctttctttctttctttctttctttctttctttctttctttctttctttctttttctttctttctttctttctttctattctatcttcttcctgactcttcctagcttaatcttaatgacaagcaggttaccttctttttatttttgtttttaaaccacattgatctgaaatctccatgcttggttgttaaaatactaatgcctcacaagggagttcagcaaatcccttttcaagaggcttgtataaacctactttctgaaagacagaagcagaatgttactcattctcttgttcttcttctataataaattcagactctccatctgggcaagtcattggctagggcagactaatgtgaaggtttctactcaaggaggcaaaaaaaatgcattttaatattcaaaattttacttgttacagaagcatggctggtgccttaaggaactcattgtttattagctttatggttctctgactatccaggtgactggactgcacccaggtgttggcggccctggaacttgtctgtctgtctgttgatttggaattgacagtggttgcagacctttaagtcaaacctttcctcttgatcccaatgtgcccttcgctttctctaaaaggttctcccttcctcttatttttccttatcctcttctccatctttgctgtcagatctctctctctctttctttatcctgcacttgcagtttgctcccacactggacacacatacaggcatacgcatacacacgaaaacatacatcatcacctcctctttgttcgtatatgtacatttacagtcccctgtggctttagctctttttccaggattttctctttcatccatttattatatatgtgaatattgattctttactatgatgataatcattgctgtaatttattgaacacctgttatatactagtgatgagaaaggtccttttatattgcctctttcatttaatccttagaatcaccattgtgtgtagcaagaaaccgaggctcaaggaagtttttaaaaactgtgttcaaggatacagaactagtaattggcagaacagggacttgaatctaggtttcattggccctaaagaccattccacaaaagaaaatcattatgaacagaaatgtaggtttttgagtaaagattttatgtaaattgaattatcctataataaccttgaacatgaaattcaaaacttagtttatgatgactggtctaaaagctatcactttgaagggaagaatggggaactccttttcagagatgattaatgcttgatgcaattctattagaagtgctgactaatggtctgatgactacttattttgatcttggtgttggtaaagagaactttacatgccaggaaatggaaaaaaaaatacagattttaaccacttaaaattgctaacagtgaaggtctccatattattttggttccagcttcttttttttccccctaggctaatttcaccacttcctcctccattcttgagttttaaaaatgtcttttgagagacagagtcttgctgtgttggctaggcaggtctcaaactcctggctccagtgatcctccagcatcagcctcccaaagcactgggattacaggcatgagctatgcctggcctctgttttgttcttgcaggctaaattattttcccctgttctgtttagattattcttaatttaaaatatcatatttaattttccattttaaagcatctgctaccatctatccttattttctcccttttcttgttcatattttttctctgtctctggctttgttttgtgcattcttgctcatagtgctctgccccattaggttaccgaaaataaaatgtactggaattctaatctctaaaatcctggccatcacaactaggattctttggagtttgctttcaacttctgtgcaaggatggacaattcattcatcagtcacagttgtgccattgtggcatttggaggtggtgtacagagccctgctgttttttttttattctctgaggttttgctaaatgataatgggtgggtcaaggaaaaacctgattaagcactcactaaagaaaaaaaaatgtgagtgactgagtgtgtgggcatgaacatgtatgtgtgttttcctgtgtgtgtatggtggggggtatcttcgagaatgtagagagatgaattctccctaaagaatgtataggtatttgatatgaagtactcctcagcatcctctggaatcaaagtgaactttctctcagattaaaatgatgattcagagtggttatggggctggcattttaagaattagagaggagaaaggaataaaagaaggagtgtcttcaaagaattatataaactaaactaaagcttatttaatctctttcatctcacactgacatatccttcttccttgtgatttccttgattggtttgtctctaagggaaaatgaagaggattcttttagagcttcctatctcataataaagaaagatttcacaggttcctgtttcagaggatggggatacatccttttatcttaaaagagaacaatgttagttcctagagtttctatcattttgaaatagagtttttttttttttttttttttttttttttgcccttgtgctgctgtgactttcaggaaacttttcactggtgatatcagaggcactttgaagaaatgatccttgctaatccatttgattagtgtgcaatac

SEQ ID NO: 34486 - DNA, 627 bp, Homo sapiens
ctgtatgcttttatgacataagacagaatattgactatctttgctctatctgtaaatcaacagacctcatctataaattcagtgaaatctcctctagtggggaaggagatcataaaaacaacagagccttaaagggcaaacaaaatattgcagagattgaatgtgcatgtatttataggaatatatgcacagatatgaatgaaagaaatgaccatccattttgagcctagaaaagggagatgagcccctcccttccttaccatacaccctgccccctctctccagatgcgctcttgctggatgggtcattccaggatttcctgattataatgaggaagcacagctgatcacgccagtaagttcagattgagatctcatcaccttttgaccttcagccccaccctttgtttaccagtctgaaagctggcacacatgactgtaaatggaagtaaaaagaaagaaggcaaaaaactgaagtgacatgtgccaagtggctgtcagctcttcagagccacaccttgtttctctcttcctgtgtaatgatgagaaccagagccttgagccatcatagtttaggatggagacagatctgcaatgcataaaacagagcctacccaagactactat

SEQ ID NO: 34487 - DNA, 426 bp, Homo sapiens
ccacactgtcttctagtggcagaagtctaaatctttagggacccactctctgttttctctcatgagaacagggttcctctctttgcacacaatgcttttcagcattggaagtgttcaaacccttgttctcttggccagtacatctgtgtttgagaggatagtaagaagctcattcatgtggcctctgtcacctctctgagtcatatgggaaagcaaatctaggttcacagatttggcaactgataggcttagtttatttccagagcagtttctcagtatgagtcatatctgggagcatttgataggacaccttactctgagctctgatgggcaaattttgtttttgggtgagcctgaaaggtgaagctaatgggtgagctgcaatcatagcctccctgattctatctctgcctctatctctccttc

SEQ ID NO: 34488 - DNA, 1363 bp, Homo sapiens
atagcgctcgccgccgtgcgccccgccccgccgtgcgccccgccccgccgtgcgccccgccccgccgtgcgccccgccccgccgtgcgccccgccccgccgtgcgccccgccccgccgtgcgccccgccccgccgtgcgccccgccccgccgtgcgccccgccccgccgtgcgccccgccccgccctgtgacggtcccagcccgcacatgcgcagtcgtgagtcctcttgtccttgagcgtcaaccttctttccctgaagtggctggggttcctgtttccttctttgattgacaacttgtgttaaccctcgcacatctctgggccaatttttgcttgtaagtctttccggagacccctggaatttaaatcattagcaccgcgcccttccccgaagagtcttcgaagggttgccgcttttcggtggcgcagttctcgcgagaaggtgactttctttctcggtatttcctggtttccagaatccttagcgcgaggcggaaaaaatatttctcccagcttgtgttgatgccgcgattttgactgagacttcttcccacgatttctgtttttgcttctccaaggaaaatggcagctcccgagcagccgcttgcgatatcaaggggatgcacgagctcctcctcgctttccccgcctcggggcgaccgaacccttctggtcaggcacctgccggctgagcttactgctgaggagaaagaggacttgctgaagtacttcggggctcagtctgtgcgggtcctgtcagataaggggcgactggtaagggcgcgcccctccggagtctcccgggaaggcatttgggaagtgaccggggagggggagcgctgacaagagtaaaatggaaacgagtggggaagatggacttgtgtgatgagagctcccccatcctacctcttttttatcaaaatatctgctctgcgaagtggagttttaatcggctcgagtctggattagtcatagcactgcagaaaagggcaagtgagaacgacaaagcagaagaatggaaattagcttagttatattgagttttcggatccatcctgagagcctcacaacttttttgaatttggggttatttctcctggactcaagagtattcttacaaatgtgcatcaagggattttttaaagtcctacttcatttataagccaatgttaaatcgttcattaaaatagaggagaagctacattggtgacttgcgtaaattaaatgcagaatttcaactagaaaaagaggcttttcataaaaatttcccgatgacatcttttagggaacaattttttagggctgttaagagtacctgtgtaggaatttacacaattactttgttttgctttatatccaaag

SEQ ID NO: 34489 - DNA, 670 bp, Homo sapiens
gggtaaaagagacaagaataaacagcaatattttatttatttttaggagaaggacttgaacatgattatacattgaggcaaaggattagtgtaaatgaaaatagggatacaaatattaaaaacaaactcatgattgagagtctgtatgctttcttaaaaaatatttttttttctgtcctaaaacctgattactagtttaagaagaaattcccagacttttcctaatcaaatgctatttccaagcattgtggcttaaaaactggcttacacccaagacttattttatcttactgaaatgaggaactacccatagtatcgattttggactttgcatgtttgctttgttttatttaagtgagtcatcgctagcatagcataagaataaacgcatttagtgacattttatttctagttaacattttctgtatttccttgttcgcagattacaaccacctttcaatggcagtttctgagaattctctagtgctggtgtctaaacatggttattaacattttatctgctatttttacctttttgaggccagttcaggttaccataaggttttgtattgttaaagtatcacgtctgtgtaccatcccaggcatctttatggttaacaaatgacttacaggaagtgtacctgaatatcttatgtggacagttctgtgg

SEQ ID NO: 34490 - DNA, 2300 bp, Homo sapiens
aaacactaatcaatcactccattcacttatcttttctatttccttgtattctgtcaaacaactgtctcttggtttaaatacttttctgctggtcttcgctctctctctctcctcttctggtttattttcatccagatgtggattttccccaaagtttccatcttatccttttctcctcctgtgtatgcgccactgaagtcaagattgccacattcaaactccccacacattcacacacccactcccaatatacagtatctcgcccaatgtttatcactccggatacattcctagaatccaaagatctggagcagggagaaaaagaaaaggcgcctaccagatgcctggaacagtctactaggcactacaagtacattagctctttcaatgctcacaacagcccagccagatgttatctcaatcttacggatgaataaatttaagacttctggctggacactagaggctggcgaagtacgtgacctttgatcagaatctcctggaggagtggggtccctgaccattgtaccttccagagaaccttaaaactgagatcccaggagacccctctcggatactctgcagaagtcagagtgacgatattagcaagcacaccgcagccatgcgaacccttcctggctcagctcccgacaaaagaaatcaagcccccagtcaaaatacaacaacaacggattaggcctacaaccctctcccccggcccccaaattctcaggagaaatcccctaagagtcaggtacggaggtcactgcagcgacttcagcgtgcagagaacgcggggacctaggaagaggacgctccagcccaactgagcgtctctgattggccgccagctcagcttggaacgctggggtgcgtggcgtcatatccgccgggcccgccatcttgttcccaggggcagttggcggaagagatcgagctccctggctgccggctcgccttctgcgtggagttctcgcggtctgggtttcgctgtctgctcttggcccggggtcattttgtcggcgtcgggtgccctctcttgcccagctggggcacagcgaggcggccccttctcccgacgacgttcgatggagtagggtcccagaccgttgtcccgaagagcgagatcgagcttggccccctcccccccctccttccctccctccttccttccgccgcaacatggctaacaacagccccgcgctgacaggcaactcgcagccgcagcaccaggcggctgcagctgcggctcagcaacagcagcagtgcggcggcggcggcgctaccaagccggcggtctccggcaagcagggcaatgtgctcccgctctggggcaacgagaagaccatgaacctcaaccccatgatcctgaccaacatcctgtcgtcgccttacttcaaagtacagctctacgagctcaagacctaccacgaggtggtggacgagatctactttaaggtacgaagtgtgtaggccttggctttgggggtaagttcggaagagggggtatggaggaaacgggcgaaggcggcccccgaaatctgaagatttgtgggtgggggaaggtggttcggcggaggggtggctgcggcctgtagtgtgtctgggaggggtcggactggggccgccctctcgtttccattttagatttttagggccgggagagcccgccactattgatctctctcctcccccaacctcctgcccacccctggggggagttgggcaagagggatgggggagaggaggaaagagtaacagaagcctttccagtttacagctttaaaattattccttttgacgtggatctgctgagcgccaacttgttggtgcttctcccgctcacccctggccagggcgtgtaatgacttcagtattggcctcgtgttgttggtactcactatccgatccaggcagggaaatggtcagtgcgtgtgtgtcgggtggggtggggggatgagggtggagaggtgccatttcaagaggtgtacagaaggcctggaaattttcccagcaggaagtcaggagtaagaggtctcagccacctgtgcattgggctaatttagaattatctgggccctgggcttctgcggcagggtcggtgctggcttggctgtgctggggagctcacctggcgcctcctcactgcactcttgtctcagttcttgtttcgttagcaggattgactcagtcttgcagcgaggctcggagcagcccagggtcgcaggtagaggtatgcactattaatcatgctcaatcgccataaatgcatttccctggttaaatgaacgactaattag

SEQ ID NO: 34491 - DNA, 1560 bp, Homo sapiens
cacagttcttggcacactggagggaacctcacagttctacgcaattactgtgtccttgaaaaaatgaatgaaataatcatttggggacagtacattttccattgggtagttgggctggctactgagtgaagtctattatgaatcgccttgcgaagtgaagggttcttctgtaatggggaggatcctccagtcttcgtgtatgtgtgaactcggaatttcatagacggccttggctcacgatcggtttggcacttcgcgttcctaggccacaggacgtcgaacctcgggcgacagcagcctcccgctagggggctcccgacttcccacggaggttccacctgtactgcgcagcctccgtccgggagtgggcggaaattcccttgctgacgcgcgtgacgtcaccggagggcgcggtctgctagagggggtggggcattcccctgcagcaaggggcggggccaccccaacgccgcttctgcggccaaagtaggttgggagtggaaggtggtggctgctgctccgcagtgtcgggaagatggcgccgccggtggcagagagggggctaaagagcgtcgtgtggcagagtgagtgcggtggggtaggggttgagagagggaaggccgggaggctgccgtgccgggcctcgttttgcagccccaacccagcggtctgttgaggagccgccgcgagcacttgttgctttgggacctgtgtgaggacttcttcctgctttcctgccctgccttattccttgccagcaccagggatgggcggggtgcgacgggacgcggccttctcgttggcgtcgggcaccccctcgcctcggccgcgctctggccgcgaagctccgccccgggtgagccgcccggcccggctttccctcccgcggagcccgtgcgtgccctcggccgcgctccccactcttctccgctcccgtccgcgctccaccagttggggatgtctctccatccgagacaattcgggcgctgtttattccgcccccatctccaccccacactggagtttgcaaggactgtttattctgcttattcgtgttagtatcaacccgtgcttttcaaaaaacctcactgtttaacagactcatcttcccctattccgagaggagcctactttctgaaaagttcttgagaagagaccattggaatgaccggtgtccagccgtgacatcttcctgcatagcctgggcaagagccgctccttccgttttccctactctcgggggcccctccctgctgttaggaccggactccttattggttactgatgttctgcggtatcatccacaactttcataaacatcgctccaaacctaggtctggcaggttagagaaagaatgaaaccacccaacaggaataaccatcattgtttggtatctctgagttcaagataattatggcctagtagtggaaagggagtagcatctaattagtatttcttagtccaacttgttgaacaaaaaacaaatgatttagtcagcagaattctgggagttagagttccttgtctaaaattaaaaatccaaatcagtaactgggata

SEQ ID NO: 34492 - DNA, 1152 bp, Homo sapiens
cagcaagcttcataaaggacaagtcccatcagagagagatttaatcttctaacagaaagaatatatagtcctcccttcaatcaataattcctcagggattatgtaagttacaagattttaattcataagtcatgtgtatcttctcatcactccccagcagtggattcactgtgagatttgattttacacttggttgtgcttgtctttccagcttgtctatcataaaaaagtattatttagtctggaacattggtccctgtcttggtacttaatgtacttctgtagggtctagactaggaatttagaagagagaaatttagtaccttgagtgcttaataaaaatggttctttaatgtcaaaatactttcattatacttagtaaaacctttaaaaatccaaaattagactttaattcaataaataaaaatagtaggcctgggatgactcagtgagtaagcttcatgagtgccccttggattaaagggcagctcaaagctgatgactgacatggtggtttaatgacccacacacaatgacacatgaccatttttagcacgagcttcatgcagtttcttttttcaggggtggacactcattagaactcttaaggcaggtgcccattcccacaatggaatgctttctaacaggaagcctcagtctttcagaccctgtcatctgcttctattagaatccattacgtacatataacagtggttgctaaacacctgctgcctccctgactcttgaccttccaaaggtcaatgagccgagctttggccggagtccacagtgagcttagaggtaacatctctcgctacctgaaagaagcttcaaataaatgatactgaatcgacacagattaatagttgcaccaatgggtgtttcaaaaacaaaggatttctcctgaggattttacatgatttacagcttgttagctctggaagatttcgtccttaggaatgggaagaaatcagccctgagaagagggatgaggcttgttcctgggactggggggctcaggtgaaacccaacagagaagacttttgctcatcataaggagagagtagggatggtgggagctgtttgttatacaggataagaatcccccatgtgggcaatgatcaaaagcctacaggaccaccctccgtgggc

SEQ ID NO: 34493 - DNA, 1224 bp, Homo sapiens
acctacagcttatggtgtgtctaactttttacactcaaatcagatttggagccaggcgcaatggctcacgcttgtaatcccagcactttgggaggccaagatgggaagatcctttgagcccaggagtcagagacaagcctggacaacacagggagaccccttctctacaaataaaatttacaaattagccgggcctggtggcgcgcacctgtggtcccatctactcaggtggctgaggcaggagaatcgctggaacccggaaggcggaggttgccgtgagcggagatagcaccaccgcactccagcctgggtgacacagcaagactccgtctcaaaaaaaaaaaaaaaatccattttggaggttgttttgtgtccgtttttgttgttgttgttaactgtgttaattcacagatttgaagttttagaaaattaactacaactaaatccgagctattctgctgacagcatttattcaaattatgcttaaagttttcagagataaccaaagccaacagaattcaacgtgcgctcaggtctcgctttgccctcgctgtgccttctccgtaggccgctctctgggccaagcacctccccggaacgcgcgcaaccgcggcggacaggcagccgccggcgcgggagctgaggtaggagcccggggcacccacaggccgcagcggacgcacgcagctagcacggtccccgccccgggtcgcgcctgcggcctccccagcgtctgcgccgcgagtccgctggacccgccagggcgtaacggcgggtaacccgccccacccgccgcacaacacacccaactgcacggactcacgtccgggatcccctgcctgcctctcgaggaagacacctgcccaggccggccgcagaagaggtcgcacagcttgccgccgcccagggtttcagcgtgcttcctgggcctcgtcatcgaattgttcggctgacggctgcgtgtccctcccccgttgcgggccgctgattggcctcgttgattgggcggggctagtagcgggaccggcctctgcgcgcgggttattttcgccgcggattttcttttacttttcatctgcggaactctttctgcgaaggaaatctcgcctggaactcaaatatatacaacggataggaaacctattttcttactattaatatatttgataagtttgaatgtgtaacattcgccatgaaacgcaagcatgatttttttttttttga

SEQ ID NO: 34494 - DNA, 1039 bp, Homo sapiens
ttcttctacgcaggcgcccctccagcgcaatcccagttctaaatcgagtcgctgcccctttccgcgaccacacccagatccccaaaggcctgctcccatcccgaccattgatgtgagaaaggccaaaaccggccccagcggggctcccagccccgccgctccctctcttcctccgggccaaggcgtgcccagaaagggacgcgagcgcgcccctcagttctcgcacgggctcgaccaaggggcgaggaaggaagaatcggcgcagcggcgagatgggcacgaacctcgcgctcacttgctgctcagtgccagggcgaggggcgtcgctctgcccccagaatccaactggtaatgtgggaaaggtgtggtccaggaccggtgacctcgaaccggggcccagcagttcgcagatcctcaccccgcgatgctggggcctcacccacgaccccagccccctcccagtcggcacccaagcccactaaagacccctctccggggccgcaaacacagtcctcggggccgcccggtcggagccgtgtcaggtggtgacaggaggcgacgggtgaccatggcaacccgaggtgtgcagcggaccgacccagcctccgactcccggagtcacccacctgagggctccagggcaagcccggaggagcggcggaggagaacgcggctgggaggccggcggccagggccccgaagcggccggctccgggctgcggcaggagcacgacggcggcggtctgggtttggcgtcggtcctccctcctaccgcccgcgcgtcaatccatcagttcgtcaatccgtccttctcacgtccgcccctcccggcccagcgactcctcagctcagcctcttgcagactgcggttgtcaagtgccggggagccgagctctacccgcgagcggcagccaatcgccgcgcttccccgaggcgcctcaggaccccgccgcgcggggcggccaggcaggtgcctgagccgaagggcgagtcggcggggcggggcggggcggggaggggcgtggaggggcgggcccaa

SEQ ID NO: 34495 - DNA, 1669 bp, Homo sapiens
ttcttcattttcttcctcaaactagaagttaaaatgtatatatagaaatgtcaaataattgccttgcatttgatattttaataatgacatttttttttccttttcaacagataggccagaaagccaaaggaagcagcaaaaaaaaaaaccacgaaaccttagcattgaaggagcctatgtatctagtccaacttccaactcatgcaaaaatggcttctacaatgttcctaactaataatcctactgcttctacttgtaagagttccaatgaccataagttttatttttaaacaactaaggtggcctattactactgttactgttaaacagttgatactgaatcaaagtctacctttgtagactttgtagtaagcaaaactaatatttcctatgcatttgcttatacagtgctaaaaacgttccttaagtaagcccgtaaccctattttataaaaagaaaactgatgttcaaagttaaataacttgctcagagagaatggaaattttgaaatccaggctgtctgactttcaatgcattcttttcccattacttcacagtaagtacagttttgttaacaattgaactgttggctcatagtgcgcgctaatagatgttagttttgatctctgatgattctgtacgtgtttcagtgtctggcaaatacagaccaaaatcaaggggaaaggggtcacaaaacctactcttccttcatgtccttccccactttctaaaatgatcaatccttagggcgtgaagtccccgaactctgtccgctgaattcactaaggcaagcagacccgatcctgaactctgcctccgctactgagcccgaaggagtgaagaaaagacaggttttggacagagacggtcactcaccgtggggtcttcttcctcatctgccatcccactagcacgccaactcacagcgtcctgccggctggctcccagctggttacactacttccgccgcctcacttccggtgacgcgcggggccgtagctgggcctagccctctgcggcctgcgggaggacggtggtgctttccggcctagcggcggaaatgcgacagtctctaagggaggaggccggagcgcctccctgtaatcccgaaggaattgaaaactaacaaagaaaaggaaatcacgggctaggtcgcgagtatctcgttgtcaccctgaatttgctactgcgtattgaatcacagcttcttgtttggggactgcgaagctatggatcataggagggcaagccagcagtcctttatcagacaaatatgcttttaaatcattttaaagatttgtagttccactgtttctaagcactgtgttaattattggggatactgtgcttcatcacaaatttccaagagatggtgtcccgagactaagcatttaaaattttgtgaaggttttttgattttttttttttttttttttgagacgaagtctcactctgtcgcccaggctgaagtgtgcagtggcgcgatcccggcccactgcaacctctgcctcccgggctcaagtgattctccttcctcagcctcccgagtagctgggattacaggcgtgcgccaccatgcccggccttatttttgtttttttgagacacaacctcactgtcccccgggatggagtgaagtggcgcaatcagggttcactgcagcctagac

SEQ ID NO: 34496 - DNA, 2398 bp, Homo sapiens
gcccggctaattttgtatttgtagtagagacggggtttctccatgttggtcaggctggtctcgaactacgatctcaggtgatccgcctgcctcggcctcctaaagtgcttagattacaggcatgagccaccgcgcccggctaattttgtatgtttagtagagacggggtttctccttgttggtcaggctggtctcgaactccgacctcaggtgatccgcctggctcggcctcccaaagtgctgggattacaggcgtgaaccaccgcgcccggccgcgacttgtttttgttacaaggttcctcatttcatttgcaacgttcagacgcagtctgactagatttccatccggagtaaggaagagcagctcaagggcagtcacggaggccgcaggtgcggcttcttcacccgcggtgctggagttctctcaagtggaagcccaggacgatgaaaacctcataggtaggctgctgcttacacacagcagccgccacggcgcaaaataaactacaaaactacaagcctttaccttttcaaacacactgacgcgggccagccccagccctacgcccgcaggggcacgcagaaaagacttagttaccacggccaagtacgaagccttcgagatagcgttcttcttaccctacgtaaacacgcagtttcccgagctcgacaatcggctagccactcctgatagcgttcggcgctcgcctctcggcccttgctcctgcgtactacggcttcttccagtcacctcggcccggatcgggaagtgtcaagcgggcgctcccccatctccgccgctattaccactgaacccggaccccctacccaggtccagggccagccgccatgacgaacggtgagaactgatgccctgagcggagggtgggagtgaaggacgaagggaaaacgtggcgggcggggccgggactgacgtggccgttctccccgccccctcccagcccggccccccttggcctctcgacgcccctaacttctgtacccctatactcctctacgggttcccccttcccatattcatctaggacccccagtgcctcttatgctcacacctcgagttatctatccctatgctttgctttcccttttctttttcttagttctttctggcccttggagaggtcagtcccagaggtactactgctatttaaacccggggaagagagaggctcctcctcccagctccctgcgttctcatgctttcggaccgtagttttgttgagagggccaataaatgacatagaatatcaagtcccacacttttggggttgctggtgaatgtagaccccacaaaagcttcttcttacggaaaaataccggaaagatttctgattttaaagtcctggcggggtgatcccacgtggagaccctgactagtgttgcaaagggtggatttagacactgcctcttctagatgatgaggcagtttatctgacctaattttccaggcctcttcaaacactttatgaattctgaattccagaggaggacaggaaggagggccttcatgatttttagtgtcaaccttacaggaaaggagaagagaaagccttttaggcattacgatgatttgaggggctccggaaagcatttctcaaaagtactttgtccatagacctggcactgaagactcgaatttaacctccttgtgaattttggcattgtctgcagaaacttatgagagaaaaggggtagcacgtgaaggtatagttcctcagaaaaccttagtgtatgtattaatttgctggaccctttcttagtgacagcttagctgtgagacagttttactggaggaagagaggtagtgtgatctagaactggcagacactggttatatataatattcatttggagcttcctgggaagtcagaggtctcaggatactaggcacagtaagaaaagggaatttacccagaggaagacagaatctgaaccaggaagtaagacagcagtttgacacggtagttgctgaataaattttagtcattcttcccccattttgtggtccaatatcttcttgttttttgcaattaggtgattcattgtgcttccctgtacaagaaataagcttggtttatgtatttaagaaacagagctaagaagttaaagctttctatgttgaagccttagatactttttctttgttttagaaaaatctgttattattctggcagaaattcggtttgttaagagtatcatccataaagtgtaagataatgataggaaaattgtagtcatgtggattcttactcttgcaactttcattaagcttaattttttgccttaacatattcttcaccaacagttgcacatctgacagttttggctacatatctagctctcctttatcatatgagtgatttataacaagaacatg

SEQ ID NO: 34497 - DNA, 1433 bp, Homo sapiens
gtatataactatgtagttatacaaaggtcaaaaggctaagtgccgtggccatcgcctgtggtcccagctactcaggaggctgaggtgggaggatcacttgatctaggagcaatgagccgtgttcgcgctactgcactccagcctgggcgacacagcaagaacgggtctccaaaaaaaaaaaaccacgattctgtaaggtggaaattagtactgccttttcctgggacctatgttcccctccgagccacgcgagggcagcaacgcgcgcactctgaggaacacccccttcctcaggactcgtccgcctgtgctcggtggtttctcccagaatcctccaaggcgcgggagggggcggagagcttaaaagtcgcggggggagcggacttccgctgttttagggagggagagcggcctgggtcctgggtgttgtgtgcggagctgtggcgtcgcgtgtgaggcgcgtgcagggtgagtgtgagtggacgcgtgagtgtgtgagtgtgcgcgcttggagcgtgttaggcgagtgcgtgcgcccacccctgcgcccctcctcccgcttacactttgatcttatttgatcggatcgtgaccccagccccgccgggccgacccgaaatgaaaagctctcctcctgcgaagccccctcggggcgctgtgcagcgaggccccttaggcggcggccacgctgtggtccccgaggtcccggagctggccctgcggggcccggcgctcagaagtgatgaattgatcagatagacgaggccgggcttgtccccggccactgattatcgaggcgattctgatctgggcacggccaccgggctgcgggctgccggtggcgtaggggcgagcacgtgaacggcggcggcgggcggggatgctgagcgcggtggccaagggtaaatgagccgctgcccctccccctggagctggaaggtcgcggaggcctttttggccgctgatatactttcctcccactttcccatttctccttgtttttcttttttcttttgttcctttttttttttttttgagacagggtcttgctctgtcgcccagactggagtgcagaaccgcaatatcggctcactgcaacttcgacctccttggctcaagcgatcctcacatctctgtctcccgaataggtggaactacaggcgcgcgtcaccacgctcggctaatttttgtatcttttggtagagacggggtttcaccatgttttgccaggctggtctcgaactccagcctcaagtgatccgcccgcctcggcttcccaaagtgctgggattacaggcatgagccaccgcgcccggccccttttttagtttttctttctttcttttttttttttgaaacggtctcactctgtttctcaggctggagtgcagtggcgcaatcatagttcactgcagtctcgacctcccaggctc

SEQ ID NO: 34498 - DNA, 423 bp, Homo sapiens
tttctctcttttttagcttagaaaactacttatttaattgttttgagacagggtctcactctgttgcccaggctggagcgcagtggctccatcatggctcactgcaggctcaatctcccgggctccagtgttcctcatgcctcagctaaaagtgttggcattacaagcatgagccatcacacctattgtgcaatattctaaaaggtttgccattcttgtccaatcttttttatgacacagcaggtccctgtgagtgacttgtaattttggaaatcactgaatacatcagtttttaggtactgcaaacccaagcaccaggtttttgaaccatgtttataagaatcagggctatatatcacagcacgaattgacacaaaggaaagggagttgactcccaggcaaggacaaatagcagagttagag

SEQ ID NO: 34499 - DNA, 977 bp, Homo sapiens
ccgaggaagaaagagaagctcagcgacactgaggagcttcacaaaagcatgagctgctgtctgacccgggcctgtgtccattcagtactgaaaccctcaggagaaatgttttactttgataaaacagatcccagtgagaacattgtactcctggaggtggggggatattgaaaggaggaggcaggtgcagaaagaggagttggagcccctgagataaactttatcttcttacagttttgcccagggccaatcctacttaagtcacttttcactccctcaaccaaacacagaggcccatcttccaaacttgactagcatccaacttaaacactttgatgaaacccaagctgggaaaggaggttggtctcagcattttggttaatcatttattaaaaccaccttaacagggatcagtgtgtaaacagctgagccatttttgctaaaacccagagctaggatgtcagattgagcaaatatttgacaagcagagaaaggtcttggtgtagaatgcattttctaacacataacttgtactttgctagacctaagaattggcaccttcccacgttttcagcctctctccccacatttttcctggccaagtcagtcaaaagcaggagtccatgggtccctctgtgctgaattgggcctcctgcttggtaaccaagtaaatgagctgagaagaccccaactgtttctcagccagtagttcccacctgtccagcctaataagacagagacagaagaggtatggagatgtgcagttgagagaactttccagctcaggccaacaagactgcaattaggagattatctgatctacgaacccatgtggtgcctggagaaaaagaaggaatcagttgagaaataagcccttaactgaaagggaggtaaagagacctttaatccttattcactctcctgtgactactcccaaataaaaataattcccggctgggcatggtggctcacaccca

SEQ ID NO: 34500 - DNA, 1619 bp, Homo sapiens
acgaaaaaaaaaaaaaaaaattaacctgcggttccagctacttaggaggctgaggcaggaggatcacttgagcccaggagttcaaggctttagtgagctatgattgcaccattgcactccagcccgggcaatagatcaagactctgtctcaaaaagacaaaacaaaacaaaaaaatcaaatctgtctcgtcattagacctgggatgaatcattcccctacaacataccattgaaacgctgaaaatttagatgtaaaaaagccttccctattcccttctgggaattcctctgtgaccactcacttcttcctacttcttcctccccactccccaaccagggtaggaaaatgtctgtgtgcaccgacaatgtcactgacctccggattcctgagggtgagtcagggttctccaaatctatcacagcctacgtctgccaggcagtcatcatccccccagaggtgacaggctacaaggccggggtttcctcacagcctgtcagccttgctgatcgacttattggtgagtaactccgctgcctcagccttgtttgagagtgtgtgtgtgtgtgtgtgtgtgtgtatgtgtaagagagtgtgaggttaccagtctgggaggtaaaaggccccacatgaggggcccaacctcttgacctgtgttttctattccactctgtgtgcaaagtgctcccagggactctgacaaacccttgtttcaccctttcataagccactcagggatgtgatgagatgaagtgaggttggatgttgacaggtattggaagaattgaagtggttgccagctaatgctactagtgagaactaattaggagctctaatttggcaggggtgacaacagatatgactctggatggaatcacctccccagctgaacttttccacctggagtccttgggaataccggacgtgatcttcttttataggtgaagatgagaggctaggctaatgcaagtgaaacctaggactcctccataatttctgctgcatccctccctctctagccacctactgcttatcaagccagaacatgtctgaggtctagcagatctgcccagtcatgatagctaagggctgggagttcctgatcccagcttcctggatattactggagcagatctgccctagaggcaaggagaaatattggatgatctgcagtggacttcccttccagcctaagcaggctccagtgtatgctagccatgactttcctaaaccagggcatttcccccttgactacatattgttgatccccaccctttccacgtataaaccaaggcctgtgcactccctgtgtgccaggctaaagcccaagtcctgacttccccagcaagggaattgctccatgcggatttctcttggtggctgtccaataacacagctgagtgactcattccctcatgggggctggctttctctgcaggtccaatgatgtgacccagtcctgcagttctgggagatcaaccaccatccgcgtcaggtgcagtccacagaaaactgtccctggaagtttgctgctgccagggtaagccctgcaaagggatgtaacaaaggccaaaatctcccttgaagtcattccatcctgagatccagagattactgaaaa

SEQ ID NO: 34501 - DNA, 2399 bp, Homo sapiens
atcttaagctgaggtagccctgggactaaatatgccatcctcttgtatcaagatggagaagacggccgaggttcagggaaagagcccagtggaagaacccaacctagtgagaggaaaacgggcacctggtgaaggccccggcctctaagctagggatgaggggacaggcctctgcctagcctgagacaggagtaggaaactgaggcattcacacttttatgtggcgatcacagttcctgcagactgtagcagagctggggagcaggaaccagaggtatagtcccacgcccacccactctcccctcccctccctccgcggccccgcctccaaccagccgcttccggtcgcggggagggtcgcctgcgggctccagctgcgcctgcgcaggaagggcgggtcagcgcgccggcgcagtgcggcggtcacaggctgagtgctgcggcgcgatccttgcttccctgagcgttggcccgggaggaaagaagatggtgctggatctggatttgtttcgggtggataaaggaggggacccagccctcatccgagagacgcaggagaagcgcttcaaggacccgggactagtggaccagctggtgaaggcagacagcgagtggcgacgatgtaagtaccgggacgggcgggttacctccttgatgctaaacccaattttctctctcaaatccagccaccgctcctgaggccacagcttccacccttcgtcagaccccctcccagggtgcggtggctccgaggttctccccatccccgaaaacacagcctggtcgccggggtcatcccactttctcctccacccgggcggagcgaggtcccttccacgcgtgctcagtgccgttcgctgccagtgtgcgtacgcacgcgcatcgggagctgtcaagccttcctgccccaggggttgccagaacatgccggggcgggaggttgtggggtctacgcggctttcctaacacgaatctttggtcccccccagtctttttctcatcttcagcaaggccagagtggttttcctttgttttgataggatcaaaggcttctcctgagactgcgtcacttctgcaacacagtagattcattccttcggtatcggaagcatttcggggcgttggaggccgctcttggccaaaataaatgaccctgaagcttttcggaaggccatcccccgacctatgggcatacctttaagaattagaaaagtcttttccgtggtagatcaaacgcgaggggagtgaggaggcgagcaaaagattgtaatgactgaagctgtttaattgtgatttgtggacgttttcctttaaagacattggcagagttgggctagaacctggaactgccggatcttggagtcatatcgggcatctatcatgaagccgaataaaaccatagaaccatctgcccataaatctctgcctgtattaactggagtggtcgctggttgggcggatgctgtcaagtacttgtgatttgatttgtctgatgcaataggtctgcaaccatctgggagctaggtcgatgacagtacactgcaaaggcagccactatccaagagtgtgatggatttctattaggaaaattgattttctcctgtttataaggatcttggatgtcaaaagaatatttgtttaacttgagttttgtgctgattctatgtcttaggccctctattgtagtagtttgtttgattgtgagattccacacttgacctgaagtttcgagttgcaatggaatttaattttgccacattttttgtttaggataaaactagcctgagcactgttctactgaatctgaagtcaggagtatcagatttttgtgtcagtccagcccttagccagtgctaaatgactttgaatgtgttagctagtcttttgggtataatgtccacatctgagggatttgtcccttatctgaaaagtagataggtggtgagttcttcagggacaaggattcaattttattcatacagtatatatgtggatatacatatacacatttatacataaaatcccagtacctagcactgtacctggtccttggtaaggccttgataaaggtttgttagaggcgtgaatattttctgtcttcagggcactttatattctttatgaaaagcagtttatgtagtttatgttattgttttaaaaaacttaatcctaaatgtgaagtcatttcttttctttgttttgttttgttttgtttttgagacggagtctctcattatcacccagattggagtgcagtggcaccatctcggctcactgcaacctccatctcccggtttcaagagattatcatgcctcagcctccaagtagctgggactacaggtgtgcaccaccacacccagctaatttttttttttagttgagatgggagtttcaccat

SEQ ID NO: 34502 - DNA, 831 bp, Homo sapiens
caggagacaaaggggccagtcagaggcaggcctgggcacagcgtggggcggtcccagggcaggtacgcactttggagggcggggctgatgaggggagtgggctctgcctcccgtgcagccgccaccgctgagcatcacagccccagggccctctgaggctccacccgtcacagtctgccttttcctgcctccccagaaatggccaatccacagcacttcctgggcagcagcctggtggcctggcatggcctctcgctgcccatctcccaaccctggtacctcagcctcatgttccgcacgcgccaggccgacggtgtcctgctgcaggccatcaccagggggcgcagcaccatcaccctacaggtgatgcatggaagggcggctggccctggcctggccatagggccctggtagcctctaggcggctggacagaagtggctgggcaggtcctgggcaggggtggggacatatagaggccgctggatccgttgggaaggtcaatgctgccacctgttgggcctgagggaaataaatacgctttcctctctatggcctcagctgggcagcgggatgggtttgatggtccagaaaggggaactgtgagctggagaacagtgattaaggccgtctgctgaccctgttttctttcctcctggtgtcagctacgagagggccacgtgatgctgagcgtggagggcacagggcttcaggcctcctctctccgtctggagccaggccgggccaatgacggtgactggcaccatgcacagctggcactgggagccagcggggggcccggccatgccattctgtccttcgattatgggcag

SEQ ID NO: 34503 - DNA, 2556 bp, Homo sapiens
cttgcggggagggccacccctcctaggctctacgcggcgcagcccagcctagggcagagtgcgggaggatggggagctgggggtgctttcctgtttccttcgtctggtgaaagctttcactctctcctctgtttcaactaaccctctgtctgccttttctgccactttcctttcctgcctctccagatttctcttctttaacttcctgcattaaccctgggccgtggttcctacgcccgaggctcccttcccttccccagccgcactcatgccctgctcctgtcttgtgctttatcctgccccgctccccatcgcctgcccgcagcagcgacgaaacgtccatctgaggagcctgggccttgccgggaggggtactcaccccacctaaggccatctagtgccaactccccccccaccattcccctcactgcactttggacccctggggccaacatctccaagacaaagtttttcagaaaagaggaaaaaaagaatttaaaaaaggatctccactcttcatgacttcagggattcattttttttatacgctggaaattgactcccctttcccttcccaaagaggataggacctcccaggatgcttcccagcctctcctcagtttcccatctgctgtgcctctgggaggagagggactcctggggggcctgcccctcatacgccatcaccaaaaggaaaggacaaagccacacgcagccagggcttcacacccttcaggctgcacccgggcaggcctcagaacggtgaggggccagggcaaagggtgtgcctcgtcctgcccgcactgcctctcccaggaactggaaaagccctgtccggtgagggggcagaaggactcagcgcccctggacccccaaatgctgcatgaacacattttcaggggagcctgtgcccccaggcgggggtcgggcagccccagcccctctccttttcctggactctggccgtgcgcggcagcccaggtgtttgctcagttgctgacccaaaagtgcttcatttttcgtgcccgccccgcgccccgggcaggccagtcatgtgttaagttgcgcttctttgctgtgatgtgggtgggggaggaagagtaaacacagtgctggctcggctgccctgagggtgctcaatcaagcacaggtttcaagtctgggttctggtgtccactcacccaccccaccccccaaaatcagacaaatgctactttgtctaacctgctgtggcctctgagacatgttctatttttaaccccttcttggaattggctctcttcttcaaaggaccaggtcctgttcctctttctccccgactccaccccagctccctgtgaagagagagttaatatatttgttttatttatttgctttttgtgttgggatgggttcgtgtccagtcccgggggtctgatatggccatcacaggctgggtgttcccagcagccctggcttgggggcttgacgcccttccccttgccccaggccatcatctccccacctctcctcccctctcctcagttttgccgactgcttttcatctgagtcaccatttactccaagcatgtattccagacttgtcactgactttccttctggagcaggtggctagaaaaagaggctgtgggcaggaaagaaaggctcctgtttctcatttgtgaggccagcctctggcttttctgccgtggattctcccccgtcttctcccctcagcaattcctgcaaagggttaaaaatttaactggtttttactactgatgacttgatttaaaaaaaatacaaagatgctggatgctaacttggtactaaccatcagattgtacagtttggttgttgctgtaaatagggtagcgttttgttgttgttgttttttcatgccccatactactgaataaactagttctgtgcgggtacagcactgtcactgtccgcttctgtgtggtaccctgtcctcccacagggaggaaggtctggtctctggaaaacagaagagccggcagggcccagaaggccccaccgggaggtcgggagactcagacaccactggctgataagcctgtccctctgcccatgtccatgacactgctcccaaatagctggatcagcacagagcccatttcctggcatttccaaggaagacatggtgggcgggcaggaaggtgtccttttcaccaggacggaaaggacttctacggtgggagaggctgcacggggcaggcagccttccagcccagcccctcagggctgagtcctagacagggatgagttttctggggcagaattcaagaagcagggagggctgcattgagaggctggttggaattgaatggtggtcagtgactcagtgcctcctaactatactgctcagggttgttttttgttttttttttcccattggaaaatgaagcagctactcatactgaagccaagtgtgtgctttgcaacattacttctcagcctaagttttgtttttgtgtatatatatgatatatatttaaaagtatatatgctttttaaatttaatagaggcggggtctcactatgttgatcagg

SEQ ID NO: 34504 - DNA, 1076 bp, Homo sapiens
ggcggggctcctttcgaatctctcaggccccacctactcaagccacacgcgcaccgtgattggtgaatcctcagggggaggggctgaggagctgccggccggaagtcagccggtgggggctgggggagaaccgttcccagaagactgcatcccggtggcggagccgagggttgaggctgcgagtgcgcgtgctcgcgtgcgcggagactctctttcccgtaggcagatgggagcagagcgcggctggccaggagggaagaaacggacccacgagtatggaactcgcgccccgccccgctccctctgctgggccgccgagcacccagtctccagaacggttgtgctgcctaacgtggccgctaaccgacgctctacgggaggaaattcgttttcttgggcgcactcaatatgcaggcgccgcattggccgaggttcctcagttgtgggttttttccaagttaagggagcacctaaacacttatattgtaggtatattgaggttctcttagaagtacatcctccatcgcctcttcaagaacctgaggcagctgaggtgcaaagaaagcaacgggcttttcacgcaggcaggcttaggttcaaatgcaacccaagtttaactgacctcagaacccaagtttcggtttagaggcggctgccttgagtatatttgccctcttttcacctctcttcgcttatctgtgaaaggaggatgttggtcctcgcagttacggtgttacgaggataattatgaaggcgttttctaccgtgtgcccttaggggatttagagggggtgtttgtaagtagccccctctgaactaaaagcagtatttgtaaaatgcttaaaccaacttgttaggagtgttgtctctgttgtttctaaatgttgcccgggccaccagtgaacttgtcagaggcttcaaaccagaacgactccatctggaatagaggctgggtaaaataaggttgagacctgggctgtattcctaggaggttaggcattctaagtcacaggatgagataggaggttggcacaagatacaggtcacaaagaccctggtggtaaaacagcatgcgg

SEQ ID NO: 34505 - DNA, 1167 bp, Homo sapiens
tccttctcttttccaggccacatgctcaccacccaagccccatttcttagacagtttaatagttcagtatatatttctaataaatgtggatgattatgcttttttcttaagacttataatcttactaagattttaaaatcttaaacatgccttgccctcccagatatgagaagctccttggaagctggggaatgtaactttatacttcttggtactccctgtgccttccacaggaatactttgcacactcagtaagcatttgttgaaaatgattacacatcctccccaaaccacaaactcaacctcaaaatagaacatgtctataaatggttgggatgccagctacttggtcactcaagccaccaatcccacatagaaatctaaagaaacagaactcaaaacatgaactgttttgtttatcttcgaattttctcttgcagtcttgaatgggcttccgaattcacgtatgtgatttcccctctggaccgtaagtacctttgatgtcaaaagaatctcttacacaatttttgtaagttagtacaatcagtgcctcacgcaggtcttgctccgtaaataatggttaactctcaaatgctcggcagagcttctcacagcctctgcaggaaagaagggctattcagacatgcaggcttgccaggcatctgagaaaaagtagggctgccagagcttctgaaaccagaggcttaaaaactgacatagcagtgtgtcttatatgatatttcacacatagcaaaacctcacattctcttgagtgaggatagtgtctgaaatgacatcaatgaggtccttcaggaaaaacaggaacatccagagctaccacaagcaccaggcagatcacaagggctaagatcacagtcatctaaacacaggttatctttccaaggaaggtccttgtcataactaagagaaaagaaaaagtccatcagttatggcactggaattcgtggttgtcttcatcaggctgtaagatatcagtcttgagccaatcaggactgcaacttttacttttcaggcaatgctctacacagccgacccagtcaatgcagactggcattacccacattttcctattgctcaactacagaatgaggaggattatcacgtgtcaccggcaactctcagcttcactgaaacaactgaaatggt

SEQ ID NO: 34506 - DNA, 1284 bp, Homo sapiens
agtgcagaagaaactgctaatagtatctgtgaccctgacatgaaagatctgatcaaaacagcaggatagaaagcctattattgttgttaataatcacaaaaagaaaatagccattagaaattgaacagaacataagccttcttccaattatttccacaagcagacatgagactcagatttctaattaaaaatcactgtgcacagagccaaacatttgagtcagcagagaacttacctaattgttaacactgcattcccttggagccatctgtcatacctggctagctttctactctcatcccaaccaaacttcagatgaagactaacctttccccagataaattacacttcatcaaatctgctgatacttcttactgaaatatccaatgcataagtcattttaacatccctctaggggctaaaggtctgactatacattgcatgagagaagactcttcatgaaggtttcgctcactctgctcaaccaggaccaagaaggagatcctacagagttcctactccttgatccaaagctgaatggaagaaacagaactcaagagactattaaataagctagacggctgggggtgctagggaaggtaggatgaagagaggccaagtattggaagaaatgaggcagttaggaagttccggggcattaaaggactgaccttcagacttccgggtgttacaaaggtctggcgattcacaacaacaggccgaggtcttcagcggcagctccctgaagcctctgacaggcacactcagtcctgtcagcttggactcaaccctgccagagccagcaaacaaacacacgcattcttcccagagctgacaccccatacaacacggcctctctacagggcctgtttatttaaggaaccagatgctttaaagttggagtagaagttgggaagttatgtttacagaagtagttagtgacaggagcagagggaggacagaaaataagcaagagttcctggctttattcatcataagtttaaaaagttttaaggaaattgtcaaatggtctgtacacaggaatgagaagtaaggaaattatgtcagccaccaccacaactctggccaaggcatttcatctgttcctttaagacagtttcatgcctaccctcaaaggggtgcttacagcagaaatgttttgaagcaatccaacttagtaaccaacaataaagtcttctaggcctgctcaatttcacgcatgtacaaaggttatacatgtcatgaatactccaagcagctgaaggaaagaatcagttaaaaatg

SEQ ID NO: 34507 - DNA, 945 bp, Homo sapiens
gaactcccgcctctcccacccggaaagtactgacccagagaggacacacctttgcttctgcgcagcccaacttctgcaagcgctcaagagttaattactccttcaccttcctggggcctaacagcgttactgggtcctgattatttatacagacgaaaaacgatgttcaagagattttgacaacttaaaaaaaaaaaaaagaatgcggtggaagtctaagattgcctcccctatgacaaaacacagccccgccggccgcccgggcccgactccgcccgcccgcccgccgcagtttcggggctgcggcccgggggacgcgggcgcggcagggctggggtctcctccgggagtcgcggggcgcacgggccgggaggggcacgcgggcggcacctcgcacccgagcggctcccgggcccggcgcccgctcacctggtgcgtgttgttggccagcttggcgacgaagtcccggacccggccgcactcctcgtcctcgcccggcgcgctgcgacgccaacggccgccgcggggaaacgcgcccccggctgcggccgcccgcagcccccagctcaccccgatggggccagaccagcgcggcagcggcgcagcgggcggcggcggcgcgtccagccggtcctggctgagggtcgacggcggcagcagctgcaggaggaggaggaggccgaggccatggggccagcgcgagaggccgtccgcagctccccagggccgctccatcgccgccgaatgccgccgacgccgacacctgccgcccggcgcgcccgcccacccccgccggcgcgcgccacacccccgagccgagcgcggcgctccttggatacgcgcggccgggcctctccgccccataggctggccgcctgtccctcttccccggcccactcctcattggctcgcgtcgcctccggcttcgggggtcctggattcgga

SEQ ID NO: 34508 - DNA, 2836 bp, Homo sapiens
aacatggtgaaaccctgtctctactaaaaatacaaaaattagctgggagtggtggcgcgcgcctgtagtcccagctactcgggaggctgaggcaggagaatcgcttgaacccaggaggcggaggttgcagtgagccgagatcatgccactgcactgcagcctggcgacagagcgagactccgtctcaaaaacaaacaaaacccaggagggggaggttgcagtgagccaagatcacgtcactgcactccagcctgggccacagagcgagactgtctcaaaagagtctcctatatgcgagcaaggagcttgattttgtccattgctgtagcaccagcacctagaacagtgccttgttcacagcaagcactcaagcacattaactaagagaataaaaagggatgtattttaggccgtcttgggaagacagaaaaataagtaacaaagcagtcaatacatatgttaagtaaatggccacaaaatttaataaatgccttctgataagcataacaatttctatcatacacaccctaactcaaaattatgtcacccgaagatgattctcttcaatgttctggaagttaaatatcgaccaacaaagtcactttataggacagtggggaaatatgtcaaaacttcacacacatcttctacgagtcagtaaaaaagatgaaaaagtggtaactgcaggtggtaaaacttcgacaggatcagcatatacttgacaggaaatgcagcatctcataccactcagtacaaagaaaatgtctgccttccctgactttaaaaaagagtagctatgtaaaaacttaactgacgaaaacagaaactgaaagtaaaaatgtctacagcatatatatgtacaacttaatattgtgaacattttcataccacaaaagttttttaaaacttgctttaaacttttaaaaagtcagaaaaaattttggtcaattggaatcggcatgatgagaaatctcttgaaaaccattctaaattccagttcctataaaatcagactccagacaatatatccagccaaagctacgactgccttcgcgcttctgaagaaactatacaccgcagcatgccctactacaaaccagttgctttttcttccaggaagcacgtttaactttttgtttgtttgttcaaggcagtcatactaggcacgaaaagatgaacggagcaaagagtgacccttggccttctccgggttcaaggtaggagttccggctcctcacgccttctttaccaagcaccagccggagcttctcgcttccgcaccgagttaggacccaggggtgactcagcggtaggacaagtgccgccgatgtggtctagcttggggaaggacggcgggcgcctgaggagggcataacatccccaggtccggccagtctcgggttcctggggagccccatgacacggcagaacccaggccgcgcggccaggtcccgggcctgcccacccataattcccacccgacgtcccccagctgcacggacctgtcgtactcagaccgggtaagaaacatggcgagggtaggaggaggcagcggctacgcggggattctgaggaccaacacgactccaccggcacccaactcaccggcagccaactcacccacacggccgcagtactaaggaccaactgcgcgtgcgaccgcgacctctttagcccgccctcctgtgcctgcttcctattggctggtagtagttcccgcctaggtgattgggccaacgcgcttcctcacgagggcttggttggtccggaggaggaggaggaccagggaggtacttccgccttaaatcgcgggtggttgctagggacgataggcacccaaggcgtgtagtgagttcgccttgtagagaagatgtgagcccgccccaagactggcaattggaaaggcttgcatgcagagctgggttgtctgaaccctgacataataggtccctcgccggctcccgtaatcccagctagaggactttggtcccgtttccggcaaggccaccacctgacttctcttcgcaggattccctctcttagggttcctccacggtgttctccatgcccggtcgagggctccaggactttgggcggtaatgagtcggctacagtgggtctgagccggcgccgcggacgagtcccttcgtttcagccagtttggctcgtttattgagaaaagtggggggcgaggggttagtatgtaagaaagtcttaaagtttccacatggttaaggtaattttatcaactctttcttgcacccctccccctagtacaggtttcagacctaaataacctagagttcaggatccagacttcaaaatattcactgctttttctgttgtttgtgaaaaataagtgttttctttgagcccagatcgtgctattgcactccagcctgggcaacagccaaaccctatccgaaaaaaaaaaaaaaaaaaaaagcgctttctttttcgacgcttcttgcttcccttcaataagttgcttgaggagcaactttgcagcttcgtaataacactgtaattcaagtatttgttcaagaaaggcaagtaagaagtcttggcacgggggtggggaatatagggaaatgttggtcaaatgatacaaagtttcagtcagagaaggtggatgagttctatagttaataatcatatattgtgtacttgaaattgtgaagagggtacaccttaaatgttctcaccacaggaaagtatgtgagatgatggattatgttgattagcttcatttaattatttgcagtgtgtgtgtgtatatatatgtatatcaaaacgtcacgttgtataccataaacatgaacaatttctatttgtc

SEQ ID NO: 34509 - DNA, 1328 bp, Homo sapiens
ctgagtttcactgtgttagccaggatggtctcgatctcctgacctcgtgatctgcccacctcggcctcccaaagtgctgggattacaggcgtgagccaccgcacctgaccgaaattaagtttttaatacatgaaatttggaggacacattcaaaccacagcaggccctaataggaaaaatacttgggtccactaaccaaggagtagatgtgggaatagccccacttctcttcactatcaatgacccagtagaagattttgtgcttcccatactcacaaatgtgggatctgtagggctggaggtcctagtccccaaagaggttatgctcctattagggatcacagcaagggtcccatcgaactacaagctatggctgctgctgggcattttagactccttatgaccagatatcaggaggcaaaaagaggagtcaccatcatgacaggagtaattgaccctgatcagtaagaggagatagtgctgctttttacagagctgatgtgattccacttgggcatctcctgataccttcttgctccatgtggctgaatgaatacatgcagcaaatctggcctgagaagggtatggttaacaggagcccagaccaccatataaaccaccaagacctgctaaggtgataacggacggtgaggggaatttggtgtagatagtggaggagagagaggatcagtaacaactgtggcccccagacaagttgctatagtttgtcacactaaccttcgtcatcaagttttcctttagcaagaaaggcccatgggaaccatagaaaaatttcttcccaaacctgtgtgaaaaagtagatctgtcgggctcaaagagtgggctgtagtggttatgaaagtgggcctctcagatttcctgctatgggagaatagttcattgatgaccccgactgctgaccttctggatcaaccaatgtgtttgcagctgaggccatgcttcttaggaactatttttagccagtgactaagcatggtggggtactaatacaggctcattgggacttctctaatgagtcactttggttcaaagctcagagggaaatttagagaaagaagcagcaaatttaatgcaaagaaaacaaaggaaaggaaataaacattagaaatcaatgaaatagaatgcaggtatccgagagagaaaatcaacaaaaccaaaacttatcttctaaaacagaaatgaaaattcatcaactcttaccaagggtgatcaagaaaatgtgaaagaaaacacattaccaatatcagcaattaaaaagggggacatcattataggtcctgtagacattaagaaatacaggaggatac

SEQ ID NO: 34510 - DNA, 1359 bp, Homo sapiens
cttttgtcggtactggcggtatgttaatcgtgaggcttagaaccttgtttcacagccctgatcgtgccttttgagaatcttttacgttctggatattctggtatggaagaggagaaaaaccggcgctgggcagtttgcaatccaggaaaatagggaaggataaacctgaagcctgtgcgtccaggtgcgcctggctagggtttccgacggccgcggtgtctcggtggggaccggtcccggaggcttcggcgaggaggacccggagtcccccccgccccgcggcggaactaaccacggaggcctctggtccctttaaggtgcccggcgagcggagaaagggagcagagggggcgggaggagggttcgggagcgcacgccacgtgacccggcggccaagttcgctgcgagtttgacagaagtttgaatccgagtcgggggctttctgctgccggcggggcaccgcggcggccgcagcctctgagagcacgaacagcagcgcccccgcgtcccagccagccagccagccagactggactccggcccaccgacggccgctcgcgctccggccccgctcgcctgctctgccccggacctgcagctccccgctcccccgccgtgtccgccgcctcccggccagagagccaagccaccacgccgcgcccagcgctcgccgcgccagcatgtcctcgaccgagagcgccggccgcacggcggacaagtcgccgcgccagcaggtagtccctgcgcgcccaggactctcacccgcccctctccacctagatgtcgggctgcacacttatcccacccctggaccgcgtgtgagtggggcaaggggaccagcgccttcccagggttccccaccgccctgaccccccggccggctgtgtctccgcaggtggaccgcctactcgtggggctgcgctggcggcggctggaggagccgctgggcttcatcaaagttctccagtgggtgagtcgctgccccggccccgggctatttcgggagcctgggctgtgacgctgacctgaagcaatggagccagggtgggggctggggaggtgctgcggccgggccacggcggaagggtggggggcggcgacaggtgggcgggggaggggcgggctggggctgcttctccggacttagtggcaggagggtgaagagcgaggcatgcggagtcccggattcggtccttctatgtgcaaggagcctttgcccagggcgctcacatttcacccgggcgagaggacccgggtgtaacctttccagaactctgatcctgcacataccactccttggtgacgggaggggggagaaggacgacggggacgaggtccgctcttcaccaagagggaagc

SEQ ID NO: 34511 - DNA, 966 bp, Homo sapiens
tggagctttggtcttctcttttccccctgcaattgtgcatttcggagggactcttgctgcaagctcggtaggcaatagcatccgctccaagactacacttcccagaaggctgtgagtgggtggggggggggggggcgcggggaacaggcaacctgtgttgcgcttgcgcaaagactgcgctggaaaggcaggtggggaggaggggaggcgtgcccgcgacggggcgagggggagggggccgcgcggcggcggcgccagggcgggcgcgcgtccgcggcggtgatggcggtgcgtgaacgcgcggcggcagcaatggccgctctggagcggcgggtgccgagtctcgatgacttcgcgggacagagctggagctcgtgggtggagcgggccgacctgcccgcggctgacggtgagtaaagccaccctaaagtccggggaccccatcactatctcccctccccccttccgggcccccgccagctgaggggagccgccgactggagccgccgtccggctccccggccccccaaacaaaggacccgccgggtcctagtgcccgcccgctccgtcaccttcgcgcctccgggtcctagcgcctgctcaccgctcgcagcccaccctgccaacctctgcctctgccagtcgctaatacctgcccccatataggcttgcctttatctttctccttgcctgctgcccctcagctcgcgaccctcctgcacctgcctccagctttccctgtccgcaacagtcctccacgtgtttcccacgcaccccacttctgtgcccccttcctcaccccccttgttccttcgccttttgccccacacctcctgctccttttcggcatttgcctgcagctgcagtgcttttagacccccgccctctccgcgttagttcgtccgtccatccatctatcctccctccctccatccttcggtccatccatccatgcctccaacccac

SEQ ID NO: 34512 - DNA, 997 bp, Homo sapiens
aggagacagtgcacagccagggaaatccagtactactagaaatcggctccaaacacttgtttcacagtcttggttcagcgtaccaagtgtgtgatttggggtttcactgaaatcgtttgccacaaaagtaatttccacaggctgcttgggatttaggcccttgtagacagacacacagatacaaatgaaggtgggctgggaactgttcggtccccttctgcctccgggctctcgcgggagcgggcctctccggggcactcgcgtttcccccccagcccccagagggcgctgtgggccactccgccgcactgccggcggcgtccccggggaggagcctctcctgcagccgccaccgcctccgcgatcgcaaacccggaagacgtgttcgggcagctggagtgtacgggcccgcgggccacggccatgcagcccctggaggtaggtctggttcccgctccagctggggagccgagactgacccgctggctgcggagaggcagtgggatcttggcgcacctggtagctttgggcttcaccatctttctgacagcgctgtcccggccaggaaccagtgagtgtgcggggcggggttgcggaagggggcggagtggagatgctggaggggcagcgcttgggagccccgggagacttggaggagggaccccagcagtaaaggggagacagaaacagtggagggattttgagggcctggtggggcggggccccagggatcctggaataatggggttttgggtgctgtgggggaagggcagacgattgaacagaccgaactacttcctcagaaacaggtcccctgatggaggatagaagtgaaggaggccgggcgcggtgggtcatgcctgaaatcccagcactttgggaggccgacgcgggtggatcacttgaggtcaggagttcgagaccagcctggccaacatggtgaaaccccgtctctactaagaatacaaaaattagccaggcgtgatggcgcgcgcct

SEQ ID NO: 34513 - DNA, 756 bp, Homo sapiens
tgcaggtatgcacaggatggcagggactgctgggagtcacagggatggcacgggcagggtttggaggtggggtcggtgtgccttttgggaggagctgagggaaggtcaacagggcaccgggctgggtaggacgcgtccggtcggggttgagggtccccggggcctgtaggggcgggctccccccggggcctccggtcactgcacctgctcggcgaggacgtgtctcagcccatggccggtctgggagctccgtcgcggcctctcccggcggcgcctcaccggccggcctgtcactgcgcccaccttacgcaggggcccgcgcccggcaccgtcgcctcccggggacttgcggggccccgctccgctcaccctgccaccgcctcgaccgctgagcccgccggagcccaccgaccgcggtcgctgcctccaggtccgcaggcctggcgcggatcggtgcggggagccggaggcgcagcgatcccagcggagggagcggcgtgggggcagcgagcaccgcgcgcgcgcccgtcgccgccgccggagcctcggggcgcgtgcgcgcggcgggggcggggcgcacgtgcgtgtgtttgtgtcggagccggccgggcggacgcgcgcggggtcgttccctcaaccagcgagctccggacgctgagctaaagacgaaaattggcaggaagagcggcactggccccttaggctccgctataacttcctccatcccccattcccccatctcccagcacccttctc

SEQ ID NO: 34514 - DNA, 3155 bp, Homo sapiens
gcaaacagctttccccctttgttctaggaaaatttctaggttgtcttcctaccactagattattataccagtctagtgcctattacattgtggaagttccctaaaaacatagtatatatagggaggagagtcctttgtgattgaaaaacatgttcacctctcctccctattaaaataaatgcatacagaggaatcaatcattcctagacagggaaaaaactcttctttcaaacaccactgatcagctattagatccaaggaattgccagcaggtggcagtgtgagcccaatggaaggaggaaaggcgagtgtacgtggtgggaggaggaaggggagggcattaaacattgcctggcagccattttgttaatttattttgccttttcctttgactttgccctccagcccttccttcacatacatcaaagaagaaagttttaagagcaagggtatctttaattcaggctgaaatttcctgacactgtgatctcactggtgtttattacagagtttgacatacatgggttcatttgccatttatttttccctgtaggagtggatcatgaaggaaataaaaatttctcttttattatgctgagaactttcccaacaatttctgctatgaccaccttccaggagttttctagtcaccagatgccttggtaaagttcaatacgtaatctttggctctgaaagctgttcctggacaaaatctgagctaactcactgaagaatcaacagattgaggcaaccatccggtcagttactttttcctgcatcctgctggtgttggggtaactcccaatcctagatgaaaaccttagactttctgttgtcaggtgtccccaggcaatatcctacgggggcatgatagaaaagggtaactctggggtcagatagatgtacttactcactgtgtgaagttgggaaagctgcttaatttctctgagcctacttcctcacctgtaaaaatggggatcattattacctacctcacagggttgttgtgaggattaagagatgggatgtgggagcacctagccgtatctggcaaataggtactcaataaatactggttttacttccctttcctcttgccctttttccccaaaagtattgataatggaaaagcagtccctttcattcttaacagtcatttgggaatgactgggggacttttcaaaccttgaagaattggcattgctaagagttaaggtggacgaggctttttaaggtggctctaatcctctaattaaatccttctaattaatgaatcatcactatataaacctctctgttgggaccttactttctcaagttcagattctattagagaaataaatttacaatcacagggaaaggttttagggactgagttcccttcgctagaacgtatagtaattgtgggcttatttgcctgaaaagttgatttaggactaccttcacgcagtatccagggttattagtgaaagatgctatctgcctgggactttcacagtggacttaagtttcaggtgatactagggctgagaggcaaattttactagaacctctccttttgcatgttatcgcaacaggaaattttagtaggagattcacaggatgcactggtttgtttcggggtgtggaattgaagttgacttatcttggttttagttctaagaccctaaggtaggaagatctgaattatactggagagaagggcagcatggaaattttatggaggaactacaggcttacctttcaggttatcgagtatctgctagcgatttcaagtggccttttgccaatataggagttaagcaaatctcaagcccacagaaatacgtgaatagcaaaaggaccaggggacattttgagaggagtcagtgggccagagacggcaaaaagttattgctgaggtcctaagcacagtcggtgttacgatctcagatgtgagacgtgaacggcgcccaggccggatagcttgttcccattccattgatctgagataaccccaacggaggcagtgtcccatacttgggtaggggtcccgagtctccacagccagagatcaaaggagttttctggcaggcgagaaattaccagcagatattcccgcgcgggatgtaggctttaatttagaaatctccgccccaaaactggcatcttgaacgcgggagggcattatgagttagaggccccggtttttctccatttatccaaatcaggtagccgaaaggtaaatgaggcttcaagttgggcggcgggcagcgaacttgacagaacctcgaaactctgcagatccgccgcccaacccagccgccagctccccgtgacttccgctttcggtctcaactcctctccctgaggagagtggtttaaacggtgaaggctgcggggcgtcgccggaagtgtcgtaaacgtcggatatccggttcttctgggcgctaagggagctgacggagagggccaccgcccagcaatagacggtgcctcagcctgccgagccgcagtttccgtggtgtgagtgagtccgggcccgtgtcccctctcccgccgccgccatgggctgcacgttgagcgccgaagacaaggcggcagtggagcgaagcaagatgatcgaccgcaacttacgggaggacggggaaaaagcggccaaagaagtgaagctgctgctactcggtgaggggctggaggcggggactgagtggtggtcgggagagcctaggcgcttggaaggcctgaacggggtctggtcgggccgacggaaaggaccctaaagggatctggagggcgtgccgggcgtggggcggggtgttggggttcctagctgaggccccagagggcgtgatgaggggggtggggttttggggttgcgggaattaggctgtagagggtgtgactccgggctagaattgcgtttagcagagagacttgggagtatgggccggtagatgttgagggagtaggaatatgggaaaagctcataaaggaagagttgatactaggaaggttttacgttgggttggagcgtgttggtaacgagaacggcatagagtatatgttgggcttgtataatggtttgtgagtttggagcgtcgtggttctttggcaggataaagctagcaggcttgaatggatggtacagagactggaacagaatggtcacataa

SEQ ID NO: 34515 - DNA, 2764 bp, Homo sapiens
gctttcagaaagattatatcagtgttcaaggccaccagtaatgtgtttgtgcacatgtacgtgtgtgtgtgtctcccatctcactaactatacccttgccaacctgcattagcgtttattttttggttttttgttttttagtctttgctattttgattaggtaaacctggttatctctgttctctttttagttttatggattctgtgtgaggtgaagaggccaagttttttttaagtttgttcagggaacagtagccagggatcaatggaagtggcaccagatgcaggtggagaaaagggttcagggtccagaatccagcgtggggagagaagagggaggcagagtttgggaaggatctctgctgtgggagtggtaagaactgggaggagccagacaaacagcattagaacaactgggtgtggggggcaaaggcctcccacaagagggaaaatagggaagagattaattcctgctaatgcatttaattatattcagtgaagtcttagggacttccctccacaagttccctttaggtcggattatctaccccttggcagtggggatgcttgttggatagaccccagaacggctgcaagtgaatcaacctgtgagtgtcaatagagaaccaaggccaaggctaaagcaatggtaatacatgaatactgagtactaactacaggccaggcacagttctaagcagttaacttatattaactcatttatcttaaccaccatataaagcaggtactcttacactcattttacagacgaaatagaagcacagagaagttaggtaacttgcccagtatcagtcaggaagtaggtgaaatctggatttgaacccagacattctggctagagttaaagctcttaaccaccaaatacagaaatgtgggaaggggagccagaattgcagggcacagcctcctacctacgccggccggaagaaaacagacgaccaagtgagattgcaggggcaggacttctgcttaaaatgaatcctgggacaatgataacagctacctttcactgggccctcacttcgtgccaggcactgtgtaaagggactttacgtttaatcttcacagtaacccctttgagtgaggtactgtcattaccccatcttactgatgaggaagctgacgcacggaactggcccaagacccagggtcggctcaggccagccctaccgcggtgtggtggctgcccacgtggcgcccaggaagagaaaaaaatggcgaggcggggtcggcaggcggaggcggggccaggcgggggcggggccaagggccgcagagcctggcgcggagccggcgagattttggtggggtctcacctgttgcgtgactcccccacagtccggccgcgggagtccgaccctgaatgcccagggagtgttgagagaaatctggacgagtttcgggtcccgctcccttgggagcacgtggcctaccagcctctcgattgcagggttgggtggtcgcgacaccggggtcgccttgaggccagtccggctgccgaggtctgcgggagtccacctccggccagctggcaattttgaaagactgccttactttccccatctcagtgccagggcaggggcccttggagtgacttggctggggtctgtggcccgatccccctgccgtccctcaggacccgggctttctgctgtacagacttctcgtgggcagcctcccctcggaactcgggcatcatggcctcaggtgagtgtgtgtacgtgtgttggagggagggtctctgggacagagaagtgctgtggccagagtgacaagagggtgggagtcacagcacagcagcaggacctagggaaggcggtcagctcctcccaggagggcctggggagcagagccagagtgtgcagagacagaggaaaaatccaaagaggctagggtctctgtcccagacccccagacaagggggtctcctggccttcctgccttcctgggaggtagctatttggcgacggtggaattttcccgggacaggcccctccctcctgggctgggattctcggttcttccccctcctcccagagctgggctaccccgggagctgagggtcagatgtggaaggaaagtgggtgctgggttttcacggagtatgcctgccctgccccgggaggactgtgtttgagcttggactcgctcgctgctgaattcctgtttgttattcttttttcttccaggctagctggaaggaccagctagcctggactttggcttctttgcccgggagccctggcatgatggggtgagggctcttggtgggttagtggagagctgggggctggcccttccccatcttcttttctacccaccccctccccgccccccgccaggcccagccaccatcagtcacgtcactcctgggactgaggaggcaggggagggataaggggcagagatggaggccccactccccgaggttgcctagacaacatgagaaatcgtggccagggcctcttccgcctgcggagccgctgcttcctgcatcagtcactcccgctgggggcggggcggaggaaggggttggatgtggcagagccaggccccagccggtgccgctcagactcccccgctgtcgccgccgtggtcccagccatggcatcctatccatctggctctggcaagcccaaggccaaatatccctttaagaagcgggccagcctgcaggcctccactgcagctccaggtgagtgtgtgcttcctggcctcaggatagatgctgggctctgtcttg

SEQ ID NO: 34516 - DNA, 472 bp, Homo sapiens
catcgctttgacaagtttaatgccaaatacaaccctattggggagtccgtcctccgagagatcttcatcaagacggacaacagggtatctgggaagtactttgctcacatcatcaaggtaaggaggcagccttccctgccaagcctcgagcctgaggatctgggggcttttagggggtgagactcaaggagggtaggcagatgaccccctgaagagctctgactcagctcacctcatgtctgactcagctcacctcatgtctaggaggtgatgtcagacctggaggagagcaaataccagaatgcagagctgcggctctccatttacgggcgctcgagggatgagtgggacaagctggcgcgctgggccgtcatgcaccgcgtgcactcccccaacgtgcgctggctggtgcaggtgccccgcctcttgtgagtgtccctggagtgggaggggaacctgcggggtcatattc

SEQ ID NO: 34517 - DNA, 948 bp, Homo sapiens
aataacactacttatttcatggagaggtggtaagaaataaaataataggcgcaaagtagccaccattcagctattgaataaagggtggccaatgttctccgaatgctactttctggggttgcaccaagggtgctccaaaactctttcttggtccctggggaatgtggcttaagttcctgctcaaagaaccgaaaagcccaaagagctgtagctgcgaggtggcgcctaacgggctgtccctctactgtggtcagagccgtgccccttgcaggtgggtagcgctgagagcagagcagcgcccgcgggactggcctgaggatcccgcaggcaggagggaccccgcgggcctttccctacctgggaggtgcacggttggccaccagggcgcgctgctggactctccccagaaatcgggcggaggtttaggcctcagagtcacttaaacttgtaaccctaccggtagccgtggagtctagtaaatgtggggtcggctggggttcgccagtcatcccatgctgctgaggggcaggcatggggcccgttggccacaggagacctccaggcttctctcccactcttctgcctgcaccccctctcgggtagaggctgcacctcctgcttgggttcagccaccttcaaatactgcatcaatggctcgtgcctctgcctgcggggctgggccagcgcgggagaggcaggcggagggttcagggagctggggatctgcggtatgtcctgaccccacacactttgtgtgtgccataaagccacagcctttccttcccacccagccccgtctgaatgagaaagcatcacctctgctttctgtttgatccggcagttctcagccaggctggaggcggcctggaatcccagatcgtctactgacacccctagtttccctcgccgctcctctggaggacgtccttaacccctgatgctgcacca

SEQ ID NO: 34518 - DNA, 1271 bp, Homo sapiens
tgcactccagcctgggcaacacagcgagtccccgttccaaaaaaaaaaaaaaaaaaaagactcagaatgacacattcttaatgtcttaatgtataatgagaagtataactattcagaagtccaagcacttgtgtgtgcatggtgctatcgtcttgctgtaggcaaacctacatgggaatccaccttgacacataggccacttcctgagcctggacccagtctcagagctggggaactggcccaatgcaaaagggtcgggagcatctgcaacagagactgagctctatcagcttcggtgacatagcctccattcacgctccccaactcagcagagagagcacaccatcagacttctaagacttagtagccaagaagtgttgaattaaactctctgagacctctctttagtctgaccctggcagcctcagtctcccagagcctgtgggaactcggcagccgagaggcagaaggctgggcgacgtccggagaagaagaaacgggggaagaacttttctcttacgatctggctttactctcacgcgcacagccgagtccctggggacccagcagaggtccgaagcggagcggggcggggcggggctacggaagctggcgaggccgagcccctcctagtgcttccggaccttgctccctgaacactcggaggtggcggtggatcttactccttccagccagtgaggatccagcaacctgctccgtgcctcccgcgcctgttggttggaagtgacgaccttgaagatcggccggttggaagtgacgaccttgaagatcggcgggcgcagcggggccgagggggcgggtctggcgctaggtccagcccctgcgtgccgggaaccccagaggaggtcgcagttcagcccagctgaggcctgtctgcagaatcgacaccaaccagcatcatgtccatgacactggggtactgggacatccgcggggtgagtgagggtccgctgcactgtgggaccgggcgcgtgggcgggaagtgccgagcggctggggaccggctctagggacggttccctccttagggctatctctcacaggagggcctgtgcatgcctgtgtgtgtgtgtgtgtgtgtgtgtgtgtgtgtgtgtgtgcgtgcgccggggtggggggggggtgcagtgcagtgtagactaggggctcacctggtgcagagaaagtcaccaagtcagggaccctccatctctgacacgacctgcgggccatctcttccagctggcccacgccatccgcctgctcctgga

SEQ ID NO: 34519 - DNA, 714 bp, Homo sapiens
gccagctgctgagtcccaagcccctccttgggcttgatcccctgggctgcagctgggaacaggctggagacctggcctgggaagccactgagttgcccccacctgccctgagatcccctgtgactgggctgggccccgatcttccctgggggccaggcccttacctgggtgccagtgaaggccgggtgcctggtccccccaggaggctggtcttggagcaggtggtccggtgctggtggtggaaggacagcagcttctctgctagtggccacaggcagagcctgcctttgatgaggttacagaggcagccacgcctgtgctctttggactctggtgggtggggaggcttcctggtcactaaccgctcaacatcaacctggacctgcggcagtgtctgtgctgactggcgtccccagcttagctagaggcccctgcttccctgtttcccccactgctagccttggggtgtggccccctcttccctctgccttttaggtgcctactctggggaacaggtcagcatcaggcacggggctgggaccagaagaagagagcacacatggcccagagtctgggttctgtggtgagggcacaggtcggctggaggtggactccaggcttgggggaagctgtgggctggcgtgtgtgccatgcctgtgcgtgggtggcacccataggtgtgtgatcctgtgtacctgggtggtgcctgtgagc

SEQ ID NO: 34520 - DNA, 873 bp, Homo sapiens
gaccctgaggcaaaacagaacactcgggcagcaggtgagtgaggctggacagagaaagggattgagtgaaaactagaagagtgaggtggacggaggtccctgatctcggcaaggaagtctgctgccttcacccccactgcctcacaccccctgttctcagcatcttcaactttggggctgcctgagaaggcaagcgcagaagcggaggaaggaagggctttttagctccacgggcctgtggacgcctccattccggcctgcccaccccatatcatggcagcaactccaactccctctgacccccagggtcaccctggctcagcctgggcagtgtccccagtggtctgtgactcagcagttcttggccagagggtggagccccagctggctgctgaactctggtctccacagggctgaggcttcgctcggggcctggaggtcctcagcacccggcccggctcctgcaccctctccaagcctctcatccgctccagtggtcttggaggtccctctgtccacaacaccgtggtgccaggacggggctgtgctcagtgactcagcctggccctcttatttgcactgagtaggtgccacaaatatttgttgaatggaattcttgcctctcatttgggattttccactgcagccaaacagttgctcccagccctgccaagggcttagcctggttctgcatttgccctacacgcacgcacaccgtaacgtctcttccccaccacaccttactcctcctcacaagcacccctgcaaattgctcctcagaaccactgcctcccccagcgtgtgcttacaggactctgccttctctttcctcattgttttccttcttctatgcatgtcttagcaggggtgacc

SEQ ID NO: 34521 - DNA, 806 bp, Homo sapiens
ccccaccacagtgccatgtgaaagtccccatggcagaagtaacgtagcaggacagagtagccctgccttccctccccagtttcctgctgagccctgggggatgggcagaggctccagagctgccggtaagaggctggagccacatgggcaagggccagcacacctcccataccttcaacattgctggagttggttattagtcatagagacccccagagtggaactcacagtaagatgatgcaaggtttaagggtttacgtgctaaaaaagcacaagtttgccaaatggaagtgtgtgattgcacaatcactaaggtgtttattttctaaactttcctgacaataagaatcccctgggatgattgttaagaacatagatttcaaagcacctcccctggagactgcatgaatttgagatgtgattggagatctgtattttcaccaaatttcctaggagatttctatcacccaacaagttgggggaaactctgctatgaggtaatctgcaggtatgtaggccaacaggaagtgatttgtgaggcaccacagcctcaagtgtggggatcctttgtactcccatgctcactaggggtcttgtggatatgggcaaagggaatgttcccaactggcaaaacctggagagacagactggccaactagagaactcactccttgccaaggatacagtgatattattcagccacagccctgacctccctgtccctatccagctggatgtgatttaaatgttggaccagtgtccattgaatgttgcttccttgttacccaatttaaatggtagcattt

SEQ ID NO: 34522 - DNA, 1222 bp, Homo sapiens
gtaaacaccttggtacacacatctctgtgccaactggaccctgcagaattatacacacatgaaccaaaaaggtgactgccttccccttttctccttagtgtgggagagcagacatgtatagcaataaccatactataaaacataatgtgttaggagaaggatttcagtccaggtatggaccaggctgcctggaggaggaggcatttgagccaggctcctcaagcagaaagctgggaagagggagctgatctccctggtaaccacagaaagtcttctcagtgagcaactcccgctgtggctcctgagagctgggaaaacaggccttcataccagagccagagaatctggggccccagtccccagccctcttgggaatatggcagctctcttcaaggggcaggaacagcatctctcatctacagaagccaggagatttcccccagcttccttccagctccaccaaaatcaccccacactcagagcccctgcgttgggggagggagggtcttgacagccccctgcaacccctgcccccaccttgtgcccccagggagcagggcagaggagctattccctgacagtgctgagccatgcggcaggcccacaggctcccattcctgccgtctctcagcgtctccggccaaaccccagctcctggggttaatggaatgttgagcaatccttggaatttttcagtgagaaataagtactttcgaattccgttcaggcctcctgagtagggcgcgctgcctgcagcccaaaggctggagcctgcagcgcctgagtcttcctgaaccggcatcagggagcactgggggacttttcagtgtttgttttctcctcctgctggccaggctgtaggacactattacaatgaggtcatggggccctgccccactgcgtccatgggtggttgagcagccaggatctttcccttcacaggctggctcgggtgtgcacacgggtgtgctggaggacaggcggggtcagagcccaagctcagcctgaacccctcaggacctccctgccccatcactgccaggtcttattccctatccggggtctgccttggcctagggccttgggccacattctgtatctagtctcgtgggggccgtgtgaggaacctagtttttacttgctagagataattgaacagtaccctgcaagtagttctcagctcaaatggcacctcctctgggaatacttcttgaaacttcct

SEQ ID NO: 34523 - DNA, 544 bp, Homo sapiens
agattcagcagttgtggtgtcacgagtcactcatctcaaataaaggacagggggaactcagtgtgagccccaaacaagaagctcacaggcagcttctgagccctggggagaaattgtttgctcctgggctgggtggtaagggggggttctccagtggaccctccttcctccacctacttgccaccaatttgtattggggaggggttggtatgcagagggtgaagacagtatcataaaagcaggaaagtgtcctgaattccagggctgaggaaactccccctggggctctatagttcctaccaggaagtggggaattcccagcagcttgcagtgggtggtggggaggtggagagggagaagtttccagagggtcagggcttccttaggaagggccctcccatcctgaggcaaatctctgctcatcccctgaaggtagaagtgggctttgggatccaaggtgccctttagcttgggatgtagggcatgtaattcttactcaaaggacagcctctctcctcaggcctcggcaaggagccaagacaga

SEQ ID NO: 34524 - DNA, 518 bp, Homo sapiens
ctgtgtttaaggacatcaatctggtgtgacctgcaggtgaaactgcaggacagggaggagttaggggagggatttggaggccacctccacttttgggggtcagcaggcagactattctgagccccttcttcagcaggaagaccctggtctagccacaagcctcggtgaccctggacagtgagcctcccctcctggtgttcctcctcccctcggcagaggcagattgcccttcctggtgactcaccccagaagggtcagctctaagcagaaagtcattgttgacaggaagaggggtcagactttcccttttccggccagcttcctgggtaccaaaatagcaacgcggcacaacaaagagttggggcggtggaggcctcccaaatgggctggaggacacaccgaccccaccccatgctgcccacccgcctgtgggatccaccatgccacatgacagccagcctgacagcaccagtcgctggtgagtctggtagccctggaaaccctctcacagccagccg

SEQ ID NO: 34525 - DNA, 1478 bp, Homo sapiens
gtaccaagacctagatcctcactcagtatttgtgcagggtattgaaactccatgtccctactctaggcaggtacaggtgtgtagggcaggcacagacggaagctgcaaataagctggcacagggaaaagggttaggagagggatgtaaagtgccactgagattctgaggaagatgagaccatgtgggtcagggaaacagaactctcgttggtgaagagagcagccgagagggccttgagggggtttatttccacaggtggggatggaggcatagtgacaccttctgtggctttgcctctgccagccttgccagacttcttcccctccaaccctctgccactcacactcaccacaccaagccagactcccctccccactttgcctttgctgctccctctgcctgggatccccttccctgcccctcccttctgtccttgtcttggctcacctgtcatcatccctgaaaactgagcctgaccctggactttctccttaaggctcccagagcaacctgggcttcctccccgatagcactaactatggggtgctgtcactgcctgcttccagccccacccctacagcccactggactgtgagctcactgacagtagactgtcttctactttggaaatcccagcacgtaaccttaagccaggcacacagaaaacattcaataaagatttatccagggcatggctattgaatttttgtcaggtgtaggggtgcataatggaaaacaagatggaagcagaaggtggggaccaacacgaagaaggccctggcatcagtcaagggtgctagcatttactctgtgggtgtgtggagccactgtcagcactaggtgaggccacagcagggaggacaatgcccactggtaggactgctatgccacatgagggctagagcagagcaaggtcagaccaagagcgaggaaggcctgacaggtgccccagcatcctgtatgcatgcaggtctctgcagcctttggagagcctagacaagcaccccgagttctgctagtacctgggttaaattgacagagtgagttctgacctgcagctatggcatcctgccagaacccatgacctcacccaagtgcagagggcccatgacaagcatgtgacacagcagtcagcactgggacaggccacagtgggatgaaagggtggagcttagcttagaaataggggagggaaaaggttacttccagcagagagaatgatctggattcgtaaaatccattcattcactcatgcattcatccattcaacaaagctttattgagcacctagtatatatgggttccatgggagataaaagctatctctactctcatagttcagtaagaagaagggtaagaaatgtacataaacacaagagagacacagagaccaagaaccatggggccagaggagagaggaagcattcctgttgagagtaagggggaatgtttcccgaggaggggacatttcagacgg

SEQ ID NO: 34526 - DNA, 1293 bp, Homo sapiens
gccttggcatgaccctgtttttgcataactgaagacacaatttaatgaaatagcactttatgagctttaagggaagcaaatatctgacctaatcaggggtgaaagaaggggagagagactctatgccaggctgttccatctctgttaggaaaggcccagggccaggcagttcccagcttttcaaggaatgttggcacaggagtccaggatcaattatcctcaatcaatcagcaaatatttattgagtgagtacagcatggggggctatagctgtggaaaataagatgcatgtgaacctggtttgctttctatggtgagctccttctggtcatatcgttcctattacttctatgaataattgtagctagtagtcactgggcacccactctgcaacatgggcctggttatatactatgttgacttcttgtaacactctgagacaggtagtatgacttccacttagtagatgaggaaattgaggatcataaaacttccacactgccccaggtcacaaagctagaaagtagcggatctgagatctgaatgtagatctgatttcaaccccaaagtcctttactaatgatagccaacatcacatgagtcttctaagattacagagcattttccagtaaatttctaatttgattctgtcactactcatgggaggccaaaattatgataattcccattttacagagaagagaactgaggcttggaggattcaaacaacttgccaaaggtccctgttggtaaatggtatatccaaaaaagatctgagctgaagccaaatcctgcattccttctacaccttggcaaggactggatcatcgcttctagcaaacagctggacactgacagggagaattctcacctaacagccccagagagcaccctggtgccaagccatggacggccctgcctggactctgccccagaagcctgcccatggaggacagaagaggaggctgctccaggccaagtgaccagctgctctggggactcgcagcccagcactgggagctggcagggagcaggaggggcagagcgctctgcctgggctccaacaaacaggctttctagtgaatggaccaattggcggttgtgggttatgtggccaattgtggttaggggaagggaggagctcctggaggaacactgtattcctgctcctgtcagtgactccgagagagttctggactaagaggtgggagcacaagccctgcccactcctctgggctccagaattaagcccctgccccacatcctcctggcccctggagcaggggttctccc

SEQ ID NO: 34527 - DNA, 4012 bp, Homo sapiens
tgaagttggcattataattaataggcttaggctcatcctactagtcctcacttagactcattctcatgtagaaacaaaacgtgattaatcacctcagtaagtgcaatttccaaaaacatccagggaaatctagggtccaggtgcaggacctttccaatctgagttggattttgcctccaggagagagcatgggtaccagccagcattttcatcatctaagggtcaggtgccttgaagtgtctgctggcacccagggaagagccccccagcttgctgtcacaggacacagctgctcccttcctggccaggtagctggcctccctcccagaatgggacttgaagctggccgggctgcttgggggctgcagaggaagaagggggctgccggcaaacctgctgactcaggctccacgagggagcaagtaacactggactcctttcggcactccgagaatggggtgggggcgtcttcaaaggatttccctcccttcccagtgcttgtccctgctctcggtccgttttctgctaagatttggggattttcaggcctggagggaaagtcccttgggacgatcatagagcgctagcactgaatcagcctggagagcgcggaaggaaagggtcggtccgcagagggcgcggggaaggcagggtggggacgcggtggagcccgcgctcgtttgctgaaggcttggaagtgcagcgcagaagacagagggtgactaggaagacgcgcgagcggggctggccggccggcgggtgggggaggggaggcgggggaaggcggctgagtgggcctctggagtgtgtgtgtctgtgtcagtgtgtgtgtgtgtgtgtgtatgtgtgtgtctggcgcctggccagggtgatttcccataaaccacatgccccccagtcctctcttaaaaggctgtgccgagggctggccagtgaggctcggcccggggaaagtgaaagtttgcctgggtcctctcggcgccagagccgctctccgcatcccaggacagcggtgcggccctcggccggggcgcccactccgcagcagccagcgagcgagcgagcgagcgagggcggccgacgcgcccggccgggacccagctgcccgtatgaccgcgccgggcgccgccgggcgctgccctcccacggtaagcgacggccgcggcgctgggcccgggacgggctggggcgggggctcggcggccaggcggccgggagcggcccctcggagccgacagcctgggcgcgccggctgcactggcccggcgttcccgccgcggacgaaccgcctttgcgcacggactgggccctggcgccagggcggaggccggtggcggccctgcagctgcaccgggactgccaggcttccctgggaaacggagggctgctcaccccattgcacggaggggaacactgagccacctgcaggcaggagcccccgctcagccagggtgccctgcctctctccctacccgccaccaccaaggcacgggcggagtggctgtgcgctgagtgtgtgccctccccggtgggcaccttcctcatcggccacacacgtgcttccaaggccctgctgaggagtgggcgcttctgggcagggaaagttcagggggtcaaccagcttatagaacgccagggacttgctggcagagggacggagaggggcaagccactgcttgttccagcccacaggcaggagctacggaggacttgggtggctgtttggggggtggggtgggggacggcaacagccggcaaacagccccccacccccggggctgcttggggctagctcagaatctctttttcttgcaaattctggtttcatcggttggggagattctgggctttgtggtggtttatggtggtttgcagtgcttgaggaaaatggaaagagggtttggtgttgcagagctgtgtccaggggcagggtctgctcctgactgcgtaagggacgccctgccccaactgtggcggtagcagatgcagccatagaaagtgagggtggcactgttcatgaccagtcagtgggctcataatagatttgcttctgaggagtcctggaagaaaatgagaggggaaacctggggggaaaagagcagaaaattatttgggggtagaggagagcgggctgcaggtgaggtgagagagaaagggaagagtgggtccacagaaagaaagtgcctcactgagagagaggagatagagttgagaggggaagggagaagggttagccataggcagaaagcaaagcttcggggctgaaggggagaccatgaggaaagaagagaaagacaagggggctgtgtttagacaggggaagtccaagggcccggttctgccaggtctctccagaggccttgttgagggggaagatgaaatggaataggataggtggcagaggaggctggacagctggactgaggtgtcctagcatctctgagcctgcagcagagattccttctgagggctgctccccaggcagaagccagggctaggggtgggaggaagaggcagtcagaggagagcctgcccagccagatgcaagccagagtgttaaccccccactgtctgtccagatcctcctgaggcagaatggaggccccaggtccaggggtatcccctttggccagcttcgaagtcagcctctcatgtagtggctgcactttccccacactgatgcctcaaatgtcatcaaagccagacagcccttggggttaagcattgctcccaccttgctctcctccagggaggttgtcttcctgagcggtccctttcatccataccattcactccagaccttgagtggcagccagtctggggtagatacaccgtctagtggcccagtttcctccaatcattcctgaacctaaggtttctgagtacctgggccattattcccacccagggcaacctccccaacagagcctgaagtccccccagcccccgtgactgccgtccccctcttccacactttccctccctcagatcagccaggatcctcacagtccctgtgctgagtggtatgaaactatcctttggctcttccttccatggctcccacccctctcctgccatcaccttctccccatctttcaaggcctcactgaggtccctgctctctgcagtctccctggtcacccagccagagctgccttctcctccccagaagagctggcaagcatttgggcttttggtgatatgtagattagcacattgttgtgggctgtttcatagcctcgttgtgtttttccagtgagcaacttatttgcagtatttgtctcaacatctggattattgaggcaaaacccagagtccaggatagtgtcaaccttcaccctaccctgccagcatttccctgaatctgggggcatcagccgccaggaggcttgggagctctcaggaggtgacctcaagctggagaaagaaagcccaagagtctgtctgcttttggctgaagaaggagagacctagggccaggggtagggatgaggagaccccagtgaagagaaggaagagaggaaggaaggggaaagacagggcatcaggagccagtcccatcactctggggctgagcaactactgggccaggtaggtgctgggagagaagaggggtctcagaaaacttctctgccatgataagaggtggctggctggaggcaaagcctgatggtgctcaaataggcaggtgccaggcaagggatggcccattactggcactggtgcctctgattaatcagctgggctccttttgaaacacacacccagggctccaagatgtctctggcaagggatgagttccagtgaaactgagtttgatcccacagtttttccagtggcagagccagatctgcatggaaccaggtgggaggaaatgctgggcccaggggagctgtctctggcttgccatctgaaagccggtgcatgaacatgaacttgagggcagttcaaaaagtgcttggctcagtgttgatgttgcagagacagaaaaaaatgggtagatgcaagtcct

SEQ ID NO: 34528 - DNA, 2608 bp, Homo sapiens
cccagaagttgcccctgtttctgagcttccacacacctgacccatatgcacctctgttaggactagagatcacctcatggtccaaagaatagcctcagtattttatgcactcactcgcttgctctagcactcatgcctgaactagcatttgctaggaacctactggactagatgctgggggtagagagctaaagcagagtgggtcttcaaggcaactaccatctctttagggagacaaaacacagaggttattctttggaccatgagatagtcttcagcacccctatgtcctggaggatttgaaggggccatatggtaaaagatatttgtgaaagcaagacaagaggaagacagaaagaaaggcaggggaaggttccctggagcccaccttccctatatacatccatcgtgattaaagcctcatattccagaaacccagagaactctctaatcagaatccacatttccttcactctagcccagtctccagtggcgctagatcccaaagagagagaaagacaggcaagctgagggcggcattctcctagttgctggcatggtgtggtccctcccctgggggaagggggagagcaagctgcaaccctccatctgcctggggttgggggttcccaggccacaatggccaggccataagctccaggttcctgtttttcagaaagatccagtgtgctaccttaagaaggcatttctcctggtacaagacataatggaggacaccatgcgcttcagagataacacccccaatgccatcgccattgtgcagctgcaggaactctctttgaggctgaagagctgcttcaccaaggattatgaagagcatgacaaggtaggaagccctgaggcctggagcactgagtgagggcagagggtggctgtggaggcgccgctctatccacaggcacagagtacattcgctcacctcgcctcacgccattgcttgctcactctcatttatttgtcatcccaccaacctttaccaggcaggaggcaggagggatcatgctgggccctgacaatgtcatcatgagcaacaaatacatggtcccaccccatgcagcttatagtcaagtgagcttggcagctgttaaacaaaccatgacaccagtaaatagaattacaaactataaggactgttcattccaacagcaagcagttattgtgtgtctgttgtgtaccagacactgttctagacaccaggaaacagctgtgatgaaaacagacaaaaatccccacattcctggaacttacatttgggggtgacggtagtggtggtgagacagttaacaaaatatgtaagtaaaatatacaacatgtagcatggcaataacagcactggagaagagtaaaccagggatgagacgacccgaaggaagtggaggagtgagctgggaacaagaacctgaagggctcaaggagagcaacagggaactcagacttccatggagttggggaagcagagacaagaaaggcttctgagtaagcaaatattgatttgagctccaaagatgagtaagaattgaaagcagtaaggctagaagaacattctggaacaggaaaagctatgcacaaagccctaaggtaaacaaacaggaaagtgcacattcagggacccaaagggttatcagcatggccagagcatgggaagtgaaggagggggaggagagaagtcaggagccagatcacatgtggttttagagatgtgggattttgtcttaagggtgagggaagctgttgtgaacaggcatgtggcttaatctcaggttataagactgacctggttgctatgtggaggatagaccacagggggcaggaatggaggctgggagaccagcagaaggtgtgagtccaggctagacacattggcggcttggaccaaggtgggacagtgaaggtggaggcaagtggactggacatgttcccgtgggtttaggggcagaatcaacaagacttggtacgtgcagtggatgtgagaagctgagggaaagaaaaagccaaggatggtttttgtcttgagcacctggatattccaatgatgctgaaacggggatgatccatgggcagagcaggtttgagggaagacagttcagtctggggcacagcagacgtgaggtgctcatgaaatggtgagtggagacgttgaggaggcagctaggtgtgcgggtcttgagtgtgaccagcaatgcacagatctatgaggcatgggggttcggcttatctgtgaagccatgggactggacagcactgccactgtgagaagagaagcaggcccaggaacccagcatttggagggcaagcagaggatgggggacctggcaaggggcagcctgaaggtgggaggaaaagagggagagtgcagagtcgaggcactgcattccaagatggataagggatggagattcataaaaaagcgttgagaaatcaagcaaggtgagggctaaaattgtccattggatttggcaacgtgtcacacatgctggatcagggtgaacagaaagagaggaagtagagacaccactgtggaagaacttggatccgaatgggggcaggaaaagagatgtagctggagggagtgtgtaattgagggagg

SEQ ID NO: 34529 - DNA, 3783 bp, Homo sapiens
cccctagttccatttcccataaacttctgtcaagccagaccatctctaccctgtacttggacaacttaacttttttaaccaaagtgcagtttatgttcacctttgttaaagccaccttgttggtttctgcccatcacctgaacctactgaagttgtgtgaaatcctaattctgtcatctccgtagccctcccagttgtgcctcctgcacattgatgagtgcctgctgttgtctttgcccatgttgttgatgtagctgtgaccctattgttcctcacccctgccccccgccaaccccagctggcccacctcttccccctcccacccaagcccacagccagcccatcaggaagccttcctggcttctccacaaccttctgactgctcttttcagtcatgctcctcctgctcttttgtatttggctaatagtatatcaatttgcacttatttggatgttgttttcatattttttaaaatcttattttatatgtattgtacattccacatccctaagattgtaagccccttgagggcagggactgtcttccacttttttttgtgtttctttttccatcctgggttctactaagagagggcctctccacatttgccaaacatgcaataaatgttgactgactggcttcagggctgactcacggactgaccctggccagctgtctctaactgaccagcctctagctgaccagttaaccagctaactgactgactctgactgactggctgaccagctggctgggtgaatgactaaccaaccaactatcttggtaactgcctaactgaccagctgttgcttggggagcccattgagcaactgactagctgattgcctgactaattggctggttggctgactagctggggtgacccagtcaagtttccagtcacatcctttaccaagtgcaagccagtgccgcagggctctcccatgtgtggagtgacaggtctgggccccttctagagagatagggaatttggcaaatgctcaaaaccaggggaacctatttagacaagaaccagcagtaacaacatatctggaatcctggggtctaccttgtcagtggggtgggctaagatgggtgagtgggtcagctggggcactggcaagactgtgaaatgacccaggcctcctcagaactggttgctggtggctcagtgccacaacacccttcccacgggtcgtctgtccccaaacccctcgccgtggtcttggccctctgtcccacccctctacacgcccaccctcctttccccacttgcttattctcaggcccgtcccaagctttcctcttccccctcaagatttcacttggagagggaatccagggcaggggctacatccagatcccacttggcccggcaggtccagccctaaggtggtctccaggccaggcaccagtggccttggagagattgagtgccagcccctagagtgactgctgctgtgatttgagaagtgagagagagaaacatagaggcagagactgagatagggactcagagccacagaaaatgcagacaccagcacctcagccctaagcagctagaagatggggcagcaggctggaactcgctcactgggtccttctcccctcctgggccctagctgggcctgtggcctggctgtacccagcatggctcatgtccagtttatggttccccttctttccctctagagcatgggaatgggcagggagccagaggctgtggttccatcttccctccttacccagtagggcctatggatgttagggagggaggctccacacaaggtccaaagtcaaactgttggatggggtccaggggatttctgctctgggaacaaagcgtcctgaggatgctgggcaagaggacaaggatgggggtggaaggcgagaggacaaggccctgactcccatggatgatgcgggaggcaaggccctcggcccatccaggaggggctgggttgcttaggggtcgcgtgccaaatgacagtgtgggaatttccttgtcctggcactgcctctagacttttcctctctggcccaagttgttcctcttcagctagctctgccctactgtcttgaacatcatatgtgatgcccctctgatgaaatgaaagattcttctttgctagtgttagcaggaatcaccctttgttcactggaccaaggccaatgagatgacctcgcctgaggaggggtccaaagacattcaagtgcccgcttcgctccttgtcagagccctctgcttgagcagtaacccctcttcccagccctgcccagacctctcccgggccccgttatcttccactgaggccctgattccccaggaggaggtaggaggtgaggccagttgggccagaggcctgggctggtgccagagaaagctgcctggtctctctgtggtgtctggaaaggccagggaagggaggaaaggaagtcctgcctgcagcaccgccagcagcccacaggaatgccacacctcccaatccatgtcctcaacgaccctccccgcattcccactctgctgactagcctttccttctctcccacagctggacgcacagaacagtctctccgtgggaggagacattatggggcgtccaccaccacccctccctggccatcctcctggaatgtggtctgccctccaccagagctcctgcctgccaggactggaccagagcagccaggctggggcccctctgtctcaacccgcagacccttgactgaatgagagaggccagaggatgctccccatgctgccactatttattgtgagccctggaggctcccatgtgcttgaggaaggctggtgagcccggctcaggaccctcttccctcaggggctgcaccctcctctcactcccttccatgccggaacccaggccagggacccaccggcctgtggtttgtgggaaagcagggtggacgctgaggagtgaaagaaccctgcacccagagggcctgcctggtgccaaggtatcccagcctggacaggcatggacctgtctccagagagaggagcctgaagttcgtggggcgggacagcgtcggcctgatttcccgtaaaggtgtgcagcctgagagacgggaagaggaggcctctggacctgctggtctgcactgacagcctgaagggtctacaccctcggctcacctaagtgccctgtgctggttgccaggcgcagaggggaggccagccctgccctcaggacctgcctgacctgccagtgatgccaagagggggatcaagcactggcctctgcccctcctccttccagcacctgccagagcttctccaggaggccaagcagaggctcccctcatgaaggaagccattgcactgtgaacactgtacctgcctgctgaacagcctgcccccgtccatccatgagccagcatccgtccgtcctccactctccagcctctccccagcctcctgcactgagctggcctcaccagtcgactgagggagcccctcagccctgaccttctcctgacctggcctttgactccccggagtggagtggggtgggagaacctcctgggccgccagccagagccggtctttaggctgtgttgttcgcccaggtttctgcatcttgcactttgacattcccaagagggaagggactagtgggagagagcaagggaggggagggcacagacagagaggctacagggcgagctctgactgaagatgggcctttgaaatataggtatgcacctgaggttgggggagggtctgcactcccaaaccccagcgcagtgtcctttccctg

SEQ ID NO: 34530 - DNA, 1330 bp, Homo sapiens
actgtgagattttgtttttatacttggaagtggtgaattattttatataaagtcatttaaatatctatttaaaagataggaagctgcttatatatttaataataaaagaagtgcacaagctgccatgtgagtcgtgggaaagttgcttttggggtgtgggtggcaaacatcagggtgggtgggcagcagttgccggatgaaccccagctcagagaacctttttccacaaaacacaggggaggaaggttctctccaagtttcagtcttggtaccaaaacctcctgtattattgctgtcccaaacacattcatctgcatatctgctcgtattgggcagaaagtggccaaacatcaggcctggtcactggcccctgctcctgcccagcctagcccagcctgggaaaatggctggttgggctctgtccaagggccccggcggcctgcaaggataaggctccttgactgctgagccctgctgaccagggcagaggttgctggctaggtccttgcagactctgaggtgaatgaattctgtttccaggctgggaagtgagtgtggttagcaggggagagccaggagtccgtgtaagggccctcgttcgggctcgaccttcctactggagctggagaggagactgagggtgtggctttccatggggagaggggtgttaggcagggccagaggagttgaaggcccaaacatacaccctgggcaaagctatgacaagaggggcctccccatccctgagggagtggtagacagctttggattagtggttcccaacactggcttccgggagaatcacctggattgtttaaaaaaaatactgatccccgagccccaccctagatcaacaaaatcgaatcttaggggtgaggctcaggcaccagatgtcagaacttttaaaagacatctcaggtgattccaatgtgatccaggataagaagtatctagagctgcactgtcaggtagggtggctatttaagtttaaattaattagaatgaaataaaagtaaacattcagttccttacctgtactatccacatgtcaagggctcagtaactacatgtggctaccatgttggacagcacagaaatacaacatttgcatcattccagaaattctactggacagtgctaccccaaagattaggtccttggacttagggaccaaggatacagggccaagattggcatcaagcacatttgaccaggggctaggtgttcaggtgtctcagtcacccctttctgtgccctcacccctgccaccctgtcccttgtcatttcccttaagatggctcttccctttctatcaaaagagctacagaaa

SEQ ID NO: 34531 - DNA, 3199 bp, Homo sapiens
gggctgattacttgaggtcaggagttcaagaccagcctgaccaacatggtggaaccccatctctactaaaaatacaaaaattagccgggcatagtggtgcacgcctgtaacctcagctgcttgggaggctgaggcaggagaatcacttgaacccgggaggcagaagttgcagtgagccgagatcgtgccactgcactccagcctgggcaacagagcaagactccgtctcaaaaaaaaaaaggaagagtgcaaaccaggtatacctggactgcagttcaaataaaatgacaaacccaaaagcactttgtgggctccaaagggctgcccctgaatcaagtgtgtattgatactgtgcctgccagctggtccaacagtgcccaagccaaacagagagctcccctctgggcaagccctgggcaccagcatgctaccagggcctggctgttctcagaggaaggtggcagagctgggtgcttcccacagggatgagtagttagagatcttgttgctcaggtatttctggctgacaagaagagccaggtaggagactggagtggaaagtggccttgggttgctacgggtgccggtgagcaggcagggtcaggaactctggcttggactatataagcagaggccacggccaaaccccaaaccactatccggccagaggcaggaaagtgaatcagaggagacgaggaagaagcctgaggttaacctcgtgcagactgtgggccgtggcaagaaaggagttggtgacaggactagatgcagggcctgggtgggtgtccaaagaccccttgaataaggcactaaagtcatttggtgaaggcagtggccagggagccctgaagaaaaaaagccacatttcccagtgagcacatgtcccctgccccagtgaaagcctcctctgccagagcagcacttttgtttgctggtttccctcttcaggctctaggattaggggagtgaccaggctctgctcctgaatgctgggactgctgagggagcaagtggaccacactagcttggaaagccccatggtgaagcggctggaccacaggaaagcccacaggttgacccccatggcaccatctagagtccatactgactcagctccactactgggtggctgagtcagaagaggctatggatcggggcagtggagaaggctgggtcaggcagttgtcgagtgaattcctggaggagggctaggggagaaccctaagttggactttagcctctctggtccacaggccccatccctgctctgaagtcttggacaccttcccccagccactctgctattttgtcctcttcatgtgtgtgcatctagtgaggtctgtgaaggcaagagcctcatccttatttattcatttacttccccattgattgccacacactgaggacaaaatggtaaataagagtcagtgaaggagacaggtattagtaaaacaatcacacaagtaaatatctagtcataaagtatgaatagaattaggaagatacctaacagggaacctgaccagggatgctggactctgcaggccttcaggaagattaagacaaaggaagccacataagggttacaggcagtgaggcatggtctgttcctcttccttgtccaagactgtcaacaagatcaaatggaaggctatttactatttactggtatgtatggggcactctgtaaaaatgcaatcacattctattctacaatagccctgtaagcaaggtgctaatatcctcatctgtagatgtagaaactaaggcttagagaaacttaactcagccaaggtcacagcagctggcaagtagcaatgcctggatttgaagccagatctggctgttttcaaatacagcatcataacatcacactctagcagacatttaacaaatgcttcttgcacaaaatggacagctcgtgccagcttggtgggctttgagggtccccagggccttagaattctccttcttcctcccctcaaaaggattgtgtagtctgaaactgggcaaaaggtgcttatgacagactcctgttttctcagtcttgctgctatccctaaatccaccaggaaagaagagggacctctcctgggtggtgtgtccactgcctgggcctctgaaaaaggcctctcttgactgtcagtccctccttctggcttctcttggcttgagtcctttgtgacccatgtgtttccttcctgcccaccctttggacctatcccaaccacctggttaattattgagccaggtgacacctggccgttgatcactccagctggcagcagctttgtcatcattcttattttgcctgattacgatttcccggaagaaagggctagaaatttgttctcccacacccagccagatctccaggggaggttgtccaggcctgggctggggttgcatgggcaaggctggatcaggaccaccaagtgtgacatctgcaggctcaatatgctctagtgattctggggagacaggccaaagactaggggctgaggaatctcacgggtaggagcagggccctcacctggcctgtgatatttgggggatcttccaagaggtgtgactatcagagggcactattggtacgctttccatgttggttttcctgaaaagagctccatgcccacatgcaggaaactgtctctgtctactctcctgaagaagagtttcaagtttgaagctctttgggtatttgggcccaagtcctctgctatgttcagagtatttctctgtattaacaacaacaacaacaacaaatcctggggaagggggtaaaaatgtgactttcagaggtgatgcattatattattttaaatgtctagcttccaacaacaacaacaaacgtgaggcatgtaaagatacagagagtattccctatacacaggggggaaaaaacaatcaatagaaactgcttctgaggaagccccaacattagatttactagacaaatattttaaatgaggtattccaaagtgttcaaagactaaaagaaaacatgtataaagaactaaaagaagatataagaatgtctcaccaaatagaaaatatcaataaagataagaacatatagacaaggaacgcctataatcctagcaatttgggaggctaaggcaggtggatcatgaggtcaagagatcaagaccatcctggccaacatggtgaaaccctgtctctactaaaaatacaaaaa

SEQ ID NO: 34532 - DNA, 1055 bp, Homo sapiens
gctcctctccgtcttgccatgtttcctgtttagaactttcaggcatcccgtggcatttacagaaggctctgggttcacacaggcgaaattccctcacaatggatctttactctggaattttcccgtcccaaggcctgccactcctgcagccttagaaggcacttcctccctggtcccatgctccctgcgaagttctctactttccaggagcgtggcttacagcttcctcctttgggcacccagttcctaatgaaactgaacctttcagtcctgcctgcctgggcaccctcctctcttcatcttactgcaggacaagtgtgtccatgaggccgagttaatagcgtccatgaagtgaaatgaaatcgttacttcaagcctcaagcctcaccagggagtttcttagacttttcaatctggcaggttggcataaccctgtgtaagaggattcttcacctagtacagtaagttctgggcagcgcattgttccaaagattagaattctgatctcaggggtgacctctcttggctttattacagaaaaatcacacttcaacatctcaggtggtagcactgctgtgttgacattcacattctttcatgttaaaaaaagtccccagattttcattcttaattgtccagtgtgttattataagaaaagttgcttagaatttcctctattatttggcacctgagtcattttcaagtttcacttttttacacagtatgaaacagattgatttttttttgtttgcttaatttttggtttatttacttccttgtagataagcttccaaaaacagaataaatactccaaaagatatgagcatttttactgcctttgatgcatatccttttattgtttaagagattgcacaagttcacattatcaccagcaacatataagtacctgtttccccacagttctgttaacatgggatttattacttttactagctttttgctagtctaatagttctagaatgatatgttaaagttgtttaaatgggcttctctttattactttcaaggctgtatttttttatgtgataattgtt

SEQ ID NO: 34533 - DNA, 1812 bp, Homo sapiens
gagttggagaccaccctagccaacatggtgagactccgtctctactaaaaatacaaaaaaaattagcagggcgtggtggtagtcccagctactcgggaggctaaggcaggagaatcgcttgtacctgggaggcaaaggttgcagtgagccgagatggtgccactgcacaccagcctaggcaacaggagactctgtcaaaaaaaaaaaaaaaaattagaatttgggtagctttggaggagatagtttgggtgtggaacggagtgagggggacctctagtcattgtcatggtgatactaaccatcaaatactgagcctacactccaaacacatcatttcattaatcctcacaataaatcctaacgtcagtggtatcaccccaattgtcaaaaggaggaaaccaaacctcagaaaacatttttgagtttcaaggtcacagagctagtaagtggttgagctgggttcaaacccaaactcatttgatttcaaagcatgtgctccaattttaacttttattatcttattctgaataatctgggagctgagaatattctggaaataaaatccaggttagagacctgccaagagcctagacagtgagttaagctgggctaaggcactgagtaaactcagaaatgtctgtttgtcatctccctgtgcttactgctcctgttgttaaagatgtcttagcatcttaaacaactgagcttgtgctgaaccagtgaactacattgggtgtgggagctggtccttgggggaaaaaaatctctccctgcacccatatgtttagaagcagaaagttacccgtgattttaagaaagctgccttttaggagactgccctgggcctggcttatcacatgaatacagaatactggtttgcatttcaccagcctacatcagatgtttgttttagcataccatacattcttaaagcatgcgggacaaggagatgcactccaggaagggccctttcaaagtttcgactggctgtaacctcttttgacctttgctctagtgcacaggctcatcctagtcaaagacttgtcttcagcattacaaaatttagaaaccaactctgaattcacatgcattgtttgccaatgtttttcaagtcttctcacttccagctggatggtcttaaatgtactctgacccacacagtttcaggcaagttgcagagcgctttgtaggtatccgataagtatgccctgaattgagaggctaattaaacaagaggaatttagcaatatcacctcttggcgtgagtattatgtagcatctgtagtcgggaggggtggaggggttgtagagcaggggtgacttctttaaaacctctcagtttgcatatatgcctcccctacgaaaagtcctgctggtaataaacataatctgccctgtgtgttcccaccacaggggggacatatagcatgaataagaactggcttcccttagagagcttttccaaaggacaccatctatttactcagcaaatatttactgagcaaaatgggaggagaagggcattctggggagagagaagagtttgaacaaagctaaaaaggagggaaaaccaggagtatgtatgggatacactgaatagtcaaattcaggtgataaaatctgaaaggtaggagggaactgataagtagagctttgaatgcgtggcaaggagtttggacttactgaaacaggcaaaagggagccaaagaagattttgagcaagtgataaacataataaaaaatgcttattaggcaagttaatatgccagcagttcctaaattggactgggttgaagaataacaatataaagc

SEQ ID NO: 34534 - DNA, 697 bp, Homo sapiens
gcgagtcttcttgctggtagggagtccccaggtagttcggggcaccccatggtgagaggctgagcaagctaattaactaattaattaaccatttaatccattaatccatgaatgaattaatacacaaatgagggcactgttcacatcaaatgtttgagagttttttttgttttttttttttcttttttctgtgtctaaagggtttttatttaagagcctgtagtgctgagttccaccaaggatttggaaggtcactctcagcagcagccacttctgccaggaccagtggtgagcacctggcagggccttgctgtttccacataaggcaaaggaatccagcttttctgtaggatttttgctgcagctgttcaaaaccttgtgtgagccagcagttccagttcaaaggttaagagggcgcatagcacctaggtggccaggttcctgtaagtcaccactcaggccataagtcaccacggaggggagagacaaagcagccacagctgttctgtttccagtcccacccctctggcaaacagatggggggaaatggagaagaaaagttcacaaagtcggtgaaatggccaggcacggtggctcacacctgtaatcccagcactttgggaggccaaggcaggtggatcaccggaggtcaggagtttgagaccagcctggccaacatgatgaaaccccatctcta

SEQ ID NO: 34535 - DNA, 1262 bp, Homo sapiens
gcaaaactgtctcaggaaaaaaaaaaattaaattaaaatttaatttgaattattcagcaacataaggtaatacacactcattgcagaatttttgaaaaaggaagcaagcaaaaatgagaaaataaaaatgatctgtaatctcaccacatagaggaaatatgcattttggtgtttacctttcagttattttttctttatataaatatataatttcatgtttaccaaaaaattgggtcacaccgtgatgctgttttcaaaactgctttctttcagctaccaatattatcatgaacaactttccatgtcattaaatatccttctgccaggctacacagtatggccttctatgactgtacggtatttttagtcacttactgctgaacttttcttttgctgttgtaagtgtaacatagcgattaattgaacatttagtgtggcataataacatgattgagaaatcagccatatctggttttcttggctgtggactcttcagaaaagaatgtgaagcattttctccacatcctgccaagggggcagccagggcttcaagtccaggatgtcaaagaggttggaaggtggtttttccattgaaaagcagagtagccttacctgtgggcagtgacttccagcaccaggaaagagggtgggagatcacgagtgtccacaagtggcagcagttgagatccaactggaactcttccctccaccctggggatggcacaacctgaggtagagctgggggtgagggggcttgaagaaagcccactaagtagcttgctgctgggagagaccactgtgagtgggcagctccccagcctgcctggagaagcagtacccacagacagggaggacctgcctacagtctgaggggcagccattagcagtggcgagctccactgaatcccaaccagctgctccagtcctgcaagaacgaactctttgtttatttgggggtttttgttttgttttattttttgtaaaatccaatgagccaagagaggaagccctaaaaatgatattagacttttcacccactgtggatgggatttgggaccagatttaaataaatgtgggaaaataaaaaatactggcatgtctttcccatcaagtgtcgtgaagctattccttcctcattaatacgcaaatatgcaacaccatgaggagcattcatgtgttcatccatgatcactggttgttcatttcatacttctccttggacccctaagggatggcagagtctgttgagtcagccaactcca

SEQ ID NO: 34536 - DNA, 1411 bp, Homo sapiens
ccgcaccaccagcagccgaccactctcctctggctccagcaaaccagccacaggccgggcccttcagggcaaaggggcaagaccctgagcacctgagctttgggagatggcagcttctgtctgttccactccatcagccccagagcctttccagtcaagacaaatcctctactagcccccagcaggcatcctgaaggagtacccaccaggatatcaaaccatcctggccacctgtgtctctgcgattccaggactatttccagtcctagaggcaggttgcaggttatgggtagagaggcaggcctgggagaggcaaagacaggcagtgtcctcccttatcccagaagctgacacttacatctcaccagcccactcaccattgccctgggggagcacatctgccagggaagcagtatcccagaagcttctaaaagacttggggctacttcaagggtgggtcagcatctctgaactcgggagagagactgctcttccttccctagcatggggctagacacagcctcagaagcagggagaggaagcatgccacacactctggaagaccgctcagggtggggcacatggagacagcaaggagagggtgtgccctctcagacagtactgggaaccttgattttctgacaaagctctgctatggactctaagccccatgaggacaggaactgtgtctgtcttgtttactgtgggatccctggcgctcagcacagctcccgagacaaagctgatgctcagtaaataactgactgggcagaggccaaagtccaaggccagtttcacaatttctacttttttggtaaactcttcaccatccccacctccatcctccccgctcccatatacacacttaagagcaggaaaaaacatacaaagtagcacaaacagtcatcagaacagatttcttgaacattgtttacaattggtggatgccttctcagtatgaactttaatgtgtggcagctttgggaactgaagtaagatacatcaggatctctggtccaacctagaaaaaaagcatgtgaggaagttccaaggggctgctggtcacacagccagaccccggggccaggttgggccaggaaagcagcaatttctcatggctggggcagtgtcagccctcccttttgaggaaacacatccacatgtcaacaagtactcaaaaccagcaatgacaatcctttcctgcagcagacgggtttctgcttattcctgtcattccgggaagcggagcgaagagagaattccaaattctcaacaatagctcctttgccctccatggttagcctggacccacatcttagtaccttacatttgcacaatatttgcaacttgttcaaagcttttgcatatttatgatcttactggattaggtcattacaagccccagatggag

SEQ ID NO: 34537 - DNA, 2670 bp, Homo sapiens
gggcactgggaagactggaattgctcagcacagcagaggagaatctggcttcccagagtctatcaaggaaggaaggatgaggtgcagagatgggaagggaggaacaggaggaagctagattagatggcaatgggctagggagcgtggtgggatcttgtggccattgagaaatccccgggtggtaagacagccaaaataacttttcagaacatttcagaaatgtgttcttaaattgtttgctgtgtgatgtaatctctcccctgtgacccacaaacctttattaaaagttttactacatgttacagccttattttgtagttgtttagcatggggtgggggttgaaaggagaagcggctgaattgaccccaggagctacagaaacagtcacaagaccagaatagtgaataaaatgccagacaaggcaaaaaaactagagccagaggtgaccatgaaaatccaagtcctcccagtaatggactttccacaggacatggtaattggagccaatgtcatttgaatctcaaaggacaagctacctcagctgacattaggatacaagcaggttttgcctctccagctgaactaagccttgcaaaacataaaatgcgtcacatgtccttttgccagcagggcctcagcacaggcactgcacatagtaggcccagtaaaagggtgtgagcagtccatgaatgtcctggatgcccactgagagctggaagggtctaatgctttggtggagcaaggaccggaaggccattctggctggggacttctccatcagctctcctggtctccaccctcatacccatcagccctatcccaatgagggttttgtaaacaggcaaggcccagtcggagatggtggtggaggaagtcacaaagcgttgtgcagaaaccagactactctgagtcagttctgccccctatgaagtcaaaaagacaggcacggccccttgggaaggagctttaatccaaagggcctggggctgggccagtgagtgagtgggctgtctcgagccccggacatttcctaggaatcgctgtaggatgtgtcgtgtggggctctggtctttgctcccaaacacccctttcatgcgcctctgaggccttgccaggaaccccgcagcccaaagaccctccgttccgcagcatcgttgcatgaacctcgcgctgctcccagggctgatggtgccacctggtggcacaaagggtcctgctcaccctgggaacttcgctctcgagcgggagaggaacggcttctgtggcccagcccagcgtggtgacgtcacgacagagtgccctttctccccgcctcttccccctcccgggagctgccagtacttgacgtggcgtcaccgccctctaccctcgctttgcgtgcgtgtttgcgtacagcggaggtggcggcgcgggcaggtcggagctcggagctgctgttctggttctcttgtggccgccgtcgctgtccggctgccttgggctgccgaacagacaaggcgtgggccacagcacctcagaagccgacgcagctcgacgcaggggccggcaggagggtgggcgatcgcgtgtcggagggcgccgcgcgggcaggcgggcgggcgccagagggggaaagaggcgggggcggcgggtcagccgctggccgggccggccggggaatgtcgatgcctgacgcgatgccgctgcccggggtcggggaggagctgaagcaggccaaggagatcgaggacgccgagaagtactccttcatggccaccgtcaccaaggcgcccaagaaggtgcgggggctctgggtggcggcgggggctcgggctccggcctcgcggaagggacgcgagcaagcccgggctctggctagtttgggacttctgggggtgactggggacggcggaggtgatgtagggggtggcggctgtgcggccccaggcctctcccgggctgaaaggccgcctctgacctcgctttcctttgtccctcggcccaagtcctccgggatcgttttgaaacccgacagggccaggccttaaatttgcgactgacttttcctggatgaagggcctcgaagacgagagtgggagggggtgaaccaactcagctgacccttgtgaccagtccgggggcatggggtgtacagaaaatctcccttcaggtgagtgggtaaatctggcagaacttccatcaaatctttgggagcagtggccgctttatccaacaactgcgtgatagctgggaggcaagagaaaagaatgcgtgaagctagctctgatatacaggtgaaagcgatgagggtaacatgaaactgaaaatctatgattttcactttctacagcattccaattacttcgaaatatgtaagaaattgacatttggaggttggtgacagcagacactgtcatggatacaggtggatcctagagtcatgtgaatagatcacttaggcatccctggagaaaggagcttgggtgggttggagtagtgggtggtaagggaagattgctcactcttgactgtacttttgaggcagaacaagtttgatctattgtgctgtaggttgactcaaaggacacccttcgaattctctcataaatggcaacctttggagattttagtctgactagctctccgagtggtggaattgggatccttattgctttctcatcatttactgc

SEQ ID NO: 34538 - DNA, 1604 bp, Homo sapiens
tatttttacaggaccatgtgaaagtatgcatgtgtatgtgtatatatatagagagagaaaaaacctattatggaaaacggaaagatttattctaggtggagagtacaggtgtttattatactatgcttttgaatttttttatgtgctgaaaatgattataataaagttggaaaagtaaagtacaacaatggtgctagcgagtggggatggagggtagggggtgggagaggagactttaatgttgtcactaaagtagtgggtatgttccaggaaccaggatttcttcagtcacctgtactgatttttttttttaaacctagaattgatgataaatcaatatcgggagaaacagagatgactggcatgtgtttatataatattggtggtgggactgagaaaagaagtatggacaggtcaggcaactaggtaggtagtagatagctaaataggcattgaaacagtctgggtgtgtgttacattctgttgcaaattgtggtgttcaaaagattgggaagcccttttctgtcctacttactgccttttttctaacttcttatgtttacttctagttggcagttgcaggcctcgattactcattgactggagcactttaggagataatagtgaagtgaagtcagtgaagtgtttagtcttacaggaagagaggggagtagctcacaagggtcaaactactctttggcagagtttttcaagctgtgtgttccttaccttttaagtgactcagcagtttggggcctggtattgcctcacctcttctcgccgcgagcattgacagaagatctagttgagtcctactttgaaaggagtattgcttctgactgtggaattggattctagctgtgtgtgtgttatatcctgttactgttgagacacagaggcgggagtcggcgggggaagatatgtgctgagattagtcagcctgccctccctctcccccaagaaactcaggccccatctggggagagtgagaacttaagaaacttgagacagggaaggagagccgggagcagccaaaacctgctaagtctcagaagactggtttctgcacaagggaatggaagaagtgactggaggtggctgtggattcaactctggcctgagattgattcccttgagataagttgttttctggtgggtgtgtctgggagcattgtgttgggaagggaattcctttctttgggaaacacttttttttttacttgaagtgaaaggtattcagacttgtgtatttcttgtaccaaggagtgggtgtttattgataactgtttctttgggttcatctgaagtgggaatcagactggtaaatatcaagaaaaactgggcatggtggtgtgggcctatagtcctagctactcaggaggtgggaagattgtttgagcccagcagtttgcagccagcctggcaaacatagtgagaccctgtctctttaaaaagagagagaacgtaaggaagtaaaggtgttacacctgttttggctgtctgccatattctcttcctttcctctgaaaaaggagtgggtgagggtagaatctgtagaagaaaaaataaattaaccagaaaatatgtgtgaaaaagggattaga

SEQ ID NO: 34539 - DNA, 2031 bp, Homo sapiens
ccctcaacatcttagcaccctgtcctgctttcagcaataatcctgttaggtcagtttagcaagaaacttcttatccttgatgtttctcttagtagttttccgtccactgaccctcatcctgctctttggttataaatccccactatatcttgttggagtcagagttgagtctaattcctcttcttcactgcaagatctggttgtagtggtccctgtaactatcaccatgggctctcttacataaagtctgccttaccatctttaattagtgccatgaacaaattttcctttaacacttttcagcatttatttctctatatttgtctattgtttgtctgacccaccaagcactgttatgtaccgtgactgcagacacttgttcctcattttatcccactgcttggtgcacaggagacatttattaaatgtttgttgaatgaatgaatgacaagcacttgtcacaacggtaactctgtgaagactaggatcctatccattttgttcattacaaaattccgcctaagccttgaacaaggctatgagttataagtgcaaagcgatttagaggaaggaggggtaactaaactgactgaagaagctaagggaagcctcacagataaaattacatctaaactgaaactgaaaggaaggtggaaaactaaaaagatcaacaagggaaggactgcagacagaatatcgcgaggtattggtcagccaagatggcttctaacactggccgccacacttaatatggcggccagggaaatttcctggagaaaatcacgcgagagttgcatcacggcggctgtgcgcgagttaagctgggggtgtggagcagccaagatggagccggcagtcggcggtccgggcccactgatcgtgaacaacaaacagccccagcccccgccacctccgccgccggcagccgcacagccaccacccggggcaccgcgggccgccgcgggcctcctgcctgggggcaaagcccgcgagttcaaccgcaaccagcgcaaagactcagaggtcaggagcttcggggggcgaggctcgcaccgggtcgggcggcgccgggggtcccgggcccggggccactctaggggccaggttgggcttcccggagggctcggtagagtccggccgagaactgtcactatacagcgaaaggagcaggaagcgaggctggcagctcctggggtctggagcatgagtccttgctctagctccgccgcccgggagagcttcccgtggccggcgactgctggtttgctcccctgggccccgactgtgggcgtggcctcgaggccctagcccctggggaagccgctctcgccccagctcgggggtgaggagtcgggggtcttggtgcactccagggcgctgggctgccgcgcccccaacctaatcatctcgggcgtctgtccctggcacgcgggctccagctcctgggtcctgccgctcgcagaggaaggcgcgtgtgggcagggaaggcgccggcgaggatctggaaggaacttagagccggaccgagctaattatcattgagagtagagtaggagggggaaacatgtcctgttcttctgacctgagccagatcaggccatgggttaacagtacctgtggtgggctattgtgcccagtgcgcctgatactgaactgttaaagatgagaaatagacattttaagcatgcgttaggacccaacattccttcctgtctcgctagtgagccgttcctgccgttctggagatggcatagtctggaactgactagtaacctcaccccaagttaaggaattcctcccactgcctccttttgcagaattcatgaatgaagatactcatgtcgcggagttttagggcttcttaatgagcaggttcccagagcacttactatgccatctcctagattgatcagcagccaaactgatcagccaagttaatgagagggaattcctagttgtccaagcataatgtaccaattcataccaaagagcaatgatactacctttagacctgtggaatcagttcctcag

SEQ ID NO: 34540 - DNA, 584 bp, Homo sapiens
tgctggtggcttacccaggcaattatgtttccagcaccacagtgttgcagagcatgaagctgggggtggatgtaaaccgccacaaagaggtcattgttaaggccatttctgctgtcctgctgctgctgctcaagcactttaagttgaaccatgtctaccaggtacccacagggctttccctcctgtcctgtgggctggggcctcgggcactgctgctcctccagcccacaagaacgggggccttggcctttgacccacttgaactctgcatgaatgttctaagacatggcccttcagccaaggcctttcatccctggaggaaagagggcaaggtcccaagggccgcgcctttttttttttttttttttcctgttggcttcagtttgaatacatggcccagcacctggtgtttgccaactgcattcctttgatcctaaagttcttcaatcaaaacatcatgtcctacatcactgccaagaacaggtgatgagggccagggaccatgaaggggtggatatggtcagacggcagagttcccagctggtatttcccactgtgtccatttttccagcacctacgagcca

SEQ ID NO: 34541 - DNA, 490 bp, Homo sapiens
ttctggggtacctggcccactccatcttcttctgtgatctgtcttggattgtaagccctactgaagggaccagctggactgccttatgtgttctatgtgaccatccagctacagctggttggaccagaatcagatcctgtctcaatgttgaacaatctattggctggtcagcagccaatcagattcaccctcttgagaatttcaagtatgtgttgcacagccagaatgcaatcagagctcaaaggttactgagggttgggaactttacctacaatcaatgctgtaaacaggctgaagtcattaagaggcagagatgcttcttgaacaagctgcagagagaaaaatggcccaaatgtatgaacagatgagaccatagagacaccatagaggccccagagaaagagaatcaaagagagggactataagtcatttcaaagagggcttggatggctatgaaaccagagctcttaaggttataataagattgaaa

SEQ ID NO: 34542 - DNA, 4343 bp, Homo sapiens
cacacacacatacacatcacaggcaatattttggctgttactcttaatggaatctaggccttttccatctaaccataaaacttactagcactcttggctccaggcagatttccagtccccctaggcaagcctttgtactatagccagctgcaggcagtagcttccatcaagctccctggtatttgaagtggcaagccactaaacttggcatgcctctggtgcatgttcacacagactgggtgtctgtttatctccctgaattatttctctcaaatcttgtgctccctcaacccctatcttgaagtttggaaaactactgatttggtcattatctttttctttgatcagtgagtcaccttagcaggtctatttaggttaaaaagtcactctggtgcctggtttattatctcgattggttattacattgagtaatcagataatggcttaacttcaatttccatttgtggtctattaatataaccttgaaacagatttaaacccagctataactttttatttcatgcttttacaaataatgtgttcatgtgttttttatcctccagcatccagatttttatctttaaataccatctcccactaaaaggaaccagagctctctggagaaatggctgattccacaactggggcaggaaatgtatcaggtaagtctggaagaaaataatggagaaaagaagagtgggaagagtgatgcagatgaaacaagattgacatgatttgataattgctgaaatagggtgttgggtacacatgggagttctttaaagtattcttttatatattttaaactttttccataaaaatagtttaaggaaagttaaaaatgttattttttaaactgaaggagtaatagcgccctttgtagaaacaaaagatttctacaaagaaaagtaaagtctccctcctactccagaccctcgcacacctcttcagggcaatcctagtaacaatttcccgtgtatttgtcaagaaagtttccatgaaaatatattttttaaatgtacatactcataaatacaaacatttttaaaaccacaaatggtagcgtattatacacattattttatgccttatgaagttttatttcccattttaatacaatgaagatgtctacacattacaatattgtggatttttatgctttacaattgagcttcttccttcgagtttctttgatctaatcaagagatagaaggcctccagcttcacattcctcacgattatttacaaaaagaaggatggctcagccaaggctaaatttaggttacagtccctaatcttaacacagtttttaagtttaggtttcagcttttgggatattattgttaccttgaaaaatgtcacgtttaaaaacacctcacaccctctactatagattggatcttgggaaatagggttgaggaccggatcaatacaagaatcctcataacctccgccccggcgcgaacctgggagggctgcagacagtctaaaggctgtggtgacctcagcgctgcgtccctccagcaaccggcgagtgctggggcacaggccatacccccctaagctcggcatcgcctgcacctctcacaggtgctctgtccgccacagtaacgcactatggaaaggaaagttgtacggcgaacgactgaaggagccaaacgaggtggatctggagcggccgcaaggtgcctgtgctgctggcttttaacacacaataagagtgccaagggatacaagaagccacagggggaaaaacaagtgacatatctgcatggagcctaaatttcgcttggtgattttcagggtagaagcattacatattaaaaacactgctattttaggggaatacagaatttaaaaatccacacagattcgcaacataaaacatgccgcccaaagacacgtccgcggtgtcccgacagttccggctccgcccgcgggccacgaggcggggagcgacggtcactcccctcggttacccggagtacttgggcgggaacgggtagctcgcgggagagacgggctcctgggcgagggctgcgtcttagtcgccctgcttcttagctctcgaggtcccgcgtgttacgtgttagcaccgcccgggggcgtcagcatgacccgaggctgcaggaaccgtgaactctctgccccgcgggcccaggtgaccgcgggcggcgctctcccgcgcgcggggggcggggctccccccggctgttcactcagctaccacagcgacgtaaaatggtgtccgctaggcgtcccaggacggcttcctgagggactggagggccccgacagccggaaagcctgccccgccccttggccggcacaggtacgacggcggggagctcagaagtttcgaactccaagggccgaagcacagccaaacaccccacggaacttaacaaatgtttgtggggagaacgccgaaaacgcggggaggcggggctggcgcacagtcaccctctcgcgacatctaagtgacgtcgcacagcaagcacgtgttctagtctttcaccttcagtcagcctcctccgttatacaggcctacccctttaagcgagtgatggacagttatttcagcctatcaacttccttgccgacatccaatcagatttaaacttcttttagccgccggaggagttggaaaaagggggtcgaaagagggagcttaccgtctctcgcgatatcgctgtgagcctgcctctctggaaaaaacgccgaaactgatggcccgacctcccaaatagtggtttaaaggacgggtttataagccaatgaaagggataaggaggtgggttgctgctgtcactgagcaagaagtaccgttacagggcagactttttgtccaatcaacacctcaacactttgggtcacgtgaccgcagagtgcgaggggcggagctacagtctggcgcgaggaaccgttaagatagacaacaaatgtaaccaatgaggtactccgactagggggttgggaacccaataacagtggttgggcgggcgccttcctggagcgcggggagatgtaaagatagacaaataattttcccaatgagactgtagaagagagagcaattggccaatgaggactgcggggcgggaccctgtgccgcggcggagtccaagatggcggcgtgcggttccgctgtgtgaaacgagcgcggggcggcgggttactcagctccgcggagacgacctccgacgacccgcaacaatgaagggaaaagagcgctcgccagtgaaggccaaacgctcccgtggtggtgaggactcgacttcccgcggtgagcggagcaagaagttagggggctctggtggcagcaatgggagcagcagcggaaagaccgatagcggcggtgggtcgcggcggagtctccacctggacaagtccagcagtcgaggtggcagccgcgagtatgataccggtgggggcagctccagtagccgcttgcatagttatagctccccgagcaccaaaaattcttcgggcgggggcgaatcgcgcagcagctcccggggtggaggcggggagtcacgttcctctggggccgcctcctcagctcccggcggcggggacggcgcggaatacaagactctgaagataagcgagttggggtcccagcttagtgacgaagcggtggaggacggcctgtttcatgagttcaaacgcttcggtgatgtaagtgtgaaaatcagtcatctgtcgggttctggcagcggggatgagcgggtagcctttgtgaacttccggcggccagaggacgcgcgggcggccaagcatgccagaggccgcctggtgctctatgaccggcctctgaagatagaagctgtgtatgtgagccggcgccgcagccgctcccctttagacaaagatacttatcctccatcagccagtgtggtcggggcctctgtaggtggtcaccggcacccccctggaggtggtggaggccagagatcactttcccctggtggcgctgctttgggatacagagactaccggctgcagcagttggctcttggccgcctgccccctccacctccgccaccattgcctcgagacctggagagagaaagagactacccgttctatgagagagtgcgccctgcatacagtcttgagccaagggtgggagctggagcaggtgctgctcctttcagagaagtggatgagatttcacccgaggatgatcagcgagctaaccggacgctcttcttgggcaacctagacatcactgtaacggagagtgatttaagaagggcgtttgatcgctttggagtcatcacagaagtagatatcaagaggccttctcgcggccagactagtacttacggctttctcaa

SEQ ID NO: 34543 - DNA, 1225 bp, Homo sapiens
cttagatcttattctcttgtacttctctggtaagtgaaaattggaaggacattttgaaagtctgcatggattataaaatcttgttgtagcgaagtctgattcttctttccattataaagtactatactactgatcagtttttttagtctctctactctcttagccaagcaagatgagttcgtctgttggggcacatacatttgttttcacctgggcagacacccattatttgtagaacctaagacacctgccagttggtgagtcatcttattgctatggcttcagaggactgctgtacagctggagtatttaggcttgaaattgtttgattaggtatgataagcacattcctctgatttacaggttgccatatataggtaacttatattgaactgtgactagttttgaggtagtggaaggaaggtaatatttgctgttgctctttaaaagttgtctcacttatttccttggtcctggcgtactacccttaagggatggacttacttttttcctgctaaaagacataagattggttgacagaagtcaaagggtggaacaccttgccattacttctgctcaatttgtcacttttaaaaatagtttaaaagctggaagcttgtcaataggaaaagtaaactcatttttaaaaatttattttcacaaggcaaataatgccttaaagtggcttcttttttaaaatttaatttaattaattctattctgatgaattctcattaaaagtgttgtatgcctcctttgttggtttctgttttgctcattagtgcttgcacgaggtaaaaatagaaatgaatttgtggattttttgtttgtttgtttggaaggtggctagaaaaaactttagtctttcgttgtgtgctatcaagtattcagatgtattctccactacttaataaggagtagccaactcatcctggctttaaaactgaaagttctatgtctcaagaactcctttgtttctgtctagacccagacagtcaccctaatcctagttcactctctgtatccctaaaaaggcctcactaagttgttattgattatcattttgaatggaaggagatttcataatatactagcttctgttggaatgtatcagggattaggttgtttatttttatttttatttattttttgggggttcggagtctcgttctgtctcccaggctggagtgcagtggtgccatttcggctctctgcaacctccacc

SEQ ID NO: 34544 - DNA, 1998 bp, Homo sapiens
gccaagaggacagcaaagtaatcagagatgaacttcaaacatatgtttcatagaggcacatgaacagaaatgcaggcttggtgataatctcaattttgtcagtttttaagcccgtagactctgggcaatttactctctttgagtctgtttctaaaactctaaagcgtagctaatattttgcaaggttgttgtgaggattaacaatatataatgtaagatgactgcacattggacctactattggtacttggttcatgaaaaataatttttgttagtcaaatgaggcctaatagcaagaagaaagaattcttaagccacctttgggatattagttaacattttggcatctgtacccaattgtcttaataaagcttgtagggtctttaacgaaacataaacaattccctcaacttctaaccttttaactcttggccctaaagctattcagcaagaatgcagcatgatttggcaatcaccactattacccccatcccagtgtcaaacatagccagcccaggaataatttttaacacttatggatttagactttaataagctttaccaactagaattaagatactttatttttagttgactctctccttgccctcattcaatccttgttcagaaaagagttaacatcgctggcctgagattcctattctttgaaaggcctgtttacatggttggcctctggctggcaactgggaacttagatttcaggagggttcctaccattccttaaatgataatagtgaatcattgtgcttaaactatgtaaacaatacaatttttatgctgaacatttgcttttttcgggagcttggaattttgatatgtgctaggcagagagggtactttggtgaccagcccccttgggcactgagtctctactaagctttctggattggcaacatttcacacatgttgttacaactcattgctggaggaattaactgcatcctgtgtatcttcactgatagaagaattcttgcaagcttctgcctggtttcttctggactttgccccatcctccttttgcctttgttgagtcagctttgtatcctttcactttaataaaccatgtaagtacaacaactaaatgctcagtcctgtgagtcatcctagtgaattatcaaacctgaggggttgaatgagtctgggttctcgagaaagaatagaatattctccagagcaagaaccagtgatgggggaggagatattaaggttgatttactatgagaattgactcacatgattatggagactgaaaagcctgcactctggtcagcaagcgggacactcaagagagttgatggtgtagttccagtctgagtccagaagcctgaaaaccagaagtgctgatggtgtaagttttagtctgagagggcctgagaaccaggagagccatttgtgtaagttccattctgagtttgagtccaaagtcaggagaagactgatgtcccgactccaagacagtcaggcagtgagaaattctttcttagccttttattctattcaggcctttaatggattgcatgagttccgctcacattggggagggcagtcttcttcagtctactgattcaaatgctgatctcatccagaaacaccttcacggttacaccccaaaataatgtctagccaaatacctgagcatcccatagcccagccaagctgacacataaaattaactattatagaagtgtcctgggactccctcatacaagcatacttcagctttggctctgtacagactagaaaatgagccttttccagcctcaagctctttccagcacatcttatgtttcattgataaattggatacattatatcctacctcaaagggtgctgtgaagaataaatgagaatgtatgttcatttatttcattcaataaaaacaattgcttcctatgtgccagacgctgtgccagagggggatatgtggtagacacagggtggcatgagatgtggcccaaggggttagcagggcttgaa

SEQ ID NO: 34545 - DNA, 1886 bp, Homo sapiens
tccgtctcaaaaaaagaacacaaaaaatttaagttctagttaattaattgaaataaaccagtttctctctgatgagagaaaaaaatgtgctaagtactgctgagttctggagggccacaaacactgcgtgaaaaacatctaggatgttttcactcttgttaaaaacgcatgttttagtactaactcatttaaaacaactgttgaaaaactcaagttacctcctggagggtaagtggaagctgagggacatcggtgggaggcaggtgtctctctgtaccctttacacttttccagttttgaattttacatagatactgcttgttcgaaaaatttaaagaatgatttttatctacttaagcaccaagtaactgataggttacacacaggagatacgtgtttgtttacactgcagggctcgacactgcacaactggcacaatcttcccaaaagtcaacccgttttctaaaacttccgcagaaccaccctgaccgtaaagacgatttcaacaacgagataggcagttttggcccgtggcctgggcccgggagactcgctcaagagggaatgtgcggtgcccggcaggattttaattccgggtcacccgccccgccctgcggccttgggtagagtttagccccctcatcccgtgtcccgggggtcgcgcgacgtccccgagacgccctggccggtactcgcagctcgcgcctttcgttccgctcaagttcctccgccgcgacctcaggacaggccgaagaggcgcgcactactcacgtgtcttccaagtgctgctccaaggtcgcctccatcccacccaccgaccactccggctcagaacccagcggcacggcacgtccttctccaccacaggcctcagtcacttgacgcgagcggggcgtggaccgtaacggcgcctccaaagggacaaaattgatcacggtgcaacgtccgcgttctttactggaaaacatcactgcgcttccgtcgcacagagcctgacgaaggcttgggctccccgcgcggtgaccgtcgaggtgacctgcacctggctccatggcggaaccggccggcacggattattcccctctcgggagaggtctgcagccgggcctcagtgcttcagttcgtggcctggcattttgtgtcagtgttttttaacctttggaccctagttcaaccgactccgagacctaggggacagatcttaagttttacaataacccaggggtcagacagggtctgatctagcctgtggggcaagtacggggaagacacgggacctcttggagggggtcagtaggcttgtagggggaaagacgcacacagagactaaaggacgagatggagcaaggttcaaccccctagctgagtgttggcagtgtcgggattttaacgaagacattggtgcttattatggtgaggggactcaggacagtttaggggaagagagtggcatttgagtcctaactcgtaaggaagactgggtaggactacttgaaaataacttttaaaaattaattataaagctggtaaaaataggaaaacatctatggccccactgtccaaagacgacttttaacttcttggagaatatcctttcagatagttgtctttgtaaatgtatacttttaatgttttttcgtttgcctttttaaaataaattttttgggggacagggtcttgctctgttacccaggctgtagtgcagtagaacgattatagctcattgcaacccggacgtcctgggttcaagctatcctcacctctcagcctctcgactggctaggaccacagcctcgagccatcatgtctggctaatttttacgtttttttgtagagatgggggtctcgctgtgttgtccaggctggtcttaaactccttgcttcaa

SEQ ID NO: 34546 - DNA, 964 bp, Homo sapiens
ggcgctggccaggggcctacaaagtgcacttggcaccaactagtccaagtccttggtgaacttgtcattttccttagttctctccatcctcctggcccttttagggacctgtcacagtgcctgctgagagtgattgcccaacagaagctcctcctgcactctcagcccacagtgggggcaggggcaggccgaaaggctggagagtgagagaaagccacctgctgggaggttctggctttgttgctgccactgactcagccccaggcctttccccgtgtgaccagcccatcagactcacacccctgagctaacctgcacccaggccttcctggcagtacagactcacgctcaggacagtgtttcatgcctgtctttctaaggagtttctgtaggatttcaacatgtgatctccctgccctgctgccctcagagctactcatgtgactctgtttccttcttttcagtcttttaaaattgtggtgaaatgcgaataacttagaatttactattttaaccatttttgagtgtacgattcagtggcattaagtattttcctttcttttcgctcctggcagccttatcaataaagcggtggtcctgtctgtttccccccaggccacagggtgggtgtcgggggtcaacttggatgcccaatatctcccatttggatgaaaagtttctattctgacaaccacccatctgaaaaatgtaaacttccatggaatctgccttccttcagcaggcagctaatgggaggctttttaaattaagaaattagagtgagttggctggtcacagtggctcacaattgtaattccagcacttcgggaggtcgaggcaggcagatcacttgaggtcaggagttcgagacgagcctggccaacgtggtgaaaacccgtctttcctaaaaatacaaaaattagctgggtgtgggggcatgcacctgtaatcccagctactcagg

SEQ ID NO: 34547 - DNA, 1382 bp, Homo sapiens
tctccactcagatatgagcatcaataaagataattcaagtcaatttattgagcatcttctatgcatttgctatggacacagagactagggagcccaccatcggatgggagatggaaggatctaatgtgtgaccccactgtgaaaagtacttcaggaggaagtccaaagggatgatgccgcatgctggagggggccaggtggcaggggagtatagcccctgggagtgcatgtgtgaccatcctgggctcaagtcctgggttgactgcaaagcggtgtgaccttgagcaagttacttctccatgtctcattttcctcttccaaaggcttgaggcagagatactgagagggtcatgtaaggatcaaagataagagtatcaagtgctggcatgtgtttggctttctacaaatgtgactcacagatgactacagttgtgtgactctgaatgactcagttcaatccctggttctatttccttatctgtaaaatgtgagatttacaagctcatggtgctagtccaaatctcaggtgtgcacagagcagcaggtcttttcgttttctgtaaatcagttgaatttctgcagtgtgcccccatctttcaagagcacagaaagaggtggctgagtctggcatccagggccattgtccaggagagttcgctgctgagtcaggctggtggtgcatccctcccttcctcccccactggccctcctgcctatccctgccttcctccctaaggttgagaggaaaattaatcttggtcatttttgtcaatgccccattgttgtgctttgatccaggtgactctccagcatgccaggtctttcttgtccctgccccagcccccgttgcttccatgccctgtctgggccaacctaatcttctggaagctgccttagtcatattcccccagacaggccacacagccacccttctctgggcttgccacttcccggggctaccaccagggagcagggctcaaggccctgccacttgaggcctgcctgtctctcttgcttcttccttctgcatcctccagggagccttgggttctcatatgggcttaggtttcaggcaacagtgccctgaaaacactgcaggtgacttctgtttctgctctgcacacaccttttgtgaggcaaagaaaggcagagcaggcttttcctttcatgagataaagagaaagcagaaaacagactttctacatacgtaacactctcagaatattattcagcccactaaaaatctataatatttatggtatatttacttagtgtcagacactatgcatttactcctttaaaaatctccatttcacaggtgagcaaacagaagtttagaatgcttaactaagtttccaaggcacccagctaataaaaagtgg

SEQ ID NO: 34548 - DNA, 1704 bp, Homo sapiens
ctaagttactgatcatctattttctaactttacaagaatatcttccttagaaatactggactctcctcatgccaaatataaatagccaatgaaatggcacttcattacaccctacttcaaaaaggctgttcaaaaggactgactttacacgaggatttctccagtcttacttctctctcttcacataaaactattacttgaaattttaaatattcgatctcctcattctaaagccctttttcttcaatcacacaccctttctgtctcactattaaaatctattttcactgaaggtccagcgccaccagggctgcacttgctaatccgtgctgactgctgcgtttctgcgtgtgcgtgagaatcttccagaaggtttgagtcacataagagcgtcggccatcttggttttcatctcccgtggagatctactcggtccgcctattaaacttgagacgctggggtcccgcggagccgctgtgtcaggctctaaagaggttttacatttcccagaggaaagcgctctatgggctttaagcgccgcggagacaagcgcttcccgcctgggtggcgcactctgcgggctccaactcctctcaactacacagcgtccggaaacgacggccgactccacatccctaagacggacagaggggcagccgtggggaggattcgaaaccggtacttaccaacgcgaggcgttgcctgaattttcctctgcgggtttcaggaagaccctccgtaggttatttgacattttagtggggagaaaggggacacctcatccagaaaagtgggaagcgtggggccgagtttcccaatggggcgagaaccagagcgagggaatgttgggctggagttgcccacagcaactgtgaggggttcgaccttaacggagggcgacagcgggctctcgagagggtgtatccccaggcttcgggacgaggtcgcgcaccgcgcagaaaccggaaggctcctggcggtggactgcgccctcacagccctacgctgagagagaatcggcgtgagtctccgccctcagagcctacgacaactctccagactccgccggagcaggcgcagggggcgtggccttggtggcaccacccccaacagagcctggtcagtgctgaagactgcgtcagtctggctctgccgccccgcccactgaagccgatagctggagcaaagctcggtcgggcgtcttccggggtcgtcacgtccggttgccaaggtgactggctcgctaaagcccaacccttatgatgcaatccaatggcaagtgatatttgctatcttttcttccggatcaaggaacaaatcgcaaaagaaagctctcccgacacctacgcaaaataaaatgtttccggggtcaatcataaattttctgcttctgtgctcgccgctagcgtacgtttttctctcccgtcagtgcattaaaagacatcggcgcgcttttttggagtcatgcacttctggcctgagaaaacttaaaacgcctgcctgtggccagcgattattgttgctgcttctctgaaggtttcccatttactcctctttcctgaagctttgcctctagacttacttaactctttcctccagcctacgttcatcgaaactatcacttattgtcatatagacctttatttctgaagggagatctgggagttgcatcagaacatccattgtattcattaaatcatttat

SEQ ID NO: 34549 - DNA, 526 bp, Homo sapiens
atgtaagtttacttcaaaaaatacaacagaacatttaatagagcaaacatggtacagtgtcatttaagtgttccttttatataccatcagtaaattaggaattttattcattttgaaagtaccttcttagtcactcaaaaataagggtttgtacatatcctttggcttagatttaaaaaaaaaaaaacttagtcaattgaagtctaagatatgtttgcattcctctcagaccaatgccagcagaggactttggtcagactccagtagaaggtcatgctatgccaacatgcacaggctgacttcgttggaatgttgtttccagcctggctatggttacccactcccacacatactggaaattttgtgaagctttttgcttgtgactgtgtctttaagctgctataagtatgtcttgccaacacacagcaagggctacccttgccagggatttactcagaaagatatatagcaggagccacagctgccagcgagacaaccaaatgtatacctcttctgtgtgagtaga

SEQ ID NO: 34550 - DNA, 2149 bp, Homo sapiens
tataagctgcatcaaatgttacattaagagaaatgaggacaatccgataatgcaatgcaaaatacagagttgcatttggttactgatttataaattaaaatttgggagaactggaaagattatttctacagtgttttgtgtttttcagatgtatcctacttgaaagcacggttgtgaagatacccaggaccagcaatttcctttctgtgtgggacccacccgctgcgatagaattgagtgcagaagactgagcttcgtgtaaacacaaggtcaccagggatcgtaatttcaaactctcccctccccctcgctccctccagccaccaaagtatctgaacccagaactcacaacaggaacgtgtactcaacaggaacgtgtactcaattagcttttgtgggaaagggttgaagattcttggtaactgcttcaacaaaccagaggaattaattagaccgctgattttctccggaagcgcgaagcactaggccgtttgaggatctccgctccgctttgcctgggaccaggaaaagacgcgagagacggaactcggcatcaggcactgcttggggcaggaggagagtaggggaaaccaaggaagagaacagaaaggtagggcacggggagctgagcccagctgcactcatccccgcccccggaaacccccgcagctcccgccccaaccagcccccctctggcgcctggcataaggtagcccccggaggcaatgagggccagcaggagtctcgcgcgcctgcgacgcgggtaagggggctccaggctgcgcccacttccccgagctgccagatcccaccctctgacgcacccttctagagggagcgggctgcaagcgctggggcctgtcccttctcccctacttcgacttaccttaccagaccgactagcgctggccgctggcgccgaagcccctatgctaaaaggagacagggctgggccacggggcgcgctcccgagcagaccggccggccccggggcgcgctcacggcaccgaggagcgcgcctgcggcgctgctcgttcaaaccttgttcccctttacggcaatcgcgaaagtgtcgtgaacgtgctgccgccgatcagtcacccagtcggctggagtcggaggcgatatttctaggggtgtacttgttggggtcagggtaaggctgcggagcgcggtcaccggacgtgaaggatttgaagggcgttgtaggggccagtggagagaggactggatgctctggggcgggtcattaggatatagctgtgtatggactcgcgcgaggcgaacgccgtccttcttcctggcgcagggtggcctcgcgcgcggggttgtggggaggcgaggggcgactgcccccttgcccctctgtggagactgcccccttgcccctctgtggagacattggggtggcggagcgccggcgcgggagccggggggctgttgtgtgggagcccaaggtaggggtgggaagaaccgtggagggccagcgctgagcgggccgagggctgggagcgctacccgtgccgaacggaccttgcttgtcaggtccacaccctcctgcccgaatgctggcaagtccacacaccgtgtggcatcctctgccgggtttgtctccccttaggaatgcggtgctgatgtttgtggctgggacgcgcttctggtcagcaacttttctggaaatttcagcctatattgataagctgtgagattgctagctggcgtttatttcagcagcattcttgcaaggagaaataaccaaaagagttgctggtgtttgccagtattcccagaaacactgcatgaacgggatctttagccatgtttaacttgttttctccaattcagtgcttggcattttggtgtcatttttgccattttgcatcattagtattgaatatataattttgcttgaagtcttttaatcagtaaatccatagtatgacagtaggcaaattcatagttgtctttcaacaaatgttagtgtctcgtcttgtatgtggacaaagaataaagatttatttcctactcgaactattaggaatatgtccagtccgtagatgttgagttgaacgacttataacacaagttagactttggtaagggcatttagagcattactaatttagagccattgccattcacataaaat

SEQ ID NO: 34551 - DNA, 1344 bp, Homo sapiens
ttcctcttttaaggagtgcaatatttcacttcagcaaaacgctaaatctaagttgtgttacacagccctgtttttgcttccaagtctgctgaaaaggcttttgtttttgtaaacttgctctatgtatcacttgttaaataatgctgaacttaatcctgtgatcctattagttttctttttcttttttttcttcctttctttccttgttctttataatttgcccttcctttctgctagtgtagccatgagtatttttctttaggtagccaattacctgtgaaaagactgtaaacatactgctgaatcagtgcagatcaaaacttggcacccttagacatggcggggatggaaattctggaatttcacacaacaggttgtgtattgtgtaagcttaccttatgcactgctcaggagttagagatttttttttttaatgtgatacttgtcagacattccccatgctaaagtccacacaggaataatgtagcccatatgccattatcctcagctgatataaatgcagccgttttgcatgatagacttttttagtaaaggtattaattaaatatctctgattatactttttctacctttgttggattttccacataaatatttatgcttgcacaaagaaaattctttgtcagaccgtatgtgttttcctagttctcctctggacttacaaaacagtttgttgatagcattcataacttagctgtttctgagaccccaccctcccctttttgagtttcttaaaggtatggaatgttatatttcagcctttctgtttcatcagagtctggaaccactaagtgtttattaaatactagacgaataatatttgttaattgttcagtaagtactgattacctactagcagggtgtggtggcacatgctcgtaatcctagcttctctgtggctgagacacaggaatcgcttgaacccaggaggaggggtttgtagtgaggcaagatctggtactgcctccagcctgtgctacagagcgagatcctgtctcactaaattaaattaaattaaaataagtattgattatctacttagtgctaagtatggtatgagcttgtgggaaaagaatgttaacaagacaggcttggcccatgcacttgtagagtatacacaacagtctgggggaaagaccaaaaaaacacaaacaaacaaaaaaagttcaaagtgtgatgagtgctttaaagggagcagagcactagagccagattttaacagaggaacggagttactgattacaagtgaaaaggctacaatagctataggactgtgacagtattataggactttgacagtattattatgaactgacagcatta

SEQ ID NO: 34552 - DNA, 1001 bp, Homo sapiens
tctgtcatcaggggagaaaagttgaactagtccaggcctgaaaccacttgtatacataggctcagatgccttcatgaagggaagactgttcctttgagggattggggggagagagtgtgtataaataatttgtttttcaagattgttcccagaaatctttccagtatttgggcatattattgtctgtggagtaatcccttaccaaaagccagagtctgactggccatcaggagaggagccacggcttccagggagctggagctgcagagtcaagaagtttcataatttctggggttggaacatttaaatgtttattgctaaacatggggctaatactctgtcccagttagtcacaaggctaaagctggttcaaagggcatgtgtactcagcagtcctaaggaaggatgagggggccggtggagcaaagaagggaaacacagccttcttctttactttgcagcaatggtttctataggagaggatttggttttatctgtgctaggttccactgttgtctatgtggccttggataagtctctggagctcagttatctcttggagtgagtcaatggttatggccagggcagacattcccaagtccctcttctggcttgagatacagtaacatactatcttttgaaagtccctatactgacaactctaaagcacatgttttgagttatttttccaacagcggggatagatttacgcttttaatgcccattttcacaactgagttctctggtgtgtctggtgcactgccaagatgtaagaagctaacaaaatcaaagaggattcagacctatatcctcattagccaccttagctctgagctactcagaaagatgacttgctgcaaaaatctgcatttttaagactcatagtttgccagagggccatgttagctcaattccaaggaattcaaatacattccagtggggtgtgtgttgtatagaccagctgtgtcatacatttggatgagatgggacaccccgaagac

SEQ ID NO: 34553 - DNA, 1764 bp, Homo sapiens
tagcctgtgctcacaactgtgagcatacctcacagatgtggataccaggaagagtaagacactgaccctgcttttaaggaattcacagtgtagttaagagacaaacatgtaaacaagcactggaggctcagccgagaggcaaagcctttttacctcgctatgtctatccaccctcatccccagcctttgcccccacacagccccctctgggcacactcgaggttattaaagattaccaggttgctgcctgagtagcttgggaaattcccaggttctaggaacctctgcccagcaattcctacacggaaagtcccacaaaggtgcctcctcaagactttccagtgaagcatttctcgtcactcctgcccaagtcacaacttggaccctactcctctcgccaccacatacacacagtcccactctctgtctttctcttttatcccctggctttcatggctcttctttactccagccaaattgcctcaaagtcaaggccaataaaagcacagatgcgggaatccttgtttcagttctgggtttcaagctggcacttcctgaattagcaaaattgagtctctgagaggctagctgactggaagtcccctccctgtccgagcttcagggagctgaaaaactcagtgtgggaaggaagtggggagtggtgggatttccctgaagaaagtaaacgtctgagaggtgaatcctgccgacctccacttcccaaacactgatctgaggaggaaaggcagaatcccagctctagccacacaggaatttctggtttccattcaaggctgggagtgaaagagctatttccaaagcaaaagatgatgccactcccttcaaggattacctacaactagttcctctttggttatcacccatttttacagaatcttcaacacagagaccccactgcttgcccaagtttcctttcctctgaaacccatggcattcacctgcccctctgacttctgttgagtccctaacatccttttcttcttccctaaaagataaaagcagggttgtcaacctaaaatcactggttttctccctccccagatatgaatagaaggtctacccctacccctactgttttatgacttctttcattctccattctattacatctccccacgtccttctcagatctgaagcccctaaaaggtagagaccatggcacaatagtaccctgcttccactatacacagggatatactcaactgtgaacttaagaacagaagctagcactcagcaatatgtgctcagcagggtgttaggtacctaatgtgcattatttcatttaatcctcaccacaaccttatgaggtaatcacaatcattatttccatttttaagaagttaacaaactaacttaatgggaacctcatagctaaaggtagaagaactggatttaaacctcctaattctgctgatttcaatccctgtgctttcaaccagtatgtaattccgcatccccttcaggtgaaggaccttgtcctgtttgtatcttcccaatgcttggcatctggcaaccagttgacacacaataaatgtttgttgaatgagtatctacctcctgccctgttctccaccctccctcagccttgcaagggcagaatcatgtctgcatccaccctaactggtcccacccaggctgtcccaggaatacttcctgtccttccccaagctaagtcaggagcattcctcaggcccaggcagcagtcctgtgtggaggaagaggcagtgggggtggttcaaaaca

SEQ ID NO: 34554 - DNA, 2310 bp, Homo sapiens
taatacacaactgtcctggggccagaaaggcaaaggaggaagggggagaatccccaggcaagtggaggatggtatggaagatgaagagggcatatgctcctggccctacaagtgttaggcctcagttcttacagttcctcagtatcaggaagctcctccaggcacaatcaggaagtgcctggtgttggggcaggggtgggtgggaacaactggaatgtctcctctgggctgcagggggcagaccccttccattcacacagatgtcccagggtctgggaagaccaggacagaccaggccagtgctctccagagaagagagaatgtcagcctcatcctgccttctgctcccaccactgcacggtcccaggcctctgccccaaactgtggtctctgacctctccctgatggtgcagatggaatggccagatattggagatctgtgtctagagaggacactacaaagagggaaggagcagggtgtggcaggaggaatggcaacaggaggaagagcagatcactcagaggtcactgcagttcaaagaagggtgcactgacctcactccctgaggtccccccaactctggggcttgggctaagagaggggctcacttggcctcctggcgtgccaatgttggaaagggcaggttgtctgggaatggcccctgctctttgctcctcagacagtaggacctctgggcaaagtatctaagggtcacggctgttcagccataggactggctagtggtaagccacacaaatatttgccgagtgaatgaataaatgaatgaatttctaactgccctccttccaaccccagggctctgctaagaaagaaaagaaggtgcttctttaacttagaagttgacttctaatttaatccccataatcctggacgggggaattatgtccatttcactgttgcggggctgagggaaagggaaggggtgccctgtctgggcgacacgctggaaagcagcagctgcgcaggttctaccgccgctccgctggaggccacactctgaagggcacctggccgagggtgggtgggggtggtaacgtcatcggggagacctgtgtttgtggccggtggctatctgctgggcaggggcaggggcgctggctccgaggaactgggcaaagaccacggaggactcccagggcggcgaggtggggcggggcggcgggcacgccgggagctgaggcagtgcctctgggaggacaccacaaccggggcgctttcaggcacactgcggttgcaccacaagcttcctggatggaaggacacgtggccccggggccccacaacggcttcctgtgtcccgccgcctccccctcgccccctcaggcctggcctcgccgtccccgcccccacctgaccctcttcccctctccgcgcgctccttcccgctcacctgcccccgcgcagcctcctgagtccccttccaactgctcccggatctcgacgccccgtgccgccctccaccgggccccagccgccagccctagccccggctccccggtgcccacgccgtccccccgcgctctccccggccggcactaacccccatggccgcgcttcagtctcaggctggctcgaaggcggcggccgagcccatccatggcccctggagtgcccggctcccgctcccagctccgcgctggccccgcccccctatccttgacctccgcgggtccgacactttcactttcacgcggggggaggcctaggggacaggttcggggcggcgcggcgcaccttccggactccggcccaacccccgggcgcacctgggcgggcccgctctgccctcgccctgggcagggcagcgtggggtggaagagggcgctcgacgcgcgtccgggactgggcggcgccacctcgttcccaccctccgtggggctcccggggaggcttgacttagcgaacaccctgcagtccgcaaaagcgcatgtcctggctgaaatcaccgtcttccaggtggccccaaacgaatcccaaaaggggcagagttttcagtcctcacacctctccaacccctccacctctccctttgcaactgctttagcccttcgaccatctccaggtctcttgccctacttgtcctctcactctcggagttcctgaggaggaactggagatgcggattagggacctgtcgctgccttccattcaaacttggccttgagcagaccagcaaaatgggggtaacccctgccattccacagaaatgtgaaagttcaggaatagaaaactctttgtaggttgttacataatacaaatttaagggactgttattgtcataattgttg

SEQ ID NO: 34555 - DNA, 428 bp, Homo sapiens
agaaatcatttatttgtgtccatacctctttcaccttgtcttaccctctcaagccatgaagcccccacttggcaagagccttttgggttccctgttgaacttagctgagccctggactgacccttgacagggtagagcccgtagggaggccacactttggagaagggcctggaggctgacctgacagtggatgtgccacagagaatttctctgaccatttacttagtgagtgtgtggagaaccagggcctaacctccctgcctaaaaaaacatgtgagtcatcaagagagaacagtagagccctgttttccagccctaagctctgcaggggaggaatcagctccagcagctgtgtcattgaaagttttctctcctttttggctgcccctttcttcacttttggacccgtaaaggtttcagagtgaaca

SEQ ID NO: 34556 - DNA, 566 bp, Homo sapiens
taaaaaaaaaactattagagtcttctctgattccgtggcattctacccggtccacgcaaggcctccagttcttttaaaacctcgcgccccctccccacggccccccgggatagaatgggcaacctgattggaggggcttgaggaaaaggaaaaatggtctaagggcctaatatggaactagctgtcagctcaactccgccccctactcctctgctggggcgttgcccagggagtccaccccggtacgctgcagcggctgtctttctactttcaccttacttgctggtggcccagacttcgggacattctgaacctcactgtccttccctctacaacagcgcattcctcttggcccagcttccaaagctatttgccgccccgtcaaccctgcagcccctacagccgcgaatccaggaaaccctctacccgcagcccagctactgagtttacaatcccctgggctttgggctccaaggtgcgggttcctgccccagtagtggctcggtggacgccccaacttgccgcgcaggcgcgctcgggccctctccccctccccgcgctccgca

SEQ ID NO: 34557 - DNA, 2246 bp, Homo sapiens
ttaatggcaattccaaagaaaaaaactaggacctcctggcagagttcactcttccttctaaagtgctaaactttttggatttgtcgatagccatgctaagctctttctgcccccaagcttttgctaattagccacggaaaggtttttcctgcctccaggcttttgctaatgctgttccaacttccttagaacaattttctccctattctttttgtggctggttgctgttaattattcatatcacagcttaaatgtcacttcctcagagaagacttccctgaccatcctatttgcttccatcatagctcttatcacaacttatgattatttgatacttttttggagtctgtatcctctttgcaagccccacgagagcaaggatcatgtttctgtcattaactgccctagctacagtgtgaagcacagtgcctagatgacagtagatgctcaataaacatttactgaatgaacgactgagataatgaacagttcctccttcccagtccaaggatttctcccttgtgtttcttcagatacctatatctttccaataattccctttgggcttacactaaccaaagagtctgtttctatcgcttgcaactcccaaacaccttaactcgtgtactgcctgagggcaacatcctttgctatccccaggaaattcagcccttacagaaaatccattaaggtacaagcttctctacaagacgacacagagctggtgctccattctgttggaaataatgctcaaaatcctaaggaaattaaacactcaaacaaaggattttcagcgaagcaattttacttctgcgcaaagaggtgcttctgcttgtgcagtcgccatgagagcacacctgaacaaaggggcgcgagggcctttattcctgatgcaagcactgcccctgtgccctttccccattagccaaagtcgagccacacaatctaaactactcctggttggctaaacatttgaactttctttagataaggtgggcacctcagggagagaggggaaagggacggggtgtctgcagtgagctagagagctagtcttctttccaaataaggaaaggaatgtgagctggtactgataacacttggtactgtggcatgtctgggcatgtaacaaaggcagaaaggaagaaagaggagaaaagggaaagggggtactatgaattaaagaataaaggattgatcaggctgtttgaagagaaacctcatcatatcccacaattcccagcttaaccaggatggtaaattactgtttgtcctcaggtgggcttccctgagaccctggatatttgatattcaggtcaatgccatcaaatccacgttggcgaaagaagtcaatgacagaacagttgaaaatcttgtgattggcatctgtggcaccaatggttatgaatataggcagagagcttgtctatattaacattaacagaccccaggaattctccccacatgatctctgatagcaattcttattctgtattttataataaccccttctggatttttagagttaagataaagaaacccaaaaatgtaaatgttaatcaacaaatacgtgtttttaatttaaattttttcttcagtgtacttattgaatagtatgtttccatttatttataacatcaaaggtacatatacattttctttactagtgggatctttcatagggcagtggttcaaatattatatttctttaactcttagatgtttatttcttaatacttactatttccaaaattaagatgtgacttacaatctatatatatatataatacggcatttctgccccccaaagatgtactattaaatttaagctgaatccaacattttaaagtgcctcaatatctagaacagaacttataggtattaaaattctgtcatatcctctgccatagtcaataactgtatagcctataaacagtatttaaacactccaggtttgttcctgattatgataagcctgtaattaatgtttcgtaaaccatatcacaacttctctaatttatctgttttgttttttaagttcaggtatttaatagctagaaaggtttgtttgtttgtttggtggaagtaaattgactagcatcaaactggataatttaaaatggggaagaaaagatgcagtttggagttgtgggtgcaaagactcttatttattcgagttgtggaggcagaaaaagccatgttggtggaaaggacatctcaggaagaagaaatattggtcaaatacc

SEQ ID NO: 34558 - DNA, 557 bp, Homo sapiens
tgaaagataaaacagtaatgctattagaaaataacatttaaaaattgtcataaccttagctagaaagatttcttaaacaggacacaaaaataactcattaaccataaaggaaataacttataacttggaacacattaaaattatgaatttctgtttatctaaaggcatcactgaaagggttaaagagttggcgaagatatttataatctactgagcattatcagtatattatctctcagttccagattcattcattctctattgcttgctctgcaaatatggtactggaccttttaaatagctttcctttgccagctggcatgattttaggctttgtcagtacaggatgctagagaaacactgtaggagaaaaggggttttcccttcctcgttctggcatgctctctcagcagactctagcagcctgcagctgctgcagcacccagctctgcacctgaacaggaagaagtgtgaaacaggagaaaacaatcactcccagtcaatgtgatgggttaaggctgcagaaaccttgcctgtggccaaaagcagaaacaaat

SEQ ID NO: 34559 - DNA, 624 bp, Homo sapiens
gacttttatgctacttacaagctaagaaattagtctgccagttttgtgtgtatacacacacacacacacatgcacacacacacacatactcacataccccaacaccccagacctctggatcagaggacagaatatttattactcacagaaaaaaaacaaaacaaaatagccagaatagcaccttgagtcagtttccatgtcccaaggacaatgtgatgaaggtcagatgttcaattcacctgcatatgcagtggggtctgcgctacagagaagaactctgaaattatgagactcagagcttatatagaatggttgacatatgtggccctcctcccttccagagagaggagagaacctggaatgtaaacaagtcctccctgggaaggggactttcacaatcattgaaggtaaacaaatggctctgggggaaagaggaaagcagctctctatttttagtaaagcttgtctgcttcctttgcccagaatcctcaaactgtgcaggaactctgagaaatccagggtataattatctcccaacaataatccccaaggtctcttttagctctgatattctatgtcaaaatcccttaaccatccccaacctggcttcatgtctcctcacct

SEQ ID NO: 34560 - DNA, 625 bp, Homo sapiens
gctcaaaaacagtgcttgggaagctctggggttctgagctcaagacacctgcttcccaccaatgtcctgccccaccaaagcaatatccactcaccttcctagaaagcgcacatcataggatgtttggacgatgtgtgggaccccagaaacagcagcagacagcagcagcctcgggcgcatggtgagcagtgcctccttccggaaggcaaacaggagctcctaagaggaaagacagaaagacacagagaactggacaaacagagaggcggggcctggggggagtgtcatctaggaagcatttactgagctcctgagccaggctctgggacacgaaggtgagttggacatgggccatgccacaggctcatgagacaggcagatgagggctgatgtggttaatgatttaatcaattgaggggtggcaagcaggctcagaagcacagaattcagacagacactgcctaagggagtgcagggagctgcagagagaaggcatcccttaggctggaggactggagcaagccccaggtgcagcgaaaagagcaacctcagggagttacaggtattaccctccaggggttcacagtaaaagaacattctgtcaccctcttctgcccctggccct

SEQ ID NO: 34561 - DNA, 2370 bp, Homo sapiens
caaattctgattttaaaaaaaaaaaaagccaaagcctgcatcgctaagcctaacagtcaacaaaaagaaagcagaatgaagacaagaaagcggtaagaaatgggaagagacatgtagcacagattggcttcaatgtcatcttaaaatcaagattatgcttggtctgggctgtgggggttaaggggcaggttacacagaagaaaaatggttccaatccgttgcttaattttgttacggatttttctaggaaatctcaccagacaatttagaattttagaaaaggtatttcccacctacacaagagtttgcattcggggccaacactctcaggctcctccaagcactgagtataggacgttagatattgagctcaaccctacggtaccccaagtctccattctaccgttccacccgggggtgggggtggataatgggatagtgactcacctgaatcggaggccactagaatacctctctccccaacccaagtgaggtcagccactccagcctccgtttggactccggcggagcagaagccttcgttgggggcggcacaggggtccttaaaaagccagagggagccggcccagcagcgcccactcaggctggaggccccgaggagaagcgccccatctacggggggtacaagctgtcagcgcgtgaagggtagaagggttcgcctccatggagaccgcacagaacagcgttccggccgggtctggatctgagctcaggaacgcggggcagggctggggacagctcggtgacgcgacccagggtcaggataacatgcagggcggggatgggctgggagggtcagtctccggggaggggcgccctgggccggggtaagggagctcccaggcccgggatctcggctcaccggaccggtaccgcgcagcctccaactgccgttccatgcaggcgggcgcatttgggggaagattccactcccgggccgccgggggcactagggggggtggggtttccttccgcatctccacggttccaactccaacctagactcaaactggacgccggccggagactccgctccggcagcaaaccccacgtggtgcacctctgagcctccgcccctctcccgagggaaccgcaactctacttctcgcgagaattgcttctatggctccatcctgctttccggctgtcgccctcatgcgataggctctcagcgttacttgactcttctcgcgataattttttttaaaaatctcccaaggaaagttgaaggaagagtacaaaattttcatctcgcgagacttgtgagcggccatcttggtcctgccctgacagattctcctatcggggtcacagggacgctaagattgctacctggactttcgttgaccatgctgtcccgggtggtactttccgccgccgccacagcgggtaaggggtatagaccctgctctggactatcagagtgattggaaagaagcgaatctaggggtgacagggaggggagaagggcgcagcgacacgggcctgagaggcgagtggtcagtgcagttcggaagggagcgtggggtcttgagggacgggaaagaggggtacataggcttagtgatagagcctggcgggggtaaggaaagggcaaaccagatttcatttgactttgctgaccttcgccttgtctatctgcagccccctctctgaagaatgcagccttcctaggtccagggtaagtgtgaggataatgctccctttcgtctttgttttcactaccttttatttcccgattcctgcccccacccccttagctttaggtcagaaatttctttccgataattttgggacacttaaaccctctttcagacaagacacttgttcctgtaactgccaggaacgctctcatgtcacctaatgaccaagattttagcaggataagtaacgtattctaactaaactagaaattggttttgctgtcttctatacccgccctactcctttgtgaccttcccttgggaccttatgacatgtagcttccacagcctgaatccgagtagatgacatacccaagaataaattttgttcaataaaacagtaaagcatgttgtttacagtcggtttcccagatacctagtttttgctgccatatgataacaatcagagaaatcattcattgattcagtaaatatttatgttgcctaaaaacataaccaaggatacaagaatgagtatggctaattacctgccctcatggagctcacagtctaggaatgggaggcaccttaagagtattggtttagagtgagggctccacagccagtacagggtccctggcccctccacttactggctgtgtgacctcaatttcctcatctataaaatggcgataatagtgcattg

SEQ ID NO: 34562 - DNA, 2568 bp, Homo sapiens
cctttgcagcttctcagaaaaccctaaaaaaccccagttgccagcctacaaaaacagcaagatgcagtgttagcaggagcccagggaaaaggcctctggagccctagagctggtccacgggcagctaagaccggatgtcaggcaggcgaaaggtggggcttctgcccaaggctgtctcccaccccacggctgtctgcagagttgcacaaaatcagcttgctcacttcctcttggccccatcaccacttccccaaagccttacatttttatagagcttcatgtttgctagccgacagctgaggcttagaaaagacaagtgctcagggtcagccctgaaggtggcgcttcctaggcccctcccccaccactctccgggctctgcctctccatcaagccccgggggtcaggctgggctttcccgcgccgggggctgatctggagcctctgtccacacgggccttctaaccagggcccagccactgaggccaatccaaggagcccaagactcacaggctgtagtctgagcacaaggagtttcactccatgccagtgttggtgggagggagggtgaggcctggaaagggaggtcaaggttccttcactctgagcaacaggaaatcctgccccacgaaggggagctgctctgggcgctcagcctcacccaccagacccccccacccacaccgagtgtgtcaggaggtctccaggccctgggggaaagagaagggttcagctaactgaactcaaggcactcagaaagtgaggaagcgtttcagctgccggagacttagcacggtagcgtcagcttcaagtgtctgaaagagtgactcctgcgtcccagctgaggcgctatgctcaatggtggccaccagagggaagcacgtttctgttgtcactcgggacccaggctgctgccgagaaagaaaacgggaagaacttgaaacgctcctttgaaactgcttaaccagcaacctcagatggtgcagaaaatgaaagaagtgagaatcaagggaaggcaaaggggtcgagaataggtagccaactgcctgaagtcaatccaatcccatagaatattcctgggcagtaccaaattcagtcctcctgactccagaaggttgagaagcagctttgcctttcaaacctgtgactgttccaataaacacagtatttgtgttttgctttgtcatgtgcaaagctcctcccacaatcaactttactgaattaactcaacaaccccacaaggcaggtatcatcaatctcatcagaatgaatgacctgctcaggatcatacaccgccaggcgcggtggctcatgcctgtaatctcagcactttgggaggccgaggcgggcggatcacgaggtcaggcgttctagaccagcgtgaccaacgtggtgaaaccccgtctcgactaaaaatacaaaaattagctgggcgtggtggcgggcgcctgtaatcccagctacgcaggaggctgaggcaggagaattgcttgaacccgggaggcggaggttgcagtgaggtgagatcgcaccactgcactccagcctgggcgacagagcgagactccgtctcaaacaaacaaacaaacaaaagcagcaccaggatgggagcccagctcctggtctcctcgcttaagatgagaatggggaagaccaggagggatttgccagtagggggttgcagtggaatttttagccacctacgtcattgatccttcccttggcacctgtcaacctctgacctatccttcccctcttgtgagctcaggtcccactggtcaattttcccagcctttgctggagagcttccaagatttctccaaatgccctcatgtctcttggccacccagcctcctctttatcacagtcctaggcttctgggtgctcaggccgggtgtccccacccctatcacagtggtagggcctcatcccttgatttcacccaggaagactttggatcccggtgttgattctcatgccctttatctaaacaccgggaggcgtaggaatgagttctggatataccaactactgatcccaaatgtttacagtagggcaatgtcctggtctccttcttttaacctgctacctaccaaatgggacaaaacttcttacggaattgcatgcaaaccttaccgccacagtgggagataagcaaccttctgattttgatggcatgtgtcttcccctcctactgcacaaggtcatttcgtaattattactgtaagagctgccattgataaaatgccaattcacatgtgccaggcactatgccaggtgttttgcatacatcactcacaattctatatcagtcctgctgggaagtattattagatccatttcacagatagaaaactaaggctaggagagaattgactcactctgggcagcacagcagcaaatggcagagctagggcctgaacccaagtctatcttggctgcaaagccctggctctttcaatgagccacacaaaaacagtccaatatcaattatgccaaaacccaaattgccattttgggcagacattcttcagtatcctaatgggtagacttgcttcctaggctggg

SEQ ID NO: 34563 - DNA, 1416 bp, Homo sapiens
aggtgatcaagagaataacacctaccttatagactaatattgaggattcaatgaattaaattcatgaagtacctcaacagtgcctgacactgagaagcactgaataaatgtcaactattatatcgaaatgtatccacccaccccacctctaaactccaggttccttttgtgctaacttccttacacttcattctgttgaaagagaaatcacagaaaaaatatcacacagacgcttagtgcaatatacatatacgtatcactctagaaattgttccaaggagaggttcagagccatttcaggcaccatctgattagatgctgtaagcagcgggcatggaatccctctggacttttgaaatcagatgggcatttgttcaacacattcctgtaggggtagtctacaaaattaaactaacacggcaaaaggacccagcagtccaagaacttgcccacctaaaatggtcatcgtaggcagagcaaatgtttaaagtgaggatacagcgtttaattgccccttgtcttactgaaaggtgttattcacatattgctcagcaatcactgaaaacatgtgccaatgagggccgataactccgtttggaatgtgctgcttgtttctgagactttacaacaatgactggccaggattttactctccagactcacgtagaaatgagtgtgtcctgtgtgatgtctccaacagagaacaatcaaaaggaatcaaaaagatgttagccattgagctctagaaacccagctgccttctcccggcctccagacacacaacagcttcattgtatgaggagagagcattgaactgaagctttcctgcaagcatatttgaacttggaccttcagtgcacagaccagcagccagcttccagcccaggcaccccctcctctcctcccttctcttcaactctgcaagagaatttcgttccatttaagtccaggagatgtggcaaaaacaacactccaaacaccacttccatttatggcaacgggatcctttaaaccagtgagaaatagtccttcagctcataagtcctttagcttctcctgtgcctcatacattcgttttctctgctcacatcggagggaagaaataggcctaaagagttggggtttattttttaagttttttttttttaaggagaaaaaaaacactgatatcaacaaaaagaagagtcactcattattaatattagaaggacattagctagacacagatcaacttccacatttttcagatgaggaaactgaggccaaagaagctaaaagccctagcagcactgtgggaaaatccctaggatgagccatcttaggacacaacattgaaagccatgccctcatttcccttacttacttgcactattaacttcctattaatgattacgataaattgctgtatactaagtc

SEQ ID NO: 34564 - DNA, 751 bp, Homo sapiens
tgtgtgactaagggctctgaaagcgcatgaggaggaggttctggtgaggatgtctctcttttgttgtggctgctgagtcagcctactccccacatctggcccttcatggggggcatctaccactattcattttgtcctaaatgcatttgtttacctttgatgtgccaggaaccaagcccactgagtctcctttgggtttagaaccatattgtctacaaaacaatcgcaacatctatagtcattgaaaggcatttggagaaacattctcaagaattcgagaattgaagttacataaagcatgtttccatctaaatgcactggggaataaaaaagggttcacggggcctctggcattgctccaggaaaggactattacaccacagaggaattgggtttttgcccagtggcctttggaatgacctgaactttatatactttttaaaatagatgccctgtatagtcatcacctggcagtagagaaatttcccaagtctactctattacatgtgatgcttacattcttctgcaagcattcgtatattctacacccccaatgggcctgatccccaggacctacactaaaggatctctcccacttgccaatggtagtgatatcccagccttagcaagaggtccttgccttggagacacctaggtttattttttttaacttctttaaaaaataatttcaacttttattttagattcatggagtacaaatgcaggtttgttacttggatatgttgtgtga

SEQ ID NO: 34565 - DNA, 1162 bp, Homo sapiens
tgactgaactaaaatcagtagatgttttgcaggctaactttaaaaagaagcaataaatttgtaggggagttaatttgggacatgccaagttggaggtgtcaatgaagcgtccaagtggtgacgcttggcagacagtaggatgcatagtctgaaactctgggagaaatgtccatttggaaatcactcacacgtactcaattgttataatcacaagaataaaagaggtaacaaggaaaatgagagagagagagaaagagagagagagagaaagagagagagagagaaagtgcaggaggctaaagcagaccctaagaaacccaacattcagtggagggacaggggacgaggggcccgtaaaagagcctgagaagttgaagaccccagaagagagtagcatcgccaagatcaaggaactggagtgtatcaagaaactgcgagtgaatgcaataaaactgcacatggcagaggttgagaaagtcctaagtcaaaattgaaacaaaagatccactgccttcaaaagaaacaactggagaggaaaggcaaggtgatgaatttttatgaggtgtgtcaccaggaacaccattcattccataagcattcctttctttaaagaggaatacctctcttaacagcttaactcagggtggtgcaaagaagctttttttttttttttgaagggttttttcaaatgtttattttatgtacaaagaactatcatgtttttaattgagtagatgccttggataatcctttgaaggaagatcgtttagaccagcttaatgaaacagacatccttcgcgtactgacggaaacactggcggcacatattgaggccgtatttcaggatcagacctgccggttcgaacacacgcgacaagagcaaagaagttaaaagagaagtgtctgtgtggctccttccacgtgggtgaaggactgtgccagctgagaggtggtagagcaggaagctgcctgaggacctccatttatttggtgaaaaactgggctccgcccttaagagagcaagtcgagggccgtgtaggagttggaggagagaaatgaaattttggaagagtcagcagaaggtgggaaatttttatttcatttacagcagtacagacttcatgcagccaaaagtatgaatgccctttcttctgtgacttac

SEQ ID NO: 34566 - DNA, 534 bp, Homo sapiens
gttccttttgctatcactgccttcctggtcttagggaaataaaatgactgcttcatttaaaactttccttccttcaattggctaaaagccataacatgagtctagctatgaggtggcttcaaatcttaatgctgggagagactgagtgttgagtgttactgtgaaatcaaagatgcagcataaattactaagtctactctcatgtatgccttgtatttctgcaactctgaacagtggaattttcacagtaggatttagcacttatcagttgtcctgtcccacacttcaagatcaaaggttcttgacacatcaaacactgagttaaaaattgccgctcagagtaggcaatttttttcattcaacactcttttactgagcattgcttatgtgttaggtaatagactgagcattggaagctcagagattacaatatagttggtgaggctgacaaaattgtctagcattctcttagcatacttatctaaacacatgagatcacaagagaagactccccacctacatacaagcccaacc

SEQ ID NO: 34567 - DNA, 493 bp, Homo sapiens
tcctgggctcaagcgatccgcttgtctcagcctctcagtgctgggattacaggcgtgagccaccgtgcccagctccaatcattaattttagatggaggatctggtggccagctggcagctattattaacatgtgacacagaagcagattgtgtatgtattgggggaaggagggaggaagggaggaggaaatacagactgagatacagaggtcatagtctccacatcaaggccacatggtcaggtcaaacacagagcagaaggtcacagaattttattcaatcataggccattactcttctctcctactgctcactactatagaattttttgtaatttttccttctcatttatggaagtgtctcttaatggagtctttctctcatatgtgtgtgtatttgtgtgtatgtgtgtgtacgtataattggaagagggccctgtgttgggtccattctgtcagaagtatgtctgaatttaatcccctttctccattcc

SEQ ID NO: 34568 - DNA, 1119 bp, Homo sapiens
ccctgagttatatacaataaattcagtgatcgaaggtgtagggtaggtagacaagagaattcatgggaaaatgcctccagagctaataacttgtatgtgtcaaacactttccagttcacagagcattttcacgtatattatgtcacatcatcttcacaaccctgtggaatacaaattatctctattttacacgctaggacaaagcattgattaagtagcttgccccatatcatgaataaatgttccaaagtggtcagtatgcagactcagaccccaacctctgcctcccagcagctatattttctgctatgactcactgtgactcaggactcaagcagcccagtgtccagtctggctgctcttcccaggagctttcccacctggcctccttctgctcaatgggtcctgctggagacccttccattggtccaactggtggtctctaccaactgccacagaagcttccaacagccacattccacccatccaacccttctgccattagagaaccaggaattccctgttttggggggtagagaattggacatactcataaagccttaagctcctaaaactcatgactatctttttactcctgcctcaagttttacacataaatcaatgaaaatctggtcattgtgtggctttccaagccatttggacattgtgaaacttgaaatgagagaaacattgaaatttctggaactctacttctgagtaccttattgccttttcccattccctaaccttccctgtgatagtcttaacattcctgctgtcaataaatatttatcaagcacctgttaggtgccagaaactattctaagttgggagtataggcctagcttggtggcttatgcctatattcctatttgggaggctgaggtaggaggatcacctaagccccagagattgaagatgctgtcagccatgatggcaccaccactgcactccatcctgggcaacagagtgagaccccaactcttttttttttttttttttgagacggagtctcactctgttgcccaggctagagtgcagtggcacgatctcggctcactgcaagctccacctcccgggttcacaccattctcctgcctcagcctcccaagtagctgg

SEQ ID NO: 34569 - DNA, 1295 bp, Homo sapiens
gacgattcttttggattcctgaacacaccatctctgttgtgggagaactctggggtatgtttccagctctctcaatgaagttttaatcaaagcactgtttccttcccgttgttgcttttggaatggccttgttctctgagtcctagctttgacaacagcaactgtgctgaacttttccacagcagcttttggatttctgccccaccccctcccatctgcacgcccccatttcctctcttctctgttttggctctgcgtggctcttctgagtaaagtggctgaagagtaatgaacccaaaatacctaagtaacaaatgagtcaccacacttccacagaagagctctgaggatcagtgggtgtgttggggggtaaatagcagaggaggtggctgcccagagagagggagagagagaaaaaatagaaacaaaacgagcaagttggcagaggtggctgagagcagctgagtgggtggagggggcggggagccgggttgtgttggcttgcaaaggtgagatcagtgctgtggcttgtcacaccctggctgactcaagctaagcccaggcccctcgggaactgttcacactgggctgtctagtaaaaatcagctagacaagtcgcctaactgccgttctcttgtgtttacaagttctgagttgtagggcttggaattctttgctcaagttgctgcaaagctgctaattaggaacctgcaatgatattgctctagggccattccctttctggttatatggtatctgggtgataagagtcagggcagaatttaaatttcttctttgtacttttttgtttgttgggaatgtttagaatgcatccttttttcaaaaccttatcttgaagtgtagtggtggagctggatcgccacctcaaagctaaggctccaggcagcattgatcctgaccatgcccagcaccctaagaggatgaggctctgctgagagatcctgggatgctgccccatagggccagctttgcttagaagccactgggaatttgtcctggcagcttaagttatgactcctactttttttttttttttttttttttttttacctttctaagtaaaaaaggagtggaataggcagagcccttggaacaagacaaatggtctgatttcatgaggttctgcctggccagcccacagtggacttttaatctgtcacaaaaaaaaccagaaagaaaatccatgtgtgcaaagaacaaggcctaagattcattcaggactgttaatgtgaaatgacctccgggagaatcttttgaaaaaagaattataaaat

SEQ ID NO: 34570 - DNA, 2115 bp, Homo sapiens
agccatgccggcctttcactgtttctgcaacatggcaggcgtatccccacctctgggtttatggctgattttctctcagcttggaaaggctattcctcctccaggcccgcgtgtttgcaagacttattccttcatcccgtgtgtatgcgctcaaaggtcttctttgagaggcagtatctcaccaggtgtaaagtcaccctatcctctgctttatttttctccacaccacttatcactacctgcaatttttgtcacttgtttgttgtctgtctcccctctctcactccaccagcatgcaagctgcaagagggtctttgcctgtctatgactttaaacctctgcgcttagttagaacagcgcctggaacctaacaggtgctcaattagggcttgtcgaatgattgagttccctccaaattctcttcttgaatctttggacccttcctcatcttttttccggtcttacccacctcccatcccgccctacgcaaagctaaaactccccgccccttcccggtagctccaggctttcccggctccagtgtgcgcggctcctttaagcggactccggaacgccgtggggaaggcggggccgaagcccagccatcgccaacttggaggggcggggcagaaccagggggcggggcctgcgtggtgcgtgcgtgcgcgttctggaggaggcgccgccgccgctcccgaggcccctgccgccgccgctcccgctgctgtcgccgcgcagagccggagcaggagccacggccgagaggagggaggaggaggaggaggaggtggaggaggtggaggaggtggaggaggcgccggaccgggggggtgagtaaggggcggggagctccagacggccccagagggagcggggggcgcgggtcggccgagccgagggtgaggcggctcatgtcgccggtcagtcgcctggctcccccttcctcctccgcgttccatcggtgtcggggcggcggcccgggggcctggccggcgggaggggccggagatctgggaggcccggccgccgccagggccagagccaaccacgcccgcggaccgacccggtcgactgtaggcctgcgggagaccgtcgggaggggccccggccggctgtgggagagaaagaggacattgtgtcccccacccttcagctccccgaggtgtcatagcacaagcccatttccctcgccgtctccccagacacggtgccctcgtacctcactgcctgagagaagtagaaggttggacatcgctgccttcctcctcttgcatgtcccctgtctagggtcagagcttccttcaaacccagctctcccttttgggcccgcgggggcgggggggagggacacacggggaacggggttggagggttgggtgaattctctgtcctctgctgtaggagtgcgggtagactggagcattgctgtctccgggctcacttctgtcagggttcagggtctccctttccttcctttattcccccagttaatagggctgacatctacatcccactccaccttccagcccctttcccgccttctttaccctcatgtcttccgtagcttaccatgtgttcgccttttcagtgttacttttcatgggtctctgcttcttccctgaattttgttagggaagaggtcacggtgtgattcttgttatccttcaaactagcggcttggtaagagtatctcttgcccccttaatcaggaagttaaggacggtgtcttcagccgagttgtgtaatttactgctacggggagaagatgagaggaagacatttgtgcctacaaaatgggatctcctcttagggctgagaaccagagtttagggaacctttgacctcttggaaaaagaactgccattgaggagtaatgcattctgttttgggagggaaaatcattttgttacttctttgaagggaggaggtataagaaatgaaatagaataatagagcagaaggtcaatgagccacagccctacaggtagccagccactcttcttaggtggcggatgatgtttttgttttgattacagtaagaataaagtatcagctcttagatttaacttggggctcctaccttcaaaagcatgaagggccgtctcagaagagatg

SEQ ID NO: 34571 - DNA, 906 bp, Homo sapiens
ttttttaaaaggctaagtaatgagtatgttattgttcattttacgtttttttcttcccacaggttccaatgattttggttggcaataaatgtgacctggaagatgagcgagtagttggcaaagagcagggccagaatttagcaagacagtggtgtaactgtgcctttttagaatcttctgcaaagtcaaagatcaatgttaatgaggtaacctacaactgctgggcagcacaaacaagtgcctttttagtttgctttaagttaacagccagacttttaagaaaaaatttttatcttttaagcaatcttgattccataattttataggaaacactaagtaattcctggaaactatattttttagcttgcataaggtcactttgatggctgtatgaggatacttaaatttaccttattgtaaaagaggaagctaaaattgaagaatgtgtgtaaaatcctgctaagcctctaagtgatatgcgataaagtggtgtgtaaaaattgttacatcaccttatattgtaataattatttacccaaatgtatataaataggttgtaaagtcaagttggaaaataatatgtttttatggatatcacagaattgtgttctgagtcttacctcacctttggtgcatgactcataagtgggtaatctgtgtgggtatggacatgtacctggaattcactcagtcctttaggcctgatacagctgatgcacaaggcttttgtgtggggcatgggggtggggtcactgggttaagcactccactatcttgaaaacagctgtggacaagaatacttagcaaataagctgcatgcctgggtgtaaagggccaacagtttactagtttactgggcccctaaaaatttagagcaatttccaactgtccccaccagtcaacctt

SEQ ID NO: 34572 - DNA, 1848 bp, Homo sapiens
aacatagctttagcgaacaccactcccccgacttcggtgatttccacccccccagactgagctacttctccccctccccgtaccgcggggcctccgaacgctccctgcgcactccccaagcccagacctgacatctggctgggcctccgcagctcccgctctcgatttgccaggcagagcccctcctccagcgcagggccctcccccgcctttccagctgccagccccctccctgctggcagacaagcccaggcagacagccggccaagcctgcccccgcagccgcgccagctctgccaagcccggcagagctgggggcccagggtggtacccgcttccctcgagcgagcagtcccgctgacctcgtgcccgcgcagggatcaggacccagcaccctcctcctccccgcgctccaggtcgccccgcgcagccccgcacccaggcgcccgcgtcccgctccccaggccttcgctctcgcgctttccgcgtcggcggcgcgggggccccactgcgtccgtgtgcctggccgtctctgggcgtgccctatcttctctctggggttctctgtgtcacatttcagcctggctggcttgctccctctgtctctctgtcacttgttcttgtctcatcacaaatctttgctcaaagtttcttcgtggtcccctttcctgaggacaagccctgccctctgcctgcgggcccgcgtcctctcctctcttccctggccctcctccgccctgcttacgtcccggctccccgggggccggggcggagaccaggtgcccgtcggggcggagcagccctccctgccccggcgccagcttcgctcttaccagctcctgtttgaggcgacggagatagcagtccatttccctgctctccatcgtcatgcgcccatttgtcgggttcggttcaaacagagagggcccgggtgaaaccccggccccactggaaactgcgctccgggccggctccccgcccctgcgcccgtagcgctcgcagcgcggagctgagcctgcgctccgagcccgggactcagagtcgcttccccagcggctagccgcgcgcggtcggtgctgggggtggagggaaaagtgggacagccaatgagaattcaggggggctgtcttcagccaatgggcagggcggccgggaggccgggctgggcggccgaggcggaccctaccgcagtgtttgcacaggacccgggcgcagccactggggctggcgaggacacacctggtcccggccagcgcggcggagggcatcgtgactccaggctgtaccgcggcccccaacgaagcacgtgaccctcgtgtggtcataaagggagagcacagttttacggggagggactgggtagcggtctcagtaacaggcagagtgccatagtgtcagtcccttttcccaaactccgatcaggaagggaaacacccccacccactccgctcccatccccagaagtccctcagaagctcttttctccccgaagaggaccctgggaaggtggctcccgcctcactcctagagtgaaatcctcgcagccctgccctcgcgggcggagcagagacgccgccgcttggccggttcacgcctgtcacacaaagccgccgagggtcggctgcgcccctggcaaggctgtagggctggggatactgagtatgacaggcgaggtccctgctctcaagaacttacatgggagagaaggggagacaagataaacaggtaaacacacacacacacacggtaagcacggtaatttcagacaatgatttttatgaaaacatgaaacggggtaagggggtcgggctgctttccctggggccttcagtggggtgggcagggaac

SEQ ID NO: 34573 - DNA, 2124 bp, Homo sapiens
gtgggagacaggcagaagacatataatttcaggtaggtataagtatcataaagaaaaaataaagcaaaacaagagagtgctgggaaaggccagggagcagagaggatgacagagctgtcttagggtgttcaagacctctttgaaaagctgatatttgagcagaagaccacagcaaggaaaagtggcagagactgctagctgcctacgcatgaaatgatgggggaaggagcaatacagaaggcatgtaacatttgagagtctattaggcatcccaagggaggtgctgcggaggcggatgcatggaggcggatgcggaggcggatgcatggaggcggatgcatggaggcagatggatgcacacgtctagagtttaaaaggagatctgaggcggagatacgaacttgggagctgttagtccagttccaggttccaattcaacgtacttttatcagagctcactgtgcgccagggacttgctaggagataaatggggtttatctcaccggagataaatgtggttgcacagcagatggacacaccagccaatgtggtaaataaacccttgggtccagctacgttctgcgcgctctctgccagcacagaggagcagcgagtcagggtacggagcgggtagcgttggggaagaggtggccgcgaagcgagacaggccagcggaacggaaaacggaagcacgagacgggggcgtgacgcaccgggcgcatcacaaagaacggcgagagggcggtggcgccgggggcacggctgggcggctccgcccagaagagggccgagaggcggggcggtgcccccaccgcaggcccgcggcgccctctgcaggccacaggcagcgactcaccagttgcctcatctttcctctcctccctcttggggctttcctcaggccacattttttgtgtgtctgggcagtctctcagcctccgactcccgtccctttcttccacttccaggccgggcgtgttagtgtcttcgcgggaaaactgccaataaagtttttcttcttctcgctcccaagatccccgcctccccttaagcaccgcgagatctgacggcgcggctaccatggcggcggcatttgaagcctcgggagccttagcagcagtggcgactgctatgccggctgagcatgtggccgtgcaggtcccggccccagagccaacacccgggcctgtgaggatcctgcggaccgctcaggatctcagcagcccgcggacccgcacgggggatgtgctgttggcggagccggccgacttcgagtcactgctgctttcgcggccggtgctggaggggctgcgggcggccggcttcgagaggccctcgccggtgcagctcaaggccatcccgttggggcgctgcgggctcggtgagagcgggggcccgggataggtcggggggtggggtgggagaagggggaccgacgggcggcggcggccaggcccgcgccgcagctcaggaagagccctcggtcggcccccggagcagggccctgccgggggctaggcgctacgctcagttaacttatttgtaaaactaacgtgcactattgaacttgaggatagttaagacctttttttaagcactgacaaatggttctaagtttgagaagataaacggtaaacgttcagggactaggcgtgttctcatacgtttttgagaatcaactaaaaatgaaggtgccaactaggggaatctcaggagacccttctagttctctgattccatgttagcccctaagttgcttcagtgagtactggctagtgataattgtttttttccttcgcagatttaattgttcaagctaaatctggcaccgggaaaacctgtgtgttctccaccatagctttggactctcttgttcttgaaaacttaagtacccaggtgagttagctgagaggaccagaggaggatgtgttttgtggactttaccacaggtcagatgaaataccagtagctcctcagagctggaagtgaatttgatgaatgattgagttaagtggtggtggtggcgaaatttggaattttctatgcgtaccttatttaaatagaataaagctaccatatatgtcaattttgtcactacttggtaatacagacagggattcttct

SEQ ID NO: 34574 - DNA, 1071 bp, Homo sapiens
aataagttttgcaatgaaaaactgtaaactatgcaatggggccactggagtatacccttaattctaatatggtgagtctgtaaattatatcgtcaagtctaagaaagcaagggatctgctctcttgtggatctgtggccattagttctcacaataccctttaatcagtgtaggaaagaaccgtgtaggagttcaaagtataggctctgatgcaatattgtttggatttaatccttactctaccagttactagttggatgaccttaacctcccttacctcagttcccttctctgtagagtagggacaataacaatttactctcacagggttgttttgaaactgaatcagctattataggtaaagcatttggaacagtgtctggcatgtgatcagtctgcacacctatctgttgccagaccttagttaaccttcactaaatcctgaccaggggctggttgatcttgggtgatgtaagaggtggaggtgtgaggacactttgtccctaccagatgggcaatacgtgaccgttcccatctaggcaccttggcactggacatttgaggtttctctttttgcctctgcccattttgattagaatagaaagcggactaatgatagcaacaagaagaagaaagagaaaagacaaggaaaatacatttattgaattgttacaatgggctgggcagggctaggtgccttacatattttgtttcattaaatctatgcaacaaacctgcaaggcaggcattactatcctcatctttagacaaagaaattaagtctcagaaaggttgtgtgacatgttcaaggtcacccagactgactaattaaaagttcattctttcatcatatttctttttcaccaactatgtgccagacattgactaacctatttgtctaggaaacagtaaaaaaaaaaaaacagcttatgttctcgatgatagagatgaaaatttaaatcaatctttaaggtggggttgcaaaggaaagttatgagaagcaggaagccctcagcaaggaagagacacttaatctgaatcttgaagaatgaatgggagtcttctgggacga

SEQ ID NO: 34575 - DNA, 3048 bp, Homo sapiens
gaggcgtcataatggaggatctcatatattattcccacatccacctggccgctggtggttggttgccagcctcctgatatgtagcaggggcagagggatagagtccttgaccttcctcttgaaataagttcatcccctcttgaagtaagtttggctgctaatgggagccagccttggactgtacatttgtggtggatattcaactagcagaaaaccaaatcatcacatctcaagaagcaaaaggaggaggctgatgggcaagaataatggccaacatttaccggggccctactatgtgcaattcatatatattaactcatctaatcatcacaagaaccaccccatggagttggtgtgttattattctcatttttccaaatgaggaagttgtggcactgaaaggttaggcaacttgcccaaggtcacacagctaacaggtgggggatgatgtgtgcctgggacaaaagcccccatcagagccctagtgctgtcttgcctctgggttagtggaatgggaagtctgtacttatttcctctggcttgatgccactgccaactttcagactaacaggcagagaagcatgtacgtgaaacctcttcctgtctctttgccgaatcctatttcccagagtgtgaaatgcgcttccctcctgccagccacaatatggcctgattatgcctaataagacacgggcttctagtcagcacgagctcagctgctgagtacaggggagacatggggactctgcttccaccccagcctcctcctgtccagggcacctgctgtggcgcccgcccaaggcaacagatgacacagggcccatttgtggccccttctccccacccctggctcctctgctccattccccctggtggggtgaggtctggggaggaaaagaaggggtaaggagtgaagagaggcaccctcgttgtcaagtgttggtgctttaacccacacagctggctgctgaagccgacagatgtgggaggccaagggaaagggcgacctcattagtggagctaagaggatgctgtaagcactctccctatactcctgccccctggaacagcagttgaggggtaaggggtagagaatgcagagttagctgtaccaggcaagggcactgtgatgattaattttatgtgttgacttggctaggtcaaggccacagggtgcccaggtatttgttcaagcatgactctgggtgtgtctgtgaggggggtttcctgatgagatcaacattcgattcagcagactgagtaaagcagatggccctccctaatgtgggcaggcctcatccattctgttaaaggcctgaataggacaaaaaacactgaccctcctgcaaagaagagaaaattcttcctgcctgactgctttgagctgggatattggtcttttcttgccttcggactctaacagaaacatcagctctccttaggtcttgagcctgctggcttctgtactggaactacacaccaactctcctgggtctccagcttgccactgcagatcttgggactactccgcctccatcatcatgcgagccaactctgaataataactctctttctctctctctacatcctattggttctgtttccctgcagaaccctgactaatacaagtaccataaatatttattggtagggacctggcttggaggttggtaggttgggtttttgcatgtaaccggtggttctgagtcaaagtgtttacattcttgcctctcagcttccagggacgactcaaatggcccctgaaatacagccttgaccaggaaactcagcatgaaggcacttctctggccaaatatttctagatatggcctgtttttcaaagcttgaaattaaagtccatgctcagagctcttcattctttccaagctctgcatgtgctatggggctgaaaagagcagagagcagcttactggagtgtctagatgcaagagagtctggggaaaaacaatggctgaattcaagggggctgtctttgccagttttctgcctccaagaaggaggagcttccctcgtgacatgtagtctctgcagttcctcaaggtttccaaggagggtaccactatgagtgtctcacttatctattccagtgttggctcatccagaaaatttcaaatccttgaattccaaggaaagtcaatgtttctgtaatgcagacttgagtaggtgcatccaggacaggctggtgcggtagtgtggtggcggtggggtgctcagtgatggtgtctgggttcaatcccagctctaacacttactacctatgagagcttgggagagttacttaagctccttgtaccttcatttcctcatttgaaaaaatgggatgattatagtggtaactaccctcctagggttgctgtgaggattgaatgaaattatacatgtatatgtagtgaatggttaacctatagtagcgctatatacactttagccattagcagatgtttttaagttagtggaatagtttacccttctttgtatttcccactaacgctagaacctgcctggtattctaagaattatatatctaataataatatagggagatcctaaacgttctgatttcagacctgacccattgccaggaacagcagtggattcctgagacatggtcttggtcctcaaggacttagaaattatcttacaaagccctgtctactctcactgggttataaactgacaactgctgctggaggaggtacaactgagaacagggtggggcgccatggagagtttagccagccagggtggaatctacccgcagcacctttgggatgtgaggtgagacccctgtggcctcaggctaacttagctgatgtctcaggtggatggaaggtgcccatctcctccaggacatggactgggagagaggcactccaaatggcaacaaataaagtttgaggtttcctactgggacttctttggtagtaccatataaatacggtttaggagcacaatgtcttaagtaataaaggagaaggaggaaaaaataatccagagagaaatcaacttatggctcatttaaacctt

SEQ ID NO: 34576 - DNA, 956 bp, Homo sapiens
ctcctctgtttcctgcctttcctctgagacgcagctggaagcagctctcccatctcagctgctggctctgtctcccagcctggaagccttgcatgtcactgtttagagaaaggggcggcccccctccaggtctctgttgaggacattacatatttggcttgactccatccaggccatcaaacacactcctgtctcccgttcctacccagagagatgcatttccccacctccatctttttttaatcccaagcaagcaattcgggattaactcgacatttgtcagctctgtctgagcacaggcgtgagctcctcggctctctcccaccagacagagcaaagaaaaagtgccttttgtgctttcagatgcacacttgagcttggcagccaagtgtgcacctgcccaaggccgggtgggcacaagtcccaacagctgcccgcacagggctttgctctctcatctggcctctcaggtttaactctgagcgggcttcccctgtcaccagacacatttgtttctttcctaacccctgttgcttctggctactgcgtgtggaaaaatgaatcctctttgtgctatgtcacctccaatgtctctaggagggagaagtcactcagcagccacctctcatgacatcatgggagtccggggcagcccctggggcagggcaaagggcaggggcatggaagtcagttcattctgcagctgtgtggctctgagcactcccttcccctctctgggcctcagttcccctctctgtaaaataaggcagactagatgtctttgcatccctttaaactatagtaccccacaactgtacatttcagtgatacccattttggtccattatctgctgttttgccttatccattcccatatgtccttccctgagaataggtctacagggctggagccagacaagagcaccgtgcttggctcagagtcacatggttctgag

SEQ ID NO: 34577 - DNA, 1756 bp, Homo sapiens
actgagcacttacaaagcatcaggccctgtgataagcactttctctgcattatttccctgacttttcacaacatcctggccaaggcacttacttcattgtcattttaaccaaaaggagaaaggaggcttacagaggttaagcaaacatgcctgaggtgacatggccagtagacggtggatttgtgtgaccccaacacatatatgcttgaccactaagcctccttcctgaaggcagtgagcactgtattgtggccagtattaacagaggggtaaacactgcctggtcaccatgctctgaggaaattcttggagcaggtgggagaagcctgtttcatgcttaccacactgtagtcctctaagaaaataagccctgtgtgtgtgactctgccagggaaaggagtgaggcatacggagagagagaggcaagcaggctcctgctcacagctatctaggggctaaagtggagtttttggtggaggtggtggtctgtaaagaagtcaaagaggtgagtgccgaggagaaacgctgccccagtgctgaagagttgtctgttctgtccacggaggcttgtggcagcacttacaagtcattgggtattatgcttcctgactcacaaagcccctttgaagacatatctcatttaagtaatcataccttgtgagaaaatacaactctggcagggtgcgggtggagagggatggggagaagtttctccagagacagaagggggagaaccacaaaagtaagagaacaatttggtggtggtcataccagagaaggacaaagaggggaaggtgagagaggagagaaaaaatatctaaggcttctcaacctcctctggggcccagctgggccagctcagctgcctcaaggacttaacaatatttccaaactaaacaagctccaaaaggcaaatgacccccggtcactgcctggttcctctatcacacagtagcaggggtaaacatttaccgagtggagaaaggaagagccagcaggtaagccacatttaaagcaggctgaatcagagcagataaaccaaggggccagcatatagctttatcaagttatctgatgtgctggctggaaaagagaaagacctgcggcacttaaatatgagagggaatcacttcaaagcatccaggaatgggaaattcatgctcagtgggaaggacctgggagaaggacttgtcatttggagagggctctcccagggaacccatgtacacaggagactcagaaaattaacatgatatcttgaacaataatcttacaccttagacccaactacagggacagccctggaaaaggagaaaagtcccaggtcctggcaaaggctgtgagccagcccacaagccaacacagtggacctagcacaaggtacccctggctgggtgtaccagagtgatgggcagagcaaggtccagagagggcagaggagctgggagggcagggattggaggcaggctctgctcagaccagctggagccctaactgtggggtgggagggaagagggatgggacttacgcagtggatgcctggcaggggcagcagagcattgccctccaagggccagaggccaagagaagaagctggaggtggtggggattgtggtaattacaagagagggagagaaatgggagggaaaggaagatggcaagaggctgtcaaaaagagctgcaaaggaggatgagggcaaagattacagagagacagaggcagatgacacacagagggtggcagaagagaacaaag

SEQ ID NO: 34578 - DNA, 2128 bp, Homo sapiens
gccaccaccctcagtcccagccaccttgatttcttgcctggattattgtgttagcttctctcttacaaggtatttactatctggcagccagagcaatcctttaaaaatgcaagtcagtggctcaaaaccctccagtgacttcccatgccaagcagagcaaagaaaaagtccttgtggtggtcatgaggaccctacatgagctgcttcccctgttacctctctggcctcatctcctggtactctcctgtctcctgctcttgcagcttgaccatttggaccttcttactttttcaagaacagcacaccaaggtccctcctgcctgttggactttgcctgttggactttgcatctgctattccctctgcctggaatgctgctccccaggctatcctcattccttcaggtctctgctcgaatatctgagaggcccttcttgacatcctaacatgaaatagaaactatcccttgctctgcccaggcccccacactcagcactccatacttgtcatatccggctttaattttctctgcaacctgataaaatgtatttatttatttgctgttgggtgctgtccactagaatgtaacctccacaagatcagagactattttcttctctgctgtattcccagtgtctagtaggtactcaataaacatttgttgagtaaataactgaatggagaaaaacatcatgggtagaggggcttacctatggctccccttctcctcctccctggctccagagtctgcaggaaaaagcgtagccaagtagccaagagttggaggcaaacttcccttgcaagaaagccccaaccctcctaagcctaaaatcagaaccacagaatgccctgcctggcctccctatctccactctgtccacaaatatcatgtctgccatgactatatagctaacattttgatagcacattcatcggttctcatatcgccagaagatggttatcaaatgagaaaactaaagctgtgtaaacaaacgaacctgtttgagtgaacaaatacttattgagacacactatatatcaagctctgtgtaaggcatgaatcatgcatgatctctggaacagagagctcacatcctggcggaaagacacataaacagctgaagttaacaaaatgtgtcaatgacaaaacagagtaatgaaagggctacaagaggaggcaagagaagtgtacccagctcctggaggtgacgtggggctgagtttgaaggatgatgtgtatcagccagacacagaagcagagtgaagggtagtctctggagcaccagaaagagtgctcaagttcaaaggaagacaactgggtctcattcaattcatgttgcctgttccttacattggctgatgtgcaatcatagtgcctgtgtattctcagaggctgccatgctgcctggagtgtaggaagcactcaataagtgttgaacgaatgaaagattccttgttgagatgcagttctgcaccctctcttaagaatttcagcaccagagaactgtcaacaaagaaatgtcaacagagaaatgtcaacaaagaaaaggctttgaggtcgtttgttcccaataggtgtcctaagatccaagtcccctaggcaggggcccacccccaagtaggtggacactattagccagtgtcctggggccaaggtgcttgggcattgagaggagcactgatgggctccggaggcagtagataaaggtgcagataaaatttcaggtatttaagggttaacaaaagcagatctcagactggctccacttctggcactgtggggaggcttatcaagtaccccattctgtggtgtgcctgtattgatctcccaggcttagtctcctcgcctcttcgaacctcaggcaggccccttccaggattatgttttaaagtgaaatgcaaatcacctggaggcggcttcctgcttggaagaagtaaaaatcaattccgttttcattaaagtgatttttggacactgtcaaacgctctctcatctcagagcatggggtgacagataggctgccggtctcaattacataactgagacaaccagtagcagtgagccatctcatcgggatcggacactgctctgaacccttccctaggatacccaagagcagcctcatca

SEQ ID NO: 34579 - DNA, 3494 bp, Homo sapiens
gcactttcctgaactctttttctccagcctcctcaagagcaaaagggaacaagctactaacctctttctctggggggtcccttgtatacttgcattttgttgcattcaagtagagacgaggaaaaaataaacacatcagttcccttcctgtgtgccaacaggtccacatggggaaatgtacacatgctttgtattgaattcgtggacacccaggagccctttctacagacagtaaacatacaggctccctcgaagtaaggtaaacaaggcatacatttgaccatcacgtacattcatgcaaaatacagcaacgcatgcctggtcttacaaacagatcgcattgtgcctaggaccccgagaaagttcagacgctctctcttaagaaatacggaccctttttcttgcagtgcgatttcaggtctggaacctcagcctgttgctgacatatcagggctgcccgggataaaagcagaacatctcggatcctattcaaatgtcaacactaagcaagcgcaggaatttagttgagtccaggtaactttgcccagtcccttcccgtcccccacctccagtgtaaacacctcgcagagtgagtctttcgatccctctccccggggccgcgacggcccttggcgtcacgtagagacctttcccagagctcgcggggtggaagtggcgtcgggcaggaccagatggactggcccccagcctctggtagacacaccgccggctcgccgagctggagaactttgcgaagcgccccaaaccgctccgggtttccactttcagccatttctctccttgtcccctcaccaagagcggggacggagcaagccttcgccacctgtctctggcacccgccgagggaagacaggccaatggaaagagggcagaggttcacaccccacccccgaaccccagcgcctggctgcccggaggtggctccacagcccgagggaaccgacgcccccgggccggctgtctgctcccccacggcacgggccccacccccaatccttccggcgccccagcgcccacccacccgggcgcgggagtgggagggtgccgcgtgggcagccggagcaacaggcgtgggagcagcgctcctcgcacttcctggctccagaaggctcggtcgcgtccctcttaccttccgcgaagccagcccgggccccgcgcccggcgccccgcgcgcgcgaggaagctgcggccgggagccggggccgcggaggcgccgagcgcccagcagcgcggggaagcgcccagcagccgccgctcgcgcggctcctcctcgccagcgcagtctcgctcgctgcctccctcgctcggtcggttcgtgcgtccgtccgtccgtggggccctccctcccccgccgccactgccgccgccactgccgccgccactgccgccgccgccgctgccgcagcctccgccgctccagccccggctcggcagcgcgtcccctccccgcctcgccgctccgctcgcgggctcgcgggctccctcgctctctcccttcccccgccgctgccggcgccgcgccgagcggagcccggccggccacgggctgcctctcccgaggtccctttcccgagggggggaggtggtgggggcgcggcgcaggcggggcggggaggagaggagagtccgggggaggcggcaaggctgcgccctcggctcccctccgatccccgcgggcccagcggccccaggccgggccggagagcgccgagccgccaggcagtggaggaagagaggaggaggacccggagtctcgccgcgggagggtgcccagggcgagggcgtgcgagggggagtgactccgcgcgcgagggtgtgtatgagtgtgagtgcgtgtgtgtgtgtctgtgtgtgtggagaggggcgcgcgcgtgagcggggggtggggagacgaggcagagcctagtgcgtctccccgggcgagtggaggaatcctagggtgtgcctggaggtggcggagtgtaccgacgcgggtgtgagcgcgtgtgccagcgagggtgggcacgggggtgagcgtggcaaggtgagctgggtttgggggtgggggaggagcagggagtacggcgtgagcgtaagttcgggggcgtgtgtggctggggacccacggagaggtggcagggagggccggcgtgtgcgcgcgtggggtatgtgtgcacctagctgtgtgtctatttctcgctgactgtccacagggcagcagcacctgcttgagaccaagcccggcgacctggcaaggtggggccccctaccgcgcaatctttgcggctggcccccggctctcagctccgagtgcagaggctgaagaggtacccgggggacacactgcctctaaccccacctatgagccgctctcctctcggaggacgaaggcaccatcagaaggtcgagattcgccctcctctcccgccacgtctacccactacctagaccgggagtctggacttgggagcgtgaactctcacccgagccggtccccttacaactggagcccgcccagcccctcagtccctccctgaagcccatgggtccccactgctccgtgcctcgtcgacccaggatggggagtgggaaggtcagcatgtgcccacagggccaggtgtccggcccagattcccaccctcagggcggcggcgcgcaaagggcgcagtccccgccgctgggcggacccgcggctccggctttcccggtgtctccagcctcggtgcccggaatcctggatctcggcctggcgctccggaagcgaggcagctccgtgccccagcagggacggggaacgcttggcttgagagatcacatttctgggtgtggagaggtgggtgccgaggcagagaaatgcaaagtgcgttgtgacctctggggtgttctagactgcgagggtgttctagaccctaggacaattgtagacccagggctggaaaaggacctccctgaatccggaacggggcttctggcttgtgagaacccctagccctcttccagatgaaggagtggaagtcggtaattgtggtctgggcccttgtggcccctggcaccttggagtccctcattcactcactcttactttttccggagcccccttcagtctgtcagtttgaaaggtacacaattggcccttcaggaggtgggcgtgggctccattagcgtttgccaggagtcccggagctgtgtgggatttgcatacagtaataatgattaacaacactgccactccctggcagacaggggaagaattcggggaaggccctggcgctgctcccacctccctcctccctttcctctggggaagggctaattttctggcaactgcactcctcagttgctctgacccctgggataaagtgcctcaggtcctgggtggtcactactcaggaggcaggggcactttccttcagtactccatcccatgttcaattcgggaaagtgaaacccatattttatttctgcccaggtttgaactcctgtacattctcact

SEQ ID NO: 34580 - DNA, 437 bp, Homo sapiens
ttcaggtgctgtctcacctcccagggcaagagaagcaggaggaatttgtcctccagctttaatgaggcacttagaaagaggaacaggatggtttcttcttaccggaatcctcgatggaatgcaggcgcaggcagctgaaagagatggtgcaatttgcatacttctggtggattccaggaagcatcagccccatttcaccctaacagccagtggactctgcctgggagggccaacagccaaagagagctttcagtctccaggctgagaaagtcaggagaggaacaagtcaggggacaccaccagccctgggacagcgtggcagcatatccagaagatcaggaaactgccgcagaggcttggtcccctactggaaattgaaagaaaatgaagtttagaaagagcagggtgggaactggtttgcagaacagaatgttccc

SEQ ID NO: 34581 - DNA, 834 bp, Homo sapiens
aaaaaaaaaaaaaaaaaaagagtttaaagcttccatcatggccaagctggcccctacattttgccaaacaccaaagaatctgtctgtccctgaggtggatttttgagctgccagtccttggagtccccacctgctgtgctgtcagcccacacccttaaaaggaaaaactgtgttgggcgggaggcatcagagggacggtcagaaaggaagccgacggctgcaggattcactattcgacactagggggcacaataagctcgggaacactttagggccacacccagaaatctcgtttcctggtgcccgagtctccccagatagggcagatccaagcaagaagagaacgtttaaggactgcccagcaaatcctttgtgggaacaaatgatgggagaaaatgcagaaatgcagggggcagtggagggcacaccttgccttcggcttcagcctggtccggggcttggagagccctctctggctttcagactttgacctcctcatcaaccccggggagaaggggtggggtcgggaagcgtgaggaaaaggagatagtgaagacaagccagaagaaagaaagcatttcttttcatcacttttcccattcatttcaacttctacatctagctcactcagcactcagcatcttaataagtcccagtccagtgggccacagctagaaggagccttatggagtcccagatgtttagttggagcctaggactcagagaagaggattgagcaagatctcccaggtagctaatacttccatgtacatcagatcgcttggatactgacaaccacctggtcttgtagacaggagctattatctcatttaa

SEQ ID NO: 34582 - DNA, 1656 bp, Homo sapiens
tacatccactcccctctctgagttatttggtcctgcctaagacttgctgccaccaagatctgcattcctgtgttcacaaggcagacattccttgcatcctctgtactctccattgtttcaacttcactgcaaacaccattccccacaatataatgaggccaaggaaagaaaaaagtcgcctcagctggcaagcatagggtggaaaaacctgccacacaaatttgcaattatttgacttccgcctggaaggcaggtcggctgggtttatgtcccccaaagttagtatcctcttctgtacaaaatgtggttgagagaagggtgatctccaggtgtttcatctttgcacccttgcttccagcaccacgcccacaggcgcttccagaaaaaagaaaaaaaaaaagggagcaaggaagccaggtttttcaacaacgaattcattctaatgcagacaccaaagcccacttcatttattaacattctggataaaatcccaatcgattaggccaccagagccctccattcctaaactccgcgtacagtcaggtaaaagcacgaagcactagtcacggtcctgcccagacttttcacgcagaggtggaaagttgcagaccccgagccgggaggggcgcgagcccaccctgaagcccaggacccaggagggcgcttcctcccggaagtgacgcgagctcaatcccggccttgctcttcccaaacaaaagggatcttggggccccgggaggagcctgaatgactttggagaagccccgcctccagccggcgcggattggggccgaggctggagaagcaaggaggcgattggcgctggtgaatgccaatgcccccgccgggcggctgagggggcggagcctcagccgctgtggatggggagtggaggcggaggggagcggagcccggagcgtcgtggaaaggtaggagcaactatccctggggcttggtgatggctgggaggccgggttctcaagagcaaagcaaggataggggcaccggtagcctcccgccgccgtctcaacggcctctgggcccatcccctgagggggcggggccgtctcctccacctcccggtattccccgaggaggcggctcctcatcctccgagggtcctcacagctactttttgtccctcgtcgattcccagctcctcagaaggggcttccctctgacacccctcattcaaaggcacctcccaccccgcacctcagccttggcggagaggactcacaggtaccgattctctaggctgccgcccccaaccccatttcgtacccccggaaggccaaacatccctccctacacctgtccctgctcgccagggtgggactggagctgctttcctccgtaagataaaattggtgtttcccaaaaaggagggatggggcgaagcaaaaatcaaagaccgacctagacagccagctttacggaggaagcggcttctcccacttaagttcttcccatcccccattctctgatgctcagtcttcctcccgcagcccctcgcatcctctggcctcttgtgaggagtcgagagctctcctgttttgggactgttttggactgtgaaagagggagaactaggacctcctctccttcaccctttgtaccttccttctactttctgttccttctgggagcacccag

SEQ ID NO: 34583 - DNA, 1834 bp, Homo sapiens
gcttgaacccgggaggcggagggtgcagtgagctgggattgtgccactgcactccagcctggcaacagagcaagactctgtctcaaaaataaatatgtaaattaattaataaataaagtaggtaggccaggtgtggttgctcatgtctgtaatcccagcactttgggaggccgaggcaggtgaatcatttgagttcaggggtttgagatcagcttggccaacatagtgaaaccccatctctactaaaaatagaaagattagccaggcatggtgacgtgcacctatagtcacagctacttgggaggctgaggcaggaggatcgctagaacctgagaggcagaggttgcagtgagccaagatcatgccactgcactctagcctgggcaacagagtgagactctatctcaaaaaaaaaaaaaaaaaaaaaaacctaaactagcaaactgaaggcctaggattctgaccataaataaagtcccttgtcttattttaccatatttacatatttactcagctattatttttctagtgattggatatttcgttatcaattatactcaagtatttatattttatttgaaatttgaaaatacttgaataacaatactgagatgagcctattagagtacttaacatgcagtaggtgctcaataaatgtctgctaaactgagagctattctgggacttcattaggccaggaagttgaccgcttagggctggatactaacccaggaatttctgatgtaatatcctgcattagtaagggatgactaattttgtgctgaaccaaggtcagctataaatttcacttttaaaacataatgattcacagagattacacctaagcttccttcaacagctatattttaatttttattttactatattcagaaagtatataccaaaacacaaacccattaaaaatccagaaaatgtccagaaccttgagccatgattaaagtaaaagcacatcaaaatggaagttttaaaagttagaaacattagaaactgtagagaacattgtgctttcagcacccaaagaaccagtcagcaatcccctttgccctgtccctcagccatgagaggccaacttcttcttcttcccaacttcaaatcaagagaaacaaaccctgctattcaagaaggtgggaaacacatacaagacagcaaagttagtaatattacctaacctatatagcattttatggtttataaagaactttaatttatattagctcatttaattcttttcagtaaccctaagagatagtagtattctcactttataaggtagaaaactgcatagctttagtgaggaaatttcctaaaatatgagatttttatactgtaagagagacctaattatttcttcctggattgctttctgtagattcatttgtcagtcaatgtttggctaatacatcaaaataatggatgactattacagaaacactcccttggaacgaaagttcaaatttcatcactggcttgtagagaaaaatttatcagaaggcataaaagacgactaaatagctatgtgaactaggggaatagttcaactctgaacttatgaggtccataagcaaattccagaatgcggtaagtcatatcaaagttgaaggaaaattaaaaacaaaaaacattaagtactcctgggtattaaaactccttattgttaacaatttgttcattcttccacagtcagagacagaaaaaaatactctaagaacataaaatataatcaaacaaaaccccccagcatattccccctctcctaccttctggagtttgcaccaagttagaataaaggcttgccaagaataaactgtctggt

SEQ ID NO: 34584 - DNA, 2960 bp, Homo sapiens
ggaaaggggacatttgctgccttttgcttcagaaaaatcaaccaccatactgaatcatgtaatggaaatacttatatcttgttctgaggttgctgctcagatcttgagtgaaatataatcacatggtaaggggacctgggccctaaacacttcatcctgtctacagctaaagaatagtacagtatatgagaatccatcaggatcatcacttcttacatgtgttcgtattgtcagcacagaatacgtagcaagtgttctacagacgtcgaaagaactagcaaacccactgttgtttgtggcgctctcacttcctgtactattttattactcaagataagcctaaaagaacagacaaaactatcacgaaaacgatttcttaacagaactattttaaaacaagagaatcctcaattaaaatcatgccattttctttctctgaaatctttaaattacagatgtgctcatctttgttgcctggatatgagttctttcagctgggcagcgggagactcaaagtagtgacttttaagggatcctaccagaggtgggggagccaatataaattacgtatcctaatctgagacactcttctgtcctaatacctgaagcttatagcttgtcaggtggcttttccatggaaaaacgaggacataagagagagggcggaccttaagagttctacggaggagccggtaacggcagcaggcttgtcaatcaactgcaaggttgcagcccaaaagaaaaagaactcacttgatcgctcatcatcgactcctcagaggccctctaggactaccgagaatctcttgccctttggctcttgcccccgacatctctcctggccccccgccctgccccaggaggtctggtcctctcacccgctgccaaattctcacacagcctcaaagggatcctcagggcgtaaagcagccccagccccgccacgaaccacaacgaggccccagtccccgccagcccggcccgcagtcgctccctccagcctagcgtcgggtttaggccagggacagatgcaggagacgctccaacagctgcggcttcacccacgccgccacggtccgccatcttgccgctatcgcaggcgccaggagctgggaggggagaaggacaggaaaccgggagtcgggaatcctgggatagtggcggacctgaagttggcctctgtgaaggctgagtcctggggaaccgggaccgagaagatttcgaaggtggaggagcgtgtctcaagattggggctacctgttctttcgtggggcagggaaggggcggacagcagcgcctattctggaggaactggactgagatgtgaccccgaagtgttaccgcttccaaacgaaatgagggtcacctttcacaccgccccccccccggggttggaaaagccaccgatcgttccagctgccgagcagctcttaaagctttggattcggctgtcgtggagataacgggcaccagaaaaacttgtaggagtagcaacagctatttggtcggatggaggccagaagccaagaataatcgaaacacgctgccagcgcccattagatggatgggaaatgagtgtaactcattgggaaagatattagacttcaaatcacctaaggcaaaccctacttcctggggcgcgggcgcgggcgctggcgttaggagacgtcactcccgcgcataactgacatggggccctcttggtcggcgtttccgggcgggtccttccgacggccgccgcggtgattccatcactcggctttcttcccggcctgcctcgcgcccgtagccgggctgggccagaacagcccaagatggccgacttcgatgatcgtgtgtcggatgaggagaaggtaaggggtccgcctctctctcttacctcctcccccgacagggaactggggcccggcccggctgcgttgggagcctagcagtgtccccaggaaaaagaagcttcttggtccatgctgacatacgctctccgcagtcgggacgcttccctcttagggggctttcctctgcctcacggtggccccagttcctcgttcctcgactctccttttctctcaggcctgaggcacagcccaggggcctccctgcaagggaacagacgtttcctttattggatcgtgactgtggacttttttctgtaattttgcgagagggtggtggttatgttgcgacatatcaaaaagcagttattttaccgcctttagcagttggggctcaccccatccccccatttgtagatataattggggttagtttagggcgagtcacttcctggtcaggatggcctcttaacttcccttttgctcctccttcctcaggaagtgattttgctgtcacgactcttcgacaaggagaggtcccaaatgttgtccatctccctacacatgcactacttttctcctgtactgtcgcctgtctgattcgctataataaatctgtgagcctcagggcatttgcttcagaatttgaacaccagtctttccctatagacacatcccttttaacgataatttttgaaaattttgtttcttgttaacaaatctagaatagctgatggattttcttaacctccagaaaggttttctgtaacacataataaaccttatgttaacacgttcaagactgaacaaagcatcctgccttctttgatgctccactgtggagtctttgatcagttgaatttgtcagtgtgcattttgtatgctcatttcttgaaaagggtcttaaatacaagagcacattctaaggtggaataacttttcttctgacagttgcacagtttcataacagtttgtcaggcttttcagtaagtacatggttttagggcacgtagaacttagaatgacctcacaaggcaacttattggacaagaattatgacatttgtctcccactgtggctattagaaaatgtgtccccttgagtgctctgtaaatctacctgggtgtt

SEQ ID NO: 34585 - DNA, 2484 bp, Homo sapiens
ctctctattcttctggaacctcatcaggacattgagggagaaaaaaggtaaaatctttggctgcttttctagttttttcttctactttgcataataagtttgtaagatgttttcctctgccctattttacccatccccgtagctttggttcccactgacattgcatttcctgttgctaaagcctgttattcctggcttcatttggttgttggcctgagagaaggtaccgggtagcccagctggagtatgacctgggttctggactttcttcaattccgtagattgagtgtgtggcctcctgctggtagctactatggagaacaacactagctttgatttatttgaaagtgatgtatttgatttaaaactttgtagtgtaacttagcttgtcccattctagtgtgtgtgtcatttcattctgcgggaaaaaaatagatacaaaggtttgttattgtagccccacccccttaaatttgtctatacagtcttctgaagcacactgcccttttagttctcttcttggtactgatgctgtcactattaaccacttattattgcctaacacaacagtcccttacgctcaagatgctagtattttgatgaatataagggtccaccttatataccagtaaaaattaaagagcaatacagactggaatgcaacgaagcgcccaaatatgtggctcaggggtaagggtcggtcaccagcctttccacataagccgatgtggcagagaaaagcaattactgtgtatcctggcagagccccttgtccctccctcccacacgtacacacctttatctcagagacactgggttcttttccccaaacttctttgacccttatgccaactacgtgcgtctgaaagcccgagaagggaaaatgggggagggggcgtgtcgccccgagtttacgtccctggaaggctgggggaggcgctggatgagcttccccattccggccgcagccgacctagatcccagccctgccctttgctctcctgcttttcactgagtcccgaggctctggagggtgggcgtgagggtagccctggctgaggctcggaggtcctcccgggctgttcagagggccccaagcggtagccacgttctgatactggctagaagccaggggagggagcttggggtaaggggagggccctgagggaggggtcagacgctttaggaaagagttaatgcgaagagggggaggggataggacgaagaaaccgaagggaaagctcaggtaagaaaagaacggaggagggaagcctggtggggagaagggagcccgcaggatcaggggtcagagttagggggcttccctcctgctgcaccctcatctcagggccgccaacttccagctgcagcggcgactttcagtttcatttccacggaccctcctgcctgggccgcagccgccgccgcgatgcccagtaagttcagctgccggcagctccgggaggcgggccagtgtttcgagagtttcctggtcgttcggggactggacatggagacagatcgcgagcggctgcggaccatttataaccgcgacttcaagatcaggtacgggccggcccactcccggccccgaatcgcgggcccagcttgctgccacgacccccgcgcgagggccacctttcccgccccggggcgcagagggacgcagctcccccagcggctcaggccagtcccggggcggcgcagacctcccctcccgcgcctcgcccacgccccaccagcgccgcccggagcccgccagttctgcccgagctgggcccctgcgccaagtcgccgcggagagcctcccgcgctgcccgcgcccccggaggccggaacccggggccgggagctgcgtcccgcgtccatgcgccgctcgcgggggctgagggacagcgctcgcggtgggggaggggagcctccagagggggcccaggcatcgcgggagcgcgggttagaggctgcctgttgggggctgcgagcccgagcgcgggctttacagggacctctgccaccttgttgaggcgctgctgcctcgggggtccgctatctgggagaactgaagaggcccagggtagaagggagaagctcaggaagctctggaaagaagaaaagggcacaaactacgtgcgtaccaaacctccattagcacctgtggcttctccatggagacccaggggcagagccagccttctggaggctccctttcaccctgtggctgaaggctctttggtctccttttcctgctaccacccaagtgaaaatcaaagagtcttctgtcacaccacagaattgtgcttcaaaaacacgtttatcaacaggctgctgccttgcgtggaaaaccaagaagcagtttaacaagggtaaacgtaaagacttgtacaaataaacataaggtagtgggaatctgggcttaataacagacctcccgaaaaagaccttgggttttagcagaccagagggccagtatgggtgagatatggc

SEQ ID NO: 34586 - DNA, 1240 bp, Homo sapiens
gtgaaggcaacagcccatccttcttcaaccctgaagaggctgccacagtgacttcctacctgaagctgctcctggccccctcctccaagaagggcaaagctcgcctgagccctcgaagtgtgggcgtcatctccccgtaccggaaacaggtcaggtcctcagttaccagcaagggtggggcccctcccccagatggtacctccttaatatccagaccactaggcagaggctccaggagcttaggcctctgctggctccgtatctcagaagagcaccaaggtcagctgccgcctccctttgttccccagctccctggcctcctgccaggctccctcttgcattaggttaatggcacgagagaaaggcacctgtcccctccttccaggtggagaaaatccgttactgcatcaccaaacttgacagggagcttcgaggactggatgacatcaaggacttgaaggtgacatgctgttccacagtcactccctgccttccgtgtgcccccacttgcccacttccagagacttcctcaagcttccactccagcccacgtccccgtcccacccctgctgccttgaatagagctcgagctctccctgagcctctcactcctggagattccaacttaagggtctgggatgggatcaggaagcctgcatgtttaacaaacacctcctgtcattcttagactgaggcaggtttgaggcctctgccctaaggataaagtccaaattccgtggcctgtcatgtgatgctgccacccccacccccagtagcctctctcttaaggttctggtctcaacactggctgcagataacaatcacctggagagcttttaataccccgcccccatgccagggccccacccaccagctcatacagctatcggggcagagccagggcactggtagtttttacagcttctcaggtgattctaatatgcagccagggttgaaaacactgctctaagacttacaggcctctctcttggaaattctgatcgggggtccgggttagggcccagggttgtatattcttaacagatacttagtgattgttttcaggaaagtttgaaagtcactgctctgagttcccgtgttctttgcaatgctgttttctttccttagaacactttgcaggccccagccctcagcaggattcaaccttcatgtttcagcttccacagcctacctcccatcccctttccctgggccgtgtcgcagcactggttcactcact

SEQ ID NO: 34587 - DNA, 2080 bp, Homo sapiens
cagccagagctttgtgcagctggatctggactttaatctgggtttccttaagaaccccaaggtttgagggctggtcggggtggcaggaattcttccattctcggggctcttccctcccatgaccacaccacttcttccttccagaggttcaatgtagctgtgacccgggccaaggccctgctcatcatcgtggggaacccccttctcctgggccatgaccctgactggaaagtgtgagcattcccaccccattctccctcttagtggccacagcccctgcctagggcaggtggatcttttttaagcgcttgcttatcgctcagttaatcctcagatgtgtccattttcacagcatcactattgtatttataagttaaatgacatccagaggttgagcaagtacagctcagatgggacaggaccgtggcttagcctccagtctctgctggcactcctctgtaccccacagattcctggagttctgtaaagaaaacggagggtataccgggtgtcccttccctgccaaactggacctgcaacagggacagaatttactgcaaggtctgagcaagctcagcccctctacctcaggtatggctgggccagggtggggacagtgccagaggaggtggtaaggaagacacagtgtactttctctctttccagggccccacagccatgactacctcccccaggagcgggagggtgaagggggcctgtctctgcaagtggagccagagtggaggaatgagctctgaagacacagcacccagccttctcgcaccagccaagccttaactgcctgcctgaccctgaaccagaacccagctgaactgcccctccaagggacaggaaggctgggggagggagtttacaacccaagccattccaccccctcccctgctggggagaatgacacatcaagctgctaacaattgggggaaggggaaggaagaaaactctgaaaacaaaatcttgttctatgcaaaagccttgataatgtctcctctgcctggccccagcttcctgagcccctaagctgaccctgtagggaagggtgggactttcagccctgctgagggtcacatcccctcccagctggagaggaacccagcccccacactcgggggaggaaacccagtgggaggtggcagggaagccacccacaggtttctaagtttagccccctgctacagaccactcccttcacccgcctccttggcccagagccaggcatgacctcatcctttgctctaagactccaccctgctggccactggcctgctttgtagacagggggccaggctggcaagcaacttggacatgaaaagagatgggacaccaagcacccagagggaaagaccgaaagctgccacacacgttggagcctgtagcctttattcatgcccccctgaccaaatgcagtgagagacaaggcccctgccgaaaacaactccaggggcctgggactctgggtcccctactgcagacactttcctgtgagccagaagtgtataaagtgctggtgtgtgaccatcctttggggaaggtcaaagggggcaagatccccaggggccctgaggaagggcagggcataggcgtggctcccagagcgctgggagggagggcccgtgccaccacctcggggctagaaaacaatgcagtcctgggcaggagggaactgaaaatgggagccttcagcatggagccctcaggaggctggggttgtagggggataatttctgtacccctgtgaagggagggggcatgtaggaaaggccttggggatctcagagaatgggacagcccctccgacgcttgttcttgcggacctggaggccagcccgagtggccatctcaaacacctcccgcactccctccttggtcttggctgagcactcaaggtagccaaaggcactgatccggttcgccatgtcccggccttcctcagaccgaacgggctcctgagaagacataagatgaggggtcaaaggaagctgttgactacatgaacctctcctgcctcacccataagtgtagcagctggaacaaatgcctccttctccagccctgacccaga

SEQ ID NO: 34588 - DNA, 3782 bp, Homo sapiens
gaatacagtggtgggaggtagatgatgaccccacttgggagctggaaaacatgagtttcaatctaatccacttgccaacctggggactccaggtagctagagagctgctcagggatgcgggacgtccagggagcaagcttctatctacttcacacatcagggtttcgagtcagacttcattggttaccaggattttgatgcatttacagtttaataatctctaaggtccaatctagaacagactgtccctcagcacaagtcatacctgtccagtcacaaatgaggagtccctctctaggaccagagtagcagaaccagctaccaggtggtaggtgggtaaaggaagaatagttatagagcccctaggtgccaggcactctgtcgggcattttggcaggaattatctccttcggtacccagatgcctggaaggtagatggtgcactttccattttgacaaaccaggaaactaaggctcagtgaggttaagacagattcagagctgtggcttataaggggcagggacagcacccaaagcaggactgtgtgactcaaagtcgtgcctcttcgacatgtcacctcaggggcaggagggagagcagaagcagggaaacccagacagaggacaggggtagcagccagccagcttccctggtccaccccacccggtccccaaagccccaagtaatacaaaggaggctcagtcccagcaatgcccacagctcgagtttgggcaggctgccttcctccccccttcctcctaggcctgccagcaacactgggtcactcagcccccggcaggggacaatgaccacactgtagggagccacacatctaccacagcacagtgactgagaagaatccaccagggaatcacctccacccactctggaacagccccttcctccctcagtccagctcacccgcatgccctgcccacccctccctgtgactcagggcaaggagtcagcttcccgggcttccatgtgtcccccacccccagcacacacagcgagcatctgcacagttcatcacaccttcgcagcttccctcacttcctccttccctggggaggggaactgacctccagccggctgaagttcccaggctgcaggaagagagggcgggctctggagctgagatgaagtcaaggctgttgggaagggggagggggctagagtctgggctgggaggagccccaaaagaagagacaaatgagggccagtcccagcaccaaccaggcagggagcagttaagaaagcgacggtaacctgatctcagcctcaaacctagctttttctctcagtcccacatcctgtcaaactgggctgactgaacgcctctactccccacaccccaccaccacctcacactgccctttaggaagcgaatactccagccccaggcctcttcccttcaacatagatcctgagtggcccttcccttgcctccagacacattcacaaaactgttggttttgtggacatgagtcagagaatttacaggagttcaaagtacacagccacactcttcccaccacaaaacggactctctctgattccccagaagacaagcaagaaggcattcaccctgtcggcagatcgcctccagaaatggaaaccatcctccaaaaagagggttccttgggaattctatcccggtgactgacgctgggatttcttccaactcctccacccactccattagttcaccttgccctgttttgtaaagatgggctggggtagccccaacctggggtgggcagtgttgatggagggcaatcactactggggtgaaagccagtcacttaggcatgagtatgccactgctgtccccccagcagggtaattcagacggcaccagagtggtgggaggcagaggacagaaacccggggttgaggcatgcgttaagggacctggagcctccagcccaattagaagactttccctccaggctatgattgggccagaacagcaggcagcccaggccaggacactaggcccaaggccaagatggcatggacaactccctgtgagaggcagccccagagggactgtcccactgaccccttaagaggggcaactgagccccacacagggcctggaatggagcctggaacttctggggccttccccaagacaagacagtgtggctacatcagacctctctccaatcgctctcttgaattcccagatgatccagagcggccggttgactttgccggcccaccctacacctagggaaggaatccgttctggagataccaagagatactgcattctcaactttaaaaccagagtgagggcgggactcggcctcgggatcccagtcccaaaccccaggatactctttcttggttcgagtatgaagaaggaggattctcaatctcattttctctctctctctctctctctacacacacacacacacacacacacacacacacaccacacacacacacacacacacacacacacacacacacacacacacacacacacacacacacacacacacacacagagttggatccttccccatctcccttatcctcaacacaagcgggctccaggaaccgtccagggcggcgtccagaccctgccgagcagtggcaggccccaatggtcacatcccgcccctattcccgccatacctccctcctggcctggaggaattcccaccccatcccactctaggtcccctgcggccgcccaccctgggggctggggcgtctgagttgaagttccctcgcccctcgcccggcggggcaggttccgggaagctgggaggagaagggaaggggctccgactcggacctcaggaggccagagcccctgccggcaggtccgggccccctcgctgcagcccggggaggggccgacgcggtccgaccaccgcccagcccggatgccgactccgcttggagggaacggggtccacgcccaggccgaagcccctcctcgcacgggccccgatctccgggccagcgaggaagggaaagtgctctcctggggacgagttcccaagacgccccaccgcccgcagccccggcccagggtaccttccgctccgccgcctccagctgcgcggccggtgccggaggctcagactgaccccagggccccgccccgccctcctccagcgccgcggcggggagggcgggcccggcagggggagggtcggccgggggcggcccttggctcggcccgccccggccccgcgcagggccgcagccaccggccccctccgcaggccggggactgggggccaggggcgtccacccctccaggtcggggagagccacggggagattcctggactgcggaggagccgggcgagcggggggagcacgacccgggtggactcagactctgcccagccttcaatcccctaggggaggaccggcgtcgggaaagttaagaggtgctcggggtggggtcaggaagggccgctgctgccctcctgtggccaagcggccacccgctcctgctgcacctgggacctcgcgggaagcgggactgggaaagggtatccgccgggaggtcccagggcccggcgcgggtgtgttggttggggggagatgtccaccctcttgttcctaggatcgtacagcccaacgtcatcccccaaacttgaagacctctcagagccgttcagacccagaccaccgttcctcctcacaattcgctttcttccctgggcctggaatttccaggagtccaattcctacctactcctcaaagggtgcgcctagaaatgcttctggatcccagctgtgaatt

SEQ ID NO: 34589 - DNA, 801 bp, Homo sapiens
aagaccagaggatagcaaaggtccacggaaaagggagctcctggcccggacgcggcgtggggaacgcgtcctagcgccggggatgcggagctggggagaggggtgggagccccatcctggtttgggtgccccagggggcgctcactcggcgtagcctgtgctccagggcaggcggcggcccgtgtccggggggctttgcacagcccggcccgcgtggtcatcggcgcgtcgcagccccccggggctcagctgcagaaaggtcggtctggagaagctcgctcgagcctcaacagccttcgcgggcgtcgcgctcccgctcccagccttcgcgggagggctcctgggcgcttctggagcggcggcgggcggcgccgaggcggcgttgggcaggtccggggatttggggcgcggaggcggagcgcccccggagctcaccaggtgcgccacggccgagcgcacccggtttagcatgctgcctccctgccccgccctcggccgcggccccgcccccgcccaggccccgcccccatggctccgcgtgggcggtgctcgcgccagccggcccttccctgctactggctcccggccagctgggcgggtcccgggcgaaacttgcccttgctctgggccaccccaggaaccggcccacgggtccccggcctctgccccgccccattccggcttggccccgcctccgtttcttaggggtaggttctgttgctgtgggaagggggcggagagaaggaaaccttatttcagccgtgcgctagattagacacagctagaatgtctccattgtga

SEQ ID NO: 34590 - DNA, 2646 bp, Homo sapiens
atttcccacaaaggcctgccaaacataagctcacaattgtgaacacatcaagaaccaattaaccgtgagcaaacgcaatgccaatctaacacagttggattagacactcaggaactataggcatagcaatatgaatatttaaatgactaaagacataaaacaaggcatttaaaacattagaaaaaactgtgtatttctctaaaattatgtctttctctaaaaaagatccatagaagaagattaattgatttgaaatagaactagaaatggaaagtaaagttagccaggcatggtggcttgtgcctgtaatcccaacactttgggaggccgaggagagtggatcacctgaggtcaggagttcgagaacagcctggccaacatggtgaaaccccatctctactaaaaatacaaaaattagccaggcatggtggcacatgcctgtaattccagctacttgggaggctgaggcaggagaatcgcttgaacctgggaggttgcagtgagctgagattgcactactgtactacagcctggtgacacggcaagactccgcttcaaaaaaaaaagtaaagtcagtgaaattaataacacattaactggaagactggatgtagctatatacagagtcagtaaaccttaagaataggtttgaagagattagtcagaattcaggggagtgtcattctgaagctatgaaagaaaggctttagaatgggaggatctgacatttatctaatgggactttggaaaaagagaatagagaatggagaagagacaactgtctgggtaaatgactaagggttaatgactaaggatattatagacttgatgaacaatataaatcctcagtttgagaaaacaagataaagagaaaaatcttagaagacaactacttagaaaatacagatgactcagctaacaaatattcatactgacaaaacagtcttcctgacaattttgaaaaattctcacctattatgtcttcaaatattgcttctcccccattctctcttttcacttttctcagactccaactggatatgggttggaccttcccatgctatctactctcttactctcccttctatgttgtcatgttatcattcattcctttgtttctctgaacttcattctggatggtttcttctgtactttagctgtgtttggcactaaagattaaggtgatgtaacttaagattaaggtgatgtaacttacaggaaatagctggccagtcctcattttcaaaccaatcaagtaaaagagatttctgttaaacaaaagcacacttcattttaattcaaataaatgtgttgatacacatctctgtgataactatctcatttttataataataattctaacttagagaaggcagccgggggcagtggctcatgcctgtaatccaaacactttgggaggccgaggcgggtggatcacttgaggtcaggagttcgagacctgcctggtcaaaatggtgaaaccccaactctactaaaaatacaaaaattagctgggcatggcggcaggcacctgtaatcccagctacttgggaggctgaggcaggagaattgcttgactctgggagacagaggttgctcagtctaggtgacacagcatgactctgtctcaaaaaaaaaaaaaaaaaaaaaaaaggagaaggcaggagtttgttgtccagatgaaataatttttcaatattctccaatatttctgacctaatctctttttggatttctatcatgggactctctctaggactatgcattctggaattttcccttcctttgagatttttattgcttaggacagtgaaccaccataagaaatgggatgaataagagatacacctctcttttgtagtgggagtaaaaggcttttggataactcaagttggaaaagaaaaagtagagatcaggcatccattctcaagaggtaatttttagctaaggttatctctcaacctgaggatgtgcagaataattccttcaaaaatataacccagtttaaaaattgaaggtctttgtcctagggcatttcatctacctaggatttgggtgagataaaaatatttacaagttaaggtttcctaaaatttctactggaatgaatatgattaaaagctatttaacaggtcagctctgctaacagcaacagcctgaattctaaaatgatgttaaataaaactgctgcaggcattgattttatgagctttttcttcttctaagtatgaaaaaagagaacacttaaaaaatttcaaagaaccactaaaaagattaattcatctcagaatatttacacacatagaacacccacacacagacagtagggctgtttaacacatcaagctctgactagaacagctaatacgtgctggacgtgattaaactttgagtttagctgccagctatgatttgtcccaattaaggcagttacaatttttagtcactaaagcttgcctcatcaagttaataccttattccacagtgccaaaattagatttaaagcctcaagaaactttagaaaaatttaaaaggaaataagaaagtataagaaataagagcatgcaaaatcattatgaaaaacagaacacttcaaaaaaccacacacagattcaacacaattctgccaccacctgacaaatggct

SEQ ID NO: 34591 - DNA, 2216 bp, Homo sapiens
ttggtcatttctatggcaatctgaaggcaaagtcgtgccccagggtgtaagacttgaatttatgggtactatttaacacctaactaaaaaactgaagatacatagtctttgcatcacctcactgggctggtggttgggataaaaaaattgttgaaaccagagtaatttttgaaaaaaaaattcaaaacaagttatagtaagttacagtaaataaagtagcttagtaagttacagtaaataaagtagcgtgtaaacattttactgttatcagtagcagcccagtttctaatcagccactggaaacccaaagaaagactaaagtagtaacaagtttgtctcctggtttagattaattacaaactagttttggcaactgcttgttccatcaaatatgtcatgacaaagtaataaaatgttaaaacgcatgctggaaaaaaaaaaagacgtacttggaacaaaaaacttgcatcggaccaagtgtaacgctatcctccagatttctctcaacagggccgccttaagtccatgagtagaagggcgctgcggcggacgctggcagccacaggttgaatgacaaagagcccccgtcagcaccactcccaggagtctgcgggctgccccgtcccctccgcaaagtctactcgaaccctgcagtcacgccttggctgtggggaatgcggctctccgcaccactctcgcaagtcaccaggtggggcaaggatcggcgggccaagaaggttggggcggacaatgtcacgaatcataaataacttctgccccgagtcccttcccttggggcagaagcggccaggagagtctggaggtaccacatgcagcagcctcatgttatcccttttccagatcaaagcatctctcgaggagcctattgaagacttaggggggaagggacttccccaccgtcaccgggcaccacgacccaactcctcggccaggcctgggaccggcatcttagcacggggcccgcggctcggctaagagaggcgctgaccccagcgcctcaaggtctccttcaccagcactgcagtccgaggccacgcggctgcctgtgaccacgatgccctctgctgggccgcctccctccgccggagacaaagtctcccaaccccggaggtcccctccgaccccaccagggcagcgagggcaccgtggggtccgcgccgcgtgccgccggctgttacccaactaaccgttatatgcgcggatcgcagcgccgagcgtgtgcgtgacgtggtggcgcaggctggagttccacggggcccagggtccggctcccgtccttcgctcgctgcctcgtttgcttgttccagtacccacgcagctagccagtcacgtcgcagctcaccactttgtctggccgggccagcgaggctgccttataacccgccggggccggagcatgcgcgcagggggcggagtcgtctctcccggccgccgccccctccccgccacacagacatccgaactgcagcccgcgcctccacacgctttcagccgcgcgcgccctctagctcgcccgcgcgcgccggcgccccctccccgccacgtgaccggcgtcccagtccgacccgcgcgctgcgcccctgctgagcggcgcggagctaccacgccctgccagactcgcccttgggtccctgtctgacgagctctaggcaatctgccctcgttcgggacacaaccatcggtctcacccctcagtttctgccagagaaaaaggaaaagtcaccgagaggcctgaccctgacgggtgggggagatgcgcgtgcggagtagcgggaagcgactgaggagcggggaatgggcagcatttgaatggatgcgggtgccgctggcacccgggaagacgctgggggccggcgctgtagagccgggcatgggctgggatgtgtttggattccaatccgggcctgacaccagttcagtgacctcgggaagttccccaaccctccgggcctgtttcctccctctgaagtggcgacagtagtagaaccgacctcgtaggctcatcgggaggtcctgatgggagaacccatgcaacttgccaccatagagccaggcccgcggcggttggcgcctggtgggtattaaagacgagtcgggaaagaagagcaggtaagagggtggggagactggcccagtgggttggggtgtgcacctcggccacgtggaaaagcgagaatgcagaggccggacgctta

SEQ ID NO: 34592 - DNA, 1221 bp, Homo sapiens
attacaggcatgtggcaccatgcctggctaatttttgtatttttagtagagatgggatttcaccatgttgaccaggcttgtctcgaactcctgacctcgtgatctgcctgcctcggcctcccaaagtgctgggattacaggtgtgaaccactgcgcccggcccagaaaatttattaatatcaccacttcttatttgactctggcagagattatatcttgcgtgatctctataaaagtgggacccagattaatttttgccatcaacgcgtgtttttccaagaacccagccgctccagaaaaatctattttatttgcagaactattgcaaaatctgacactccacttcactggaatgcccttgtaattgccaaatgttgtcttgcctcgtggtaattcttggccagacctatggattgccagaccttgcagctgtttacccttgaagtccaattctcctaaaacatcaaatccagtgacatttcttaatgacctaataagagtcggcactgagctagttgccactgagggtatgaagacatgattgctgcccttaagtagttaagagtttatatgaagacaaacgaatattttcaatagcatatacagacttcagtgataatttagatagtaaagaaacaaaggcatgacacagaaaaaaaaaagcctttaagaactcactggagggagagacatcaattctaccctcttgttttgttgttgttgttgttgtggttgtggttttgagacagtctcactctgttgctcagcgtggagtgcagtggtgtgatctcagctcactgcaaactccgccccccaggttcaatcgattcacctgcctcagcctcccaactacctgggattacaggcacccgccaccatgcctggctaatttttgtatttttattagagatggggtttcaccatgttggtcaggctggtcttgaactcctgacctcaagtgacccagccacttcgtcttcccaaagtactgggattataggggtgagccactgcgtctggccatttatctcttgacctgaaattactcagtggcaccattgagatttctgccttgaaaacggtccacctctttttttttttttttttttttgagacagagtttcgctcttgttgcttaggctagagtgcaatgatgcaatctcaactcaccgcaacctctgcctcctggattcaaaggattctcccgcctcagcctcctga

SEQ ID NO: 34593 - DNA, 900 bp, Homo sapiens
tgacatttcattttcttccataagctctgtttcccaccagcaaacaaaacatcttgttaaaacagagactgtccacttcaagcttcagatgagaattacagtcagattccagccctgctatttactagctacgtgaccttctgcagggcatgttaccgctctgggattgggtttcctcatgtggggctgtagaaggtgcactcaatttactagatagaggtcaaaggatgtacttcaacttctggctctgccactttgttgctgtgcgaccttggacatgctgcttggcctgtaagcttccgtttctataaaatagggataacgcttccttccagggaggttttgaaagtgggatgagggatctaagatgcctaggacacatgagtgcttaagccatgttagtgtcttctcctttctcttcacctgtttctttctgggctgtttttgtttgtttgcttttactttataaaataagaacagtgaactacctattatgcagatctcctgcctttcataatgctttataaactgtgaagcagaaagcagaatgtgtggttgtttgggcaccaggaggacaaaggtccccaggctttgaatttctctgacctctctaaattgtgtttgaattccagagaagagctctgtttttctaggtgagaattaggcaagcttttcctggagctcaccccagtcagcaccctgagggctgagggctgagggctgagggcttcccttccacaagacctccctgtctttgtgaggctcagcatcacaaagccacctggggagtcaagggtaggtattgttcttcagagacacctggatgctggctcactccctgaggaggagggaaagctgctctggcctttgaaacattgtattgaaaactcacacacagaa

SEQ ID NO: 34594 - DNA, 787 bp, Homo sapiens
tcgacactgcactccatcctggcaacagagcgagactccgtctcaaaaaaaaaaaaaaaagaaaaactctgaaaagggtaaggaggaagtgggattcagtaacctacaaagcatttaggcaggacgcttttcaaaatgcagttggcagaaatggaagttgaactgagtgtggtttccagtacagggcatctggccaccttcacctcagtaaatactgctgatcgactctctctggctctggctgtcctgccagagacagccaaacacaggagacatgacaaattactatcatcttttgcttctttatttttattattattatttttctttttgtggagaacagcgtcttgctgtattgcccagcctgatctcaaactcctgggctgaagctgttctcctgcctctgcctacccaagtgctggggttacaggtgtgagccactgcactcgacctttatttttattctgtatactcatcagtccccttgtgccctgataatggctagaaataggagtttctcttatatacagtagcagggacacactttctctccttctctttcctttctaaaggacaatgtcaaggacatgtccaggacaggtcagagaatgttatatcagagatactgctgctatatttacccccacttgcctttcaagcaaagcaatttatatgattaaaaacaaaacaaaacaaaacaaaaaacagcagaggcaaactgtcctgggtatcttcagagaagaaaaacattgaattttaaagctatattttactttgcagtaaattt

SEQ ID NO: 34595 - DNA, 450 bp, Homo sapiens
acatctaaaacatccaattaattcagagggtgaaaaaaaaggaattggcaggcaggtggggatgaacagatgtgcctgtgtcatagtgaaagacagatttgagttatggtccgttaaaaaaatttgtgacattcattgagaagttattgtatgtcaagcatcttgtagttcaaatgtattatctcattcatctagttggcaagcctatgagatagtttctattattttacaaatgagaaaactgatgcacagagaagttcaataatttgttaattattaatagcaagtggcagagtcaagatttgaactatgtctctttactattaaaagtccattattttggccaggtgcggtggctcatgcctataatctcagcactttgggaaggcagaggcgggcagattacctgaggtcaggagttccagatcaggctggccaacatggtgaaac

SEQ ID NO: 34596 - DNA, 2292 bp, Homo sapiens
ccttgtttccaatatatacttcaatattaaaaaaaaaaaacagaaaaaggtttttaaaaacataattatgactccataatctgccatgggaaagattgctttcagttactttctatgagaaccctaacctaggcattatcattctttttaacctgctcagattttcaatttatgtcagaaaacccatgttaatgtcgaacctgcccctgcctcaagagtaacttggtttaacctcttggggcttgttgcatcatcagcaataattgtcttgccaatgtcacagtcactgaaggagcaaacaagataacagatgcaaacgccctttgaaaagttcactacgtataagtgaaccatcactattattctcaaagtcttatttacaaccttggatggctgaatgagcataagatggccagacttcactgttcctagtaagttttccatagcctctgctttaggagaaataaatttcctcacatccagtctttgctttgttgactgctcaacaccctcttgtctcgcttgcttttctgagagtgaccttgacagcatccctccaaagagaagggtatttcctttatatagacatgcaggtgcagtcccaccaaaatttattgaactccaagctagaacaaaaggtggaggtgcaccgatgaagaaacagggcctctgccttcaggagcttacaaggccattaacagagagtgatattgatcttatgcaaatggcagttgccgcctacttgcagaagagcaggggctacagccaagcagcagggggcagaagaggctcgagctcggctctggaggccgatctggccaaagccaggatagaagctcccgtgacccattcgtgtgtgcgacttggaaggcagcccttctgccactcccctttcttaaagcccagagcaaataaaagatccttttctactacagtagatatacctgtagtcaggactttgaactcacagctattcgccgcaccattccctcttaaggaactactgcgccctccagcggaagaacagcggcggaactccacagcggcagctaaaatccctgaacgctttaaagtccttctcctcaagatactcggctgcgtctggccccgcccctcactgagttccgccccgggcgcaacctcatcttatggcaccgattggctggcccctgtgcgtgaggacgttgcgccgtggggaggggcggacgagaggtgtccgtcaggccgtgtgtcccaggccgtcgaccccgctgtcgcgctgcgtctgctccttgcatgcctttagatggtacagccttcagccggggcttcgggagacagtgcagccaccgagcatctctgctgagcttctccgccgatcctccttttctagcaggcagctcttctaggccacgtccaggtcgagggggaaaatggcgccggcgcccctaggcgtcccggaggagcagttgctggggtgtcgatctagagtgctttctcggttactcttcattgcccagaccgctctcctcctgttgcccgccgccggagcaggtctctgccccgcgccctgctcctgccgcattcctctcctggactgcagtcgcaggaaattgcccgcaccgagctggagggcgctgtcgggcttgctgccccccgacaccgctatcctgtgagtagagcggccaggcagagtgaccaaaaggagggggagccttccctctacagggggcaggcaggagggagacaggcctggtcggagggtgtggtcgagagcctaagctctgaaggaaactgccgtcaggattttatgaactttgttttaggtggtgggagcctaaaaaagccggtgttaaggtttctggagaattgtatgaagacgagggttaagattcttggggccaaggagtctgtgatttcctcaactggggaggaaatggggcgggcatatttaatggtaaggactcacgggtcctgggcaccagcattgactttggatggttggtggggcggggggtgggttgagcacggaacagtgctttctgcttatcttgagctgcatgatttggtgtgtacctcagacttagtggtcctcaggcacgtgattttataatcacaatcgccaaagacctatgaactgtctttagtccttagttcgcatgttggctgattttgtgctgcagttttgatacttaacagggttgaaaagttcattatgatgaatcaggagatcctgtaattcagaatatctttgtaagtagcattcttgatctaatttaaacttcactgtaaagaggaggagtattttttgca

SEQ ID NO: 34597 - DNA, 660 bp, Homo sapiens
catttggctcctggactggtatatttatttggtaaacagaaaatggccttgcagaaatatagaggttgtgggagccaaaagaatcatctcatctcctaggaaccaattaggatccttaaacggcaaaactcccattaaaaaaaaaaaattacaaagccctctgaagaggcacactcttagaattacccctgaaagttcccactaaattggcaaaggagcgaggctctgggacactttggtagaaagttaggcagcagtttgacacaaagcaattaggggaggagacggagtgtcaaacctgcggcaggcagacatacaaacatgatgtattgattttggcagtggttcccattactttttgtcagaagccagccaagttgaaaaaccactggcagcctaggtcgaaagctgaactgagagctggggtccagtgggcctctgctcaattctgtagccttgcatctgttttgggggcctcatgtctagctgaaaaaatgctagagccatgaaacctacgcccaggttgctaacctttctcaacaatcccaagtaaaccatttacctaatgaagttgaaagtttcctctgttcaactgagtgctaagaaataaaagggaactcccttaacctgcccaactggttctgagacttgaaacaggtt

SEQ ID NO: 34598 - DNA, 978 bp, Homo sapiens
ttacacaagttataaaagggggtttaacttacccttgggtgtttataaataattccagtacctagcacagtgcctggcacactcgtaggaggaaacagctgaagaggagtcaatgaatcattttatagctcttctacccttgctaaagcaaccaaaccactttggtttgtaagaatagcagttcctaaaatagacaacatgtctctggaagactgtgctaactgggcaatgaggagtagagagaggaaagggcggagggggaggaggggaaaagggagagaaggaaaaaaagtttctctctctttcaggccatacaggccaatttcaaggagaaaatgttctgtatgagcatatgattcaaccaactcaatcagatacaaagggaaataaagtaaggcaggtgaaacctaaagccaggaagagtggaagtgactttggactcagagttcacgatgagataagtctaaaagaacgtaacataactgtcaatttcttgtagcagagccagctacctggctttttaaatgacttatatcatcaacctgggggatgtgaaccaggtgatgaatcaattacctcaatgagataaaatgcctaaactccattaatgcatctgggaacaacagaaacaacaaaaaaatactgtcaggtgtctcctgcaaagcaggttgagcaattctcctgatgttggtctcttagactgagtccaggggttacaagctgttcactcccacggtgaactccaagcagtgcctacaataggttgttggggcaaatacctcactgcccttgggaataacaataagaaaagagatggcagggagaaactgagaaggaaagggttcacttaagtaaccaggggttagacaaggcaacctaagacacaaaaggaaggaagaaatggaactaataagaaacaatttgagtatagttagctggagcttccaactagatgggctgctgaaaaaaacaaacaac

SEQ ID NO: 34599 - DNA, 3897 bp, Homo sapiens
gaggtgacaaacctggagacaaaagctcacatgcatgtgatggcagagagcaaacacaaaaaagagcttgggtccttgatgacatgattgtactgctcaactaaccctgaaactatctgcacttgaaatttatattgaagatatagtaaatgacctcatgctttaagctactgccaaatattctgttccttgaggccaaaggcattctaacagatgcaatctagacacagaaagatgttttcccagagttcctgcaaaaacagatgatgtgtaggttatggagattttatccaggaatccattagtataggtagtagtttagaaaaaaaatactccaagctttgtctcagatatggttaaatctgagccatccacatggtgtctgtgctgaatattttcccctcagatgcactgtttccttttctgaaactgactgatatgaactatatcaaaagcctcccttgccctctggcgtctggttggacttggccattgacaagcaccagcaggagactggaggagggtggtgagttagatataaatcccccaggtcctttgctgggtgtttacttaggctgactgcatccgttgactgaaggtcacagactcctgtcaggtggccctgtgtgtctggatttttcggtaactgttctttcccgattggacagatctaggagctgtagcctcagggttccagcttctcttgtggtttcccacaccctgcccacatctttgcaaaatgccatttgtttcctgccaggaccctgactgatacaatggtgtcaacgaaatcactgcagctattgaagcttggtccagtctatctgaggtgtggagttttataagggctttcacctactattaaagggagacaggagactacacaaataaatgtcatgctgcaaaagtgaaacaaagatcatagctcagagaaaacactttccacttgagggcaagaaatcagagaaagctacctggaagagccggcatttgggatgaggacggataggagttttaaaagagatgagatgaagggcattccaaagacagggaagagtgtaagtcaagccggggaagagagaaagctcaagtgaaatttctgaaaaattagagctggaagggatctacgatatcttttatttaatgttcgttctcccttcacctcctttaactgagatttggccaaggtcaaacagcaagtaagtagcatgtcaggactccaaccagatctgctggctaccaggttagttcttaataatccaccttctacctccaccccactccctcacctcaggcagtctgcttacttctcagtctctcccactagactgtaacctcctcaatagcggggcttctgttttcttcacccttgaatcccagtacctagcacaatatctaacacaaaatcgtcatcgtcatcagcagcagcagcagcagctaccaaactttaagaggcaaccacccactgtcaggcactatgcagttattttgtacatcttctgtaatcttcacttttcactgaggacgctgcggctcagagaggttgtctaatttgtcttaggtcatacagcagtgccggactctattttataatatctttcatcaaccggactccgaagccctgcctcaatgggcgttcagtaacatctgttgaatgaacgaatgaacaagcaatatccactcaatgcaaactatcggctgtaacaggccaccctaaaggccccggaacctcggccggctcaggactccgcacgttgtcttccaatctaagcacaccggcccctctctgcgccccgcacaggctcagaggctccgcccgcgtctccgcctaactcgccggccacgcccccacttcggggagctcggtccctctcggattcgagttttcctcggctccagccgccgcgcagagggcctctcccggccctgcgacctacagccccttccactcccctgcccctcctctgcgccctccctcactctccaaacttcttttttccaccctctctaaacttcagtcattctagtgcccgcctcctccactcgcaccgaccaaccagtggtccccattctcgttggcggtccgcctcctgcccgccgggggccaatccctggcgcgagagtccagggccggggctcgttcccaagcgcccagcctgtgacggcagcgcgccgggcgccgcgcggcgggagggggcggggctctggatgagggatgggcgagggccgggggaagggaaaagggaggaggaggaggttgcggctggtttgaaagcggcagtttcctggcagcttgggcaggcgttggtctccgcgctacagctccgcagcggccacgatcgatcccgcgacgggtctacgcgcgcttctgcgcgccccccacggatttttcccgttcccggctcttcccccttcacctccccgcccccccgcctcagcctttcccgccgctcgggcgctgagcccagggaccagccggcggcagtgaccccgcccgaagccccttctggaacctcctggggacaattcccttttcctttcttcagcctaacccgcggtggccctcgcggagtccggtcagccccggggagcgcagccgggaggggcgtccaaggggcgtctcgcgtctgggaacggccgggcccccagcgggctgtggtcgcggggtgggggccggagcggcgaggccccccttaccgggctgcgcgggccgcccagggcccccgggctgagacggggccggagcggcgccccggccgcccgcgcggggtctcccccatggtgcagcggggttcgggatgtcgaagacgctgaagaagaagaagcactggctcagcaaggtgcaggagtgcgccgtgtcctgggccgggcccccgggcgacttcggcgcggagatccgcggtggcgcggagcgtggcgagttcccctacctggggcggctccgcgaggagcccggcgggggcacctgctgcgtcgtctcgggcaaggcgcccagcccaggcgatgtgctgctggaggtaaacgggacgcctgtcagcgggctcaccaaccgggacaccctggctgtcatccgccacttccgcgagcccatccgtctcaagactgtgaaaccaggtacgccggccctgcgtatctgtctcggggtgttggggagaggggcttcagggtgggcgtcctgggagcggcggcacctccccaccgcgtattgtcccgggtaatcttagacctctagggtgtgccagactccttgacgagggggaggggtggcgttggtgagtcccattttgccgaagggaaaactgagctctggcttggcgcggttgctctgctagctgtgctagctgtcacagaattgcgactagaagctgggtttcctacatttgtagctccatctccccccgcagacaagagtttttgactagagaaggccagccttttcctgtgttgtgcaaaaaggcccttaggattgtaacattttctttggaacgatcttacgcatcttctaacagggaaaaagggactttactatagaggcacttggtgccaaggttaccacctggtgtacctggaagggcttagctgcttcagtgtttcttgcactctagcagacatctcagagctgacagcctaactctgtcagtccaggtggttcaggtgtctgagtaccgatgacggtacaatatgtgatatgtggcagactggtgtgttcttgcagggagctgttgaatagagtctgggttttgcaggaagacctaggtgcctagcggagtgaaagcttctgtaacgcttttgattttacagaattttgttgaagtggtaggttaaaggagcctctgttgccctggtatcttttatgctagtaaaaattgctgcaaagcacgttatgtttatggcata

SEQ ID NO: 34600 - DNA, 1457 bp, Homo sapiens
tgtagaacttttgagtttgattaaaaacaaatattattttcagaagagacaaagattctttattgtgattcattttggaaaggatgaaaatagagtaagggaatttaaaaagaaacttgccataaacattgttttattttttgcttttatctaaactttgtgacagaaattgatttttcaatttaataaggtattgtaaagtgtacttagcactctcttgtcttgactagttgctttttattaaaccatattcataacatgacatttagagactagcacagtgaaagagtaaaatttaaccatttttgtaagatgtaatactaatcggaaatgttctcatattgtcttctgacaaagtccatggcagaaggatgagctgggttgtagaacatggcttttgtagcactgattcttcctagccttcttttcacttaggtgctaagggtcgccctcccaaagccagtactatcagccaggtgacttaacatctttctggcagctactgtctttagctttgattttttttccctttttttgttgttataatctttaatagagaattgaaagttactctttaaaatatggtttctaatctgaagcttttcctgaatcaattaggtagtttcttattgttttagtgtagtacttagtagtcagtactttgcccgcttatagaagaatctttggtttcacctattgcttggctcgattagttacttgtttcttaattatgaccctgttgtttatttttctgcaaagagaaaagttgtcatttgagtttgaactttgtcttttcccagtagtaaagttgaactttggacctctggtgaaattgttttgtgatatactactatgactaggtttagtttctttgattttactacagagtatatattcttaaaccatttctattctgattaatatacaagtagtgaattttgttctgaaattccccagactctaattgtgcagagttttatgcttcttcatacacctttaagctcatatttcagcagtttgctttcagtaagtttcagtaaattatgtgtattttattccagagattaagtatcggtacaataaatacatgaaatcattgtctactgccatatgcacacattacattcaactaccctaagcaagtagtgtatccagggatggaaatcataggaaacaatgttatagtttgtttaaataaaaaccaagttgaaacagttcctgggtaatgttaaaggtaggtaaaagtcttcactgctgactctttgggacatccaatttgtaagggagttttgttaaaatgggctaattcctagaaatacacttcctgttggtgaagaaacactactggatgctttaaaataggaaatatttatgttattcaaataaaaataatgctgtgcctttcttatctcttgaatctttttgttagtttttttttttttttttttttttttttt

SEQ ID NO: 34601 - DNA, 2298 bp, Homo sapiens
cctcgtgatccgcccacctcagcctcccaaagtgctgggattacaggcgtgagccaccacgcccggccccattttttctttaatagtgagatttagaaacccatcctctctctctctccctctcaaacataaaaaacaacctaagttgtttcacagacacattcttgtaagctttctaggaaataattttctatatccaactgttttgtaacatacccatatacatatagaaagctatccagttcattttatttcaatctcaaatttgataaagtaccaaaaagtagtaatacagacctagttcagtcatgaatatggatgggaaaagtcaatataaaattctagcaaatcagattcagcaggatattaaaagaacatttcataacataagttatacattgaatttaaaaagtaggtgaatattagattaaaaatgaaaaaccacatggtgatcttaatgccacaaaagagtttgataaaactcaatattcattctttataaaagtatttaatggtttggatgaagacttcttcagttaaagaaaaacaaagaagaatttctgtccaaaccaatatcccagtatcttgctatataatgaaatgatagagtcatttctatgaaaataggataaaataaagaggcttgcggatacagccttttttttttttttccaagttctagacaatgcaataaaacataacagaaattagaagcagggcttttggaaaaaaggagatacagttcccatttatttgcaggccgattggttatatctagaaaccaaagagaaaattaaaaacttttggaattagtaagaataggtatgaattaatatgagagttgagttggatacacatgtttttgagctgattcatgcaaaggctttccaagctcctttgtgttttactaggttgtgtttgcttaaagttggctcgctagtacgcagtcatgagtcaggggaagagaaggagcctgactggctcctatattgttctgagtcatatttctttttttcagtggaattaaaccaacatgattgttgaaagagatcaaaatttggcaggttttcatttgcttgatatctgtaaacagacttttctttcaggaaaggaatttggaggagggcagagccatcattatctcttttttacaaatctacaatttcccatttgacccttacaattaatctgaaagtcaatttgtgtttgagattatacgacagtaacaggttgataagcagacatttctatgtcttattcgataagaaatactgaattaagttggagaatggaggtcatgtgctgccccgtacatttctcatcttgtcctcagcaaggactatatggtaattttcatagattttgtcaattaaatgaccgatatttgagtaccttttaagtgctagttcctgttcttggtggtaggattgcagtggtgaagaagatatattctgttcttaagaggattacattgcagaggggatagatagataataagctgtgtataaataagataaatttaattataaataatactgataaatatagagaagataaaataggtattgaccaattatgaatggcatactgtatggcaagagctttttagatggagtcaaagaagtctttgctgaaaaggtgacatttgaattgagtcatgaaggatgaggaagaggaagccatgagggcacctgttctaagagcatttcccagcataaagaactatgtggtgacaataaattcagggacagaaaggaggccaatgtggctgaagaacagtgaactaagtgggagagtaagaagaggtaatgctggagaagtagccaaaaaccaggtcacgtaggaacttgtgggccataagaaggagtttggatttttggaaatgtgttggaaaacctttagattgtttgtttgtttttcaaagtgagatgtttatgatctgtgtggaagacagacaagaagaaaacaaaagtggaagtagaaagaccaggtaggacatcgttgcttgtgctggtggcttgggtccaggtgggtgcaatggagattcagggcagcaagtagaatttgactgatggattggagtggtatgaaagaaagagtcaaggatggccctaattttttgatctgaataataaagtgtataatgaatgctgtttgctgaaatgggcaactcttgagattggaagtgaagctatgagttgagagcactttctctgttttggctgtgttaactctcagtatcccccggaagtcattattatcatttgccatctgaatccattataccctgtttacttt

SEQ ID NO: 34602 - DNA, 736 bp, Homo sapiens
gagcttcattaagatgtttgttttgaattccttgtcaggtaatttgtagatctgtatttctttagggtcatttagtggtgcttcattttgtgcctttgtggtgtcatatttccctgatgattcatgatctttgttgccttgcattagtatctgcccatttgaagaagtaggcacctcttccagtctttactgactagctttggcagggaatgccctgcaacagtcaactatttacagattctggttaggccattttgcagggcctatagggagggcttgcctagtgcctgggtctgtgggggctggcctggtactggggggagttctacagttaagggctgtctggccgagtgcctgggtccacaggggcaggccaggagcctggggccatgagagctgacgtggcagtggaatggccctggaatctgggtccacaggggttgacctggatgttagctctgtaggagtggacctggagcctggggctatagacattgacctggtgctaaggtctgtggtgaagtcatgtgctcacgttactcttcttgccccatacaaagggtatttctctttacactgtgctgtgcagggtaggaatgaatgatacaggtaatgtgaaactgtccttaccgtcttcagtgtgccttcttatttccatgcttcactgaggtgctatactttctcacctggattcctcaggtcttgtgaaagtttttttttgtgcatggattgttgt

SEQ ID NO: 34603 - DNA, 679 bp, Homo sapiens
gaatcacagcacttcccctgcacatctgtgagcattcattcacttcacgtctcagctaatttcttatgtttagtatgtttcttgactctgcctcctatttcaccaatacaattttctgctgcgctgattcttctaatgctgcttctactgccagtattaattggtttgtggctaaatttatcctgtgctgctgttagtgccctccaactgttctgcttttcccatagtccacattgttgccagaatgatccatctaaaatacaagtctggctatgtcatgcatcctggtaaaatatttagtgacttcaccacagagtaatgctctaatcctttaaggtcatgagttagatccttctttcatctgagcctcccgcctatcactctagtcatataatcccttgcggccttgcctttccttccatgccattcagcatgccctttctcctgcctggaatgcccactgtgctccctctatctatcctctccattcattcttccagtctatgttgcctggcttcccctaccagtcacaattattttctcttgggtacatactcctatgtaccttgtacatgcttcttaactggcttttgtagttatttgtttagactggtttatgatactataacactggggtgaccattatgacaccaaagacaggtattactttgtgattttt

SEQ ID NO: 34604 - DNA, 611 bp, Homo sapiens
ctcaaaagaattttggatttcctttccctgccaccagtaggcatcagagaaaaggaactttttttttttaattttaaactaagtaattcaattagaaaggcaaatgatcctggtaattattagatggtatattctagtaattattagaaaaggtgcttctgggtgattgcagttttgaatttttcatttcactcccattagtcatttcataaacacatattgagtgtttgcattacccaaagctttatgcatgctactgaatgagttgggagagtgactcaaaacaaataagatattatcctccctcaaaatgaccagacacatgcacaagttcaaagggatgaatagagaagatttcacagaataggtggcattgacaggtgcataggatttcaatagggagaaattaaggagagaaaacattccaggctgaataaatgagcaatggcgtaaaactaaggaagtataagtcatgtacagggaacttcaaatggttgagtttacttagattttatttagaaaatgcgtagatgaatagaggaaatgagaatataaaagccgatgggtcgcaggcataaaggtcctaggcagtgggaagccatgggaggctt

SEQ ID NO: 34605 - DNA, 1285 bp, Homo sapiens
ttgagaatcattgagaggttcttcctttcggtctggttaagatttagagaggagagagaaaaaaagtgttctgggataaggaactgagaaatagctgaatggaaaaggttcatattagggaatagtgtcaaacttaaatatttaacgtagaacataatcagatttagaaaatattaagtgtttgctgtctttgaggcaacatgtattttcctacacaacatgcgtttttacttatattagtctcaaaaactctgagataggtgacattatccccacttacagatttaaaactgaggctcaaggagacttagtcacttgcagagatcactcatcctgtgcaggccacagtgtgacccaggtatgaccctagtccgtcgtcctcgaagatcggttcatgtgctttccgctatgtcaggtcttggcttgagtccagtttggattggatttcattgataggcagacagtttcttaacaggttgtgagataatataagccatgtggtagaaatattttgtcattttaatacatttgtagtggatgttgtttttaaaacgacaagactgcctataaaaaaatagtgatttgtttaaaaaagggaacattctttttccctattcttcctacttcttttcttttggttctcctattttttttcctttctcttttctttcctctctcttctctgtccccataattatttttcaataatacaaaactgaacttgaatctttgttctatttatcaaaagatgttttctccaaattattttttatcacatttttaaagtgacttaaaatgttaaaaggatgtttactgggtgaatttactcctctgaatttccctctcagaagagtctttttcatctgtagttttgtgtatgtaggtctctgcagaatttctcccactctgagggcctgtctaccataaatcttaaagcaatggctccccctccttcccctcattcagttttaaagttaaacagaaatgacacctggtggcaagtctgttcaattacaagtttttgttgttttttttttttgcagtttattgcaggaaaagaataaaaagtgttctgggttggagagcttaagctaaagaatgtgattgaaataaattataacctcaaacctgttttacaagatatgcccaaagcagtgtccaaatactatctactttaattttctttatcagcaagattatatatctagtgctaatttcttacctacattgcctcatgaaaatgattcttcttccatcatttatcaagggaaatctaagtattggc

SEQ ID NO: 34606 - DNA, 2282 bp, Homo sapiens
cccagctactccagaggctgagcccgggaggcggagcttgcagtgagccgaggtcgcgccatcgccctccagcctgggcaacaagagcgaaactccgtctcaaaaaaaaaaaaaaaaaaaaaaaatccacttcttaaggaaaagagcactagaaaaactagagaggaataaaagataaggaacagctcaataagattgttgatagtatcaatctgagctgtgcacatacaggtttcatgtcttttttgtttttaagcagtttgatcagaagcaaactttcaaagcattgcggtggcattgtgtatgcagcctgaaggaggtggcttgtaaaccttattctgggacctggaaccgggtttaaaagacataatgaccttgtacatcttttttttttttttttcatttatgttgaagtatacatgaacacctggcactactaaactcgggggaaagtaacattatattatttgtgggagctttttgcaggaagaatgctttacaaataaaaaaaatatatatatgtattaccttcttttggtaccacgatatagcatctctctcatttgaggccatctgtgtctccagccagagaatgggatttcactgaaaatgaaggaaaaccaatcggtgagtccagctgctgaaggttactctcccagtttgggtaggacgcgaaaaccgcttctctcagcctctccatgagctgctctttctccagctgtttgccagggaaaacacaacaaacaaacaaaaaaaaactggcgcagcggcgaccggagaagcctctgcaatatatcgggcgagcgtgttcgtgggtgcgggggaggggcaggggccgccgctggagtcgcccggcacccgcctccttcgctcgcccgcgtccggctctcacctagtgcccgttgccccgcgggccggcgcccgggacctccgtcctcagtgcccggggtcccaccgtgaggccgggggcgaggcggcgggccaggcaggccgcatcttcccctccaggcggagacgccggagaggccgttaccatggagaccgcggaggccgccccagcttcggaggcagccggccgcccagcgccctgagggcggcaaatcgatcgccggtcagaggccgcctacagggtcacggactgaccagaaaataagcagagaatgaactggaaaatgagggggattaaaagtgaaggcctccagtcgccacggcgacagcaaaaggctttgtgcccagctggaaaagacaggtgcaaaggccccggaccccgagagcccgggagcccgggaggaggaggcggcggcagcggcgctcgtcttctgcgggccgcgccgggatgcagtgactcagccgtctgagatctgggctagagccgctcagccgaccaccgggcagcagccttcggcttccgctttccggctttcgccgccgaggtggctccgcccctggcccggggccttcccgcccagccttggtccaggctccgggtccgagggcctggggagtcgcgcggcatatcgatggccaagagcagctccctcagatcacccttcaggcctcagcttaaaagtcacttcctcacaaacgactctcccatccagcggtctaaaggaggtcggtcctgatactctagtagctcacgtctttgtggcactcattttcgtgtttcatggcttaatctctgttccccagtgggctgtgggctccatgaggtcagagactggggcctggcacaagcctggcacttaggttcccaatgtttgttgagcgaacgaatcaatgtttgcgtgaatttacgctgccctgggaggaagggccaggctgcggcttagtgactcccttcctctcccgcccctcagcagctctgggtctggagctttctagtgctcaaaggtgtagggggaaaagaggaacaagtattgggcagtcacagctttttccaaattagggtaaagttaggtggcggcaggaacaggttaattagggccgatagaggtcaggagaaaggaaagaaaggttgaaccctcaagtgaatatttaaggatacgttaaaaggatttttaggctgctttttttttttttttttttttggccattaatggaacactgtccccttacagccattctccccaccttatttgaagccgtgttcttgctagcccacagcgtgtagcatctgggtcagagaaagctaatgacagatgatagcttcacttaagaaagcctaagaggcgctgtactcaatgttttgcagacattatttcttcttatctattgagtgg

SEQ ID NO: 34607 - DNA, 718 bp, Homo sapiens
tctcagggtgagcagggaaaaatattagtccctacagttgttgttctgataaataagattgtttatttcaattcccttataatcccaataattctccattgctaacatcaaaaagaagtgtttctggacttaaaatccctgctttttgacatgagagaaaatttccattaaacatctggctcaggaacacttacactcggtgatagcagttaggcaactggtcaagagtaaaaaaaaaaaaaaaaatgagataagaaagatgactcacaagagcatacatatgagcaatccggtcatgtaatgacattggagaagacagcctatgggggctgtccttcctttctttcctttttaacaacatattaaaatcatgaatttactaagaataattaaaaagaagcattacttcttttcatggatttttaaggaagtatgtttgtcctatttttttttttgaaacggagtctgactctgtcgaccaggctggaatgcaagtggcgcaatctcagctcagtgcaacctccgccttccaggttcaagtgattctcctgcctcagcctcccaagtagcccagctaattttttgtatttttcgtagagacagggtttcaccatgttgactaggctggtgtcaaactcccgacctcgtgatttgcccaccttggtctgggaatacaggcatgagccaccgcgcccggcctgtcctatgtttttatgag

SEQ ID NO: 34608 - DNA, 1766 bp, Homo sapiens
tttcctagtatcaaagggtagagaaaaccttccacatgcctattctaagaatttaaatagctaatatgaaaactttaaaatgatttttacctctagattaaaaagaaccaagataaactgcgtctgatattttaccttgcagaagctaagtcaaccagtgagtcgtgtaacctttatatgaattccctcctgaaagactggaaccatacccctgactattctggagcaagggagagcagataactaaagctctccagcaagcaaaacaaggagaagggattttaggaacatgccttttctttggaaaggcattttttagtaccccacctactaatctaacgcggcgcggaaaccttgcagaatttgaaaacaaatgctgagaggctccgggggaccggtaaagggattagcaactgacagctcggcctcggagcgagaagcctcaagtagttagatcaaaccgtgtcaacgatctgaaatccagggtccaccccagtgagcttagagaagtacagcagcagaaggtaagcaggggtttggcgtctttcagtcctaaagatgcgggatatcggaactgagagagacctagaacccaagccgggcagtttgcctgctctcacctctcttgggggctttgatcagaggcacccctccagtcctctcgccgttttcctgcttgtccttgtgcttgagatcggttccgcaggagctgggatcaccatcggggccgcggtggtgatggtgcttgtgccgctccttgtggcccttatgcttgggcccggccgcgctcaccgtcagaggcgagaaggtgaagagggccgaggtgcttggggccgggagaggggcagcgacagcgggcccggcgggtgccagcgaaggtggcggcggaggcggcaggagaagaggctcaacagggcctgggacagttggggctgcattcgttggcggcagcggcccaggatgttggcggctgcgacgccgccggtgagggggagcgagagggggctcctggctcggccgcccccgcttctcctgagaccccccactgctagatcggcgctgccgtttaactccccgcggggagaccccagcatgaggtttctccttcccctctttgtccggctcctcctgcgccgccaccgcccgtactacgcgcaccgctccgacctgcgcagccatttcacccacaaacacacatttaaatggcccgaccgcccccccgtccgcgcatcgcgcaagcgccgcccgcgcactgcccgctgggcattggagtctctcctccgccctccacttgtcggccgttcttcgtccagagatgaacatgccggaagcggccgttcccagcttttctccgcaggcctctccaaccgagcttctattgtaaagcaccctatgccgcgcaaagcgtcatgggagctgtagttccgccgcgcccccgccgcgtccccggctctgagtggaggagtggaaagggagcgtgcgcgaagtcacgcttctggctgcgacgcaaccgccgctgggcggtgagttgccgccaaccgccctaacggccgaaacaatgttaatggctttcagagtctggcggcgcgttcccattatcatcttcctgtgacccttcctcattttacacggaggaggtggtctccacagtgattttaaatttaatatttctctcataacctttgtgagataaaagaatcttcatccttttaactttgacgagggatgaaatgaaggtgaaaagaggatttagtaatatgtaaaat

SEQ ID NO: 34609 - DNA, 2027 bp, Homo sapiens
tcaaatgaggcaaagtggcctactagtaagctgctgcaattgctttattgatgaaggcctggaccagaacaacaatgctaataaacaagagaggatggatatttagaattatgaattcaaaccatctgacataagaagtgagagatcaggtgtcctcaaggttggctcccacgcatagtcggctgctggtggcattcatcaacacaaatgtaagctgaacaggtttgaggaagacggaagaatgtccgggctatttcggacatacttttgataaaccacgcacgtggaaatgccaagcaggcagtgggatacgtgggtctgaagctaaaaaaggaagtctgtactagctatattatagatccaagagtcaccagtaattgctcaagcccgtgatatggaggaaactacccagctgagtaaaagatgctgcagaggggagactgacatggtactccaaagcagcaggacgaagaccgaaccatataactgccacgtgtgaaagctaattcaccctttcagagagactggggctagtgagccctgatggggattgcaaagggagcagttagcacgcgaagggaggtaggtgatacctaatcactcgctggatgacattccggtagcgcagcctatcagcttgaatgtgaggattgcacagagccttcttcagctccttcaccacgtcctcggagccaaggtacggcatcttcctaagagtcacagggcagctcccacagctcccacggtaactcgagggctccttctcgtcctgatgtgggagcctgagtaaaggaaatatgagtcagtgaaaatacaaaaggcgagatctcgcctcaggctcggcttccgtagggccggcacgctggccctgacacacttccacgccctccgcgacaccgcgagccccaccctaggctcttcaggccctaccgtcggccggcaggccgttcgccccgcccacagatcgctcccgctacttctaggtcctccgccggatttccagcgccgcgtccgactgaccgcagacccctccctctccagttccagccttaattccccctccacgccgttctcatcgcggataggcccaatcttgctttctgcggaagtcccgcccccttgtcaagagaccaaacagaagaccgctgccggtctccccgcgagcgagcgctaagcgtagtcccgactccgaccttaggatgcccttcccccaacctctcactctccaggcgcagctgcgcggctccctctggtggagctgcggcgggcaatcggaaatcggctactttggcctgtctcctccctgcagcgcgcgctttgagtgcccggctcggcctccgctcccgcgcggttgggagtgtccagcgccctccgcgatttgggctccagcgggcagggtgacttcctttttctgcccactctggtaacttattgctctgctgggctctttcccttagggtctctggccctgttcttgccccagcatgacttttatcgggacgccgttgtggaagcctcacgcaggagccctgcccccgtggagaagatcccactggtgactccaaccctaccaccatgaatggggtcctgatcccccatacgcccatcgcagtggacttctggagcctgcgccgggctggcaccgcacgtctcttcttcttgtctcacatgcactcggaccacaccgtgggcctgtctagcacctgggcccggcccctctactgctccccaattacagcccacctcttgcatcgtcacctacaggtatggggctggagtcggtctccgagagctggtccaggcatctgggttgggacttcaacctgtcattcttggagtcatagaatgggggccacgaaaactgatttggaagttgtttgaacccaaaaatgcatctttaacccagaataggaacgtgttttcgaagtgaccaacttgagatagttagccataagttgaggagatattttaatccagccaaggaaactattcctacctttataagtaagctaggccgatgtttccca

SEQ ID NO: 34610 - DNA, 2815 bp, Homo sapiens
aagaggaaagggacataacttgagagagcaggagtttaggaacatgtcagagagttaggttgaaccaaggcatgataaacatgtttgaagcttacattctgagcaggatctgttctacccagaccacaggtttctgcctttttttctggctcatcaagcaggcatgtttacccactctttttatcttcatgtttcccaggtcagcccaatgtgaggactttaagtagtagaaggaagtttctgtgaaaatatgcaaacaaaactgccttgtgggatcgaacatttttggtaaccctagttctctagggaaataaacttccctgttccagataaaatggaactgctccccgtgttgttaagccagagagaaagccaaatgacttcccttaaaaggtacttcagcgcattttacacaaatcatagttttctgtgtgtgttatggggatccaaggaaatcaaagatgttaatgagtgagatttgagaaacaaaacttgatagtagaattttgtcttagccacaactgcccttctcctcacagagtatatgcaaataccgatggtgacggacagtcactttctagagctcagatcactgctgcctccagcacttgtgggatggaaaaaatgaagaaattacagttgccctaaaaatgtcccccacttcaggaacctgaatattttacacagcaggagatacatcggaagtcctacagaatctcttgactttgggagatgcaactgcttttctattaggataacctaattttctgtgtccattttctcagaatgttgtgcccaacgcgttctgtttcctaaatacccagccttccttctggtagaggcaagaaaattatgctagcattcgctcactgcatgttttgagcgtttgagttcagagtacagctattctctctcctcgtaatgtaaacacaggttcccacggcggcaatgggagactcccctaaggggctcttgacgtacagggagacttccagatatggtacacagatgtcacattgctagaacgtctctagacggcaacgaaacattaaagcctaacctgaggtaatccctcaccggcagtgaagctcctctgctaggcactgtcgtcccgtacactgcccaagctctgggggtgtcacactaaactgtggtgatgtcacactagctgggatgacattttacagttggatcccgtaccaccgccaggcacctttaaatcaccgcagagtctgcagtgcggagggggcgggaagtccaggccccgcactcgatccacgctggctccctacggaggcccacctactcgaggcccaccgactcctactgcaatcagtactatgcgatcgtcctagagagtccattcagctgcacttccgcctcagtaggtgtcatggcgcggggcgggtgaatagttccggcgaggcggggccggccgggttgagggacggccgctcggcattccgttcgtcgggtctggcgacaacggcggctgcggagcaaggggcccggcggtagccccggacggcagcaggaggccgaggcgggagcgcgcggggctgaggcggcggcggcggcggcgggaaggggctgggtggtggagcgggagggaggctgaggaggctccccctgcgggacgggcgcggggacggctccggggggcgggggccggggcccgggccggctcgcgcggggggtatgatgacccggctgcggggccccagatctcgtctcctccgccgcctcctcacggcagccccagctcgcggctgagaaccagacacaccggcggtgagtggggacgggcaggaggggtcctcggcggggagcgacttcccctcagctccctgaggcggggccgggccggccgccggctctcctggagcgcccagcctgccgggggcgccttcctcaaagggcccctgcctgggaccgggcgccgcgtcttgcggcccggccgctcactgccgctgaggggattgccttcccaggaaggtggggaggctccgggctggttttcggggcaactccccctgcctcctgccacttctcgcctgggcgtgttgtccttaagtgacaggggaccgccttgcgtctcctcactcggccggttttttccccggctgtcgtggcaggttcccagtgtgtggcttgtgcgtgtgtacttcacagctccgcttatcaccatggttttgggttatttgtgctgtttgggaccaggaagccgtgcctggagaggacgacagtggggtgggtgtggaagcttttctgtcgtctccgctgatgttctgtagtcgttaggcttgtaattcgtaatgacggtggagactacgtgagaccagcccacctaatgtatatctgtacaagggagatctagaggtctggcccaaagggaaacttttgctgccaccactttcaaagctttcgttaaaaaaacaaaagggagggggaaggtggagaaacaaccaaaattctggtaaggcccacactgttcacaggtctgtggggaagagtcccctttttgtgcttagcaaccaagacgtggagttccgtctccaggagcgttggtctaacctccagtttgttgtggtgacgagctgtgagcaatggcctgtgtttatgctgggcgagctttctttcctacttggggaggggggttcaggatgggaggatgcgggtagggaagagggggggaaaacccccaagctccagtaagtcttttctttacttaatcactgattctgttgtaggtagactcatttagaggcagtcctagatgctctttcttgtctattagtgacactttgggaattct

SEQ ID NO: 34611 - DNA, 1318 bp, Homo sapiens
ttttggatgccatagagttgcgctcgggttttctgggccatcaagacctattgtgaaagcaataggagaccagcgttcttggtgggaggttctggggaaaggacagggagagggaatggagacagatgttgagctactggatgaggcctgtacaggatgagcctgggcctcagagcaagcacaacacaaagcagagtgatggactgagacgcttgtggggagtaaaccagggctggcgtactgtgattctgacccctggaaagttgcctgcgaagggcaccgcattgccagaagagccaagtgagccgatcaagggaaaggcctctgccaggagccttcccccgagagaccgcttttcctcccaccgcagggtcggcttgcatgacaggcctgcgctccgctggctccagcgcctccgaagtcacctgccctgcagtgggggcgcgcacccagaccctcccctgggatcccatcctcccctccatcccccttccctcctggcccagggcccccgggagtgacggcgagagggggaaaagctctgggaaaggagggccgggccagcccaggggaacacagggccgtcttcaccctccacgcccttccttccttctccacctccttcttccagattcctctccaggcactgatagaatagaccgaaagaacgacgggtttgacttgtttagcaaatgcttttgatacccctgaaacacagagaaacgtgtgccttggcagtaagggattattgcacgttttaacttagcaggactgaatcaggcagaaagaaacctaatcaccggtctccaaaatcggcccaaacctctggcggccgcgtcactcggctccaccagtctgtgccgcctgcaagcgcccctagcggcctcgcagccatcgcgcctcagcagcgccgtggcgtcctgttcggcagtgtccattagagggcgccagcgcgcctcagaagagggaccgtgacgctagccctcgcgggtgcagcccggaattgcaagaaggctgcggaaggctgtgccagcaacttgcacgacagcaccttgcttctagagcatgagtttacctgaacatgcagctcagggattgttttcagattgaaaccatcgcacattccctgtggcaggcagcccctctccgaggataacaatcatgacggtaatcatggtcatgatcgtctttgcaatggccccttgccctgagggtcttctggcccaggaccctccggtcctggctgctcaggacaggtgattaccttttgagggcctgagctagtattctccctcaggtatttgcaaaactttaattc

SEQ ID NO: 34612 - DNA, 1160 bp, Homo sapiens
aattatttattaggtttttaagttattaagtcaacaaatattatttagtttttttctatgtcctttttacatggactaaagaatccattattgtttgtactactaacaaatagtcacaaatacaaaatgataccatactgtgacaagagatataattcacgtatatataatttacaagaaaccactgcctaaatcggcctcaataccaagaaaagcacagcagagaagaacagcatcttatgctaggtacagaggcatgtttgagacatgtaaatacttcaatatggccaaataaaaatatacaaaagtcagaatatgagacaacaactgataaaatccacacataaatacttcaatatggccaaagaaaaatatacaaaagtcagaatatgagacaataactgataaaatccagaggcaaactgtgaagggccaagtatagcacactatttgtgcatttaattctctaagtaatggaaaacctctgaagaattctaaccagaatgtaataatcacatttacattctaggaaaatcatcaaacagaaatataaaagacccaaagaagggaatagaagggaaagaccagctaaaactctaagacagtaactcatatcagagatcagggtacagtactggttggtacagccaaacaaacaagctggaactgactttatcagtgagatcagcagatttgagaggttatgtgtcagttatggcaaggtccatggtacaacctgaaaactaaatgcctagctaaggcacagtcaagaaacaaatcattggaaatgagttcacaattactgtgtaattgtctatatgggcactaaaatcacaaaagtaataatactatgagcatctaaatgtccattgtttcttcaatgaaagtctcagctaaggcagacaagaggaaagactatgaaattgttaacataaaggaaagtttgttaagataaagggaagtttacttagtagtgggatacaagaggtacaagaagaatggaggacagtaggagagaaaatgtagatcaatatgggaatttctgttatagaaaactgctggtgcactgactttattgtggtaaaatatacgtagtaaaatttatccgtctgaacttttttttgagtcagggtctcactctatcacccaagctggaatgc

SEQ ID NO: 34613 - DNA, 743 bp, Homo sapiens
tcacttgaatccaggaggcagaggttgcagtgagccgagatcatgccactgcactccagcctgggcaacagagagagtctgtctcaggaaaaaaaaaaaaaaagatacaaagaggtgaactcgttttaaggttaaatggctctcctaataaatacaggtctaagaaaccgcatgtacaaagttggagggttaggtagagggttcttgctactaaagtgtaagtggaagataagagattgtttagtaaaaaagttaactttgcccaaagagagatctagcctttgccttcagtccctggcaggtaatctctaaccccctgaaatgtcctgcctgatgaaattatctttgtttgcctggggacttgagccaagctagatagtctgtgtcaacaatctgatttacagtgggagctctgggtcacacagtctcatatcaacctcaggaggagctgtcctggagactgaggtctaccatgtggctggtgaaccacatctatgtgacagagactgacccaataaaaattctggacaccaaggtttaggtgagattccatggctggcaatattttgtgcacactgtcacacatcactatcaggaggtgtttatgatgtccatggctccactgggagaagacaactggaaacttcacatttggaactctcctggactctgccctgtgcatctttcccttggatgattttaatctgtatcctttcactgtaataaacataactgtgagtata

SEQ ID NO: 34614 - DNA, 2331 bp, Homo sapiens
tttccccatgtcatcttacaattttcttccaggcgccttctctggaccccttgctctccaacatattctctccacctccatttaatccatagtcctcctctctcctatctgtgaacacgccaagtcccctccctccaaagcaatccatcttcactgcccttacctcttacctactccctcaacacctcgctggcccgggccctttcagccaaaacgcttcctcacaacgtgtttcccaaatcccccttctctcactgtacgggtctgccagctccagaaccagcgctcggccgggttccgcacatcacaaaccctccctcggagccagtgtcccctcccccagcctctcgcagccggcacccctcccttcatgctccccttatctcttgcggtccagcttctctggaaagtgtcccaggggcgagtctttcaccttagagacccctcgggatggcgcccgtccgagcagccccaggccccagcacctccgtccccagctcctctagggttgcgcaaatcccttgcggcccagatgccaggcagggcctccggctcaccttgctggatgtcgccgttgctgccccccgggatgggcacgctgagctggcgctccggctcgggcaggcagcgcaggcagaaggagtgaagacagggcagcagcttgggctccgcctcacgccggctctgcaagctctgctgacacacggcgcaggtgtccaggagcgaggctggcggtccaggaggcggccctgccgagggacccggagcgggagccgaggctggagctggagccggcgtcgatactgcgcccccggcaactccagtgcccactgaggccgcaggagatgaagcagcctgggccgagcccgaggaggccgcggccacccccccgtcgtcgggcccggccgcgccgccctcagcgccggccctgccgccttcctcctcctcctcctccaccagcaccgcggtgagaggcggctccgcctcctgcgcggcgggcccggcggccccggcagttaccggcgcgctgccgctgcccccgccgccgctctcagcctcgccgccgcctttgttttccgccatgttttcctctttgaacccgccggaccgccccgcgccgcccgccgcccgcgtcgccgccgccgccgcccccagccccagccgcagccgcagcaagagcggcagccgagagctagcgagagagcgaaccaacgagagcgcgcgcgcacgcggcgcccccgccctcgcgtcgcgcgtttgaaggagggcggttgcggcacgcgcacgtacgcacggacgtcctcccgagggaggcgggaactcggttcgcgggcgcggagcggtcccggaccctcgaagccagttccttgcgtcagtgccgcggctctttaacccgaagggagattttttttttaaagccagaggccgttgacgctgggtagcctttggctggggttggttatgaactccgacacagcggtggtgcatacggaagggtggtagccgggacggttccggtccctgcgagcgtgtcccgggcgtctccgcggaagtttcacctgccgcgccgctcgatcgccgggacctcctgggtctctgctgtgcgtagaccagccgcgttcctttgggtggccgtggagcactaaagcggggcttattgtttgtttggttttggtttttttttttgttttttttttgctttttgtttttgaactgaggatctatcagaaataggctgaaaagaccgagtgaggaagaaactctttaacagctatttttggcatcttaaggtgattctcaggagttgctacgtatcagaatcaacggaggagtttttcaaagcagagatgccagggccagtccccagacctgaatcaggaagtgagggagagagccgacggagggggaaaagtcccttcagctgattcttatgtatgtcagtttggagagccacggatataaccaatactgcgtccttctgaggtcccactttaagtgtcctgggttgagctgggtgacaaatgcccttacaacaatggtagtagaagctttcaggccaagcgcagtggctcacgcctgtaatcccagcactttgggaggccgaggcgggcagatcacttgaggtcaggtcaggagttcgtgggcagcctggccaatatggtgaaaccccgtctctactaaaaatataaaaattagccgggtgtaatggcgtgcgcctgtaatccgagctactcaggaggctgaggcaggagaatggcttgaacccggcaggaggcggaggctgcagtgagccgagatagcgccactacactccagcctgggcgacagagc

SEQ ID NO: 34615 - DNA, 1782 bp, Homo sapiens
cattaatcagaaatgtgttaataaaaacatcggatagattacagaaaaaaggagaaggctgagaaaaaagtagtatacacttggatatggtttgtcctttcagtcgtatcacatacatttggtaaataactagactttaatatgccactctccagtggttctaaagagcttaggtaattaggcttatacatattaaaaaaccctagatcacttgctgtagagtgaatcttggcaggagagggtccctttgagaatttacgcatggatcctatctcaaagaatggtagccacaaatttttgcattaagtgagttgtggagccccagaaagtcttcctatggatcttagaataagaacctcggagaagacttatctatctagttgttttcaatagactgacacctatacagtaggtaagtagtagctatgcaggcaatggttaaaactggaatttaaagctctcaatccaaaataaaggttcacaggaattctcgttcacacctaggctcaagacatacttacttcaaaggcagaataatccggggctgtcaggtagctcaggtagttcttagtaggtcggtatctgcgagtttcctcctccaccagcgctgcagcctaagaaagagaatagggaccagggtagaagtggcaaattgtaacatgtttctttcagtaccgagccagctagcagtgagtcagctacaaagacaccccgcactcaccgcttcccgcacaccaggggcttcataaccttgatcaaaatacggcagcgcatccaccacaacctctccagccaccaaacctgtgcccgccattctgaggacctcaggtttgcctgcgttttctgcgtctgcgtaaactcagttatatttaattacgccggcgcctgacactgatgtaatcacgttccctccgtattgacgttagtgcatgctcagttgctaattttgaaggcgggtccgcccggtatctagaaattgccgggctggtttgttttgggcggacgtgacgtaacgtcttggcttgtctgcgtcagcgaaaggcctcaatttcctgtcctctgcttactgcccctttttttgcctgcgaatggcggcgatttgaagttggggcttttcgtttcctccaaaacattgatatctggaaagggagccccttaacacttttggagggaactggctgcagcatttggcggggagagataaactggtttcccacctctgcttactcccaccttctccccttaatcttctcttcctctgtgcgagacttttttccttttttattgtagacacagggtctttgttctgctgcccaggttggagtgcagtggcgtgatcatagctcactgcagcctcaaccccccgggcccaagcgatccttccacctcagcctcccgagtagctgggcctagaggtgcacaccaccatgcctggctaatttttaattttttttgtagagatggagcctttctatgttgccaagcctagcctcgaactcctggcctcccaaaatgtggggaatacaggcgtgagccactgcaccccgggtcattcctcttttacttccttgctgtaccccaactatccttccccctcggtgcccttaaaacctttgcattgggtaagtacattttttaaagagactctagaattgggcgccagtctccaattaaaattgtgaagctttatggtctgcgtatcaaaaggaacctcagttccttaaaaatcctgtcattttgcctttaggacttaacggtaatagaatggcattcctcactgcc

SEQ ID NO: 34616 - DNA, 2280 bp, Homo sapiens
aaccatgcccagctaattttaaaattttgtgtagggatggggtctcactatgttgcccacgctggtctcaaactcctggcctcaagcaaacctccttacttgacctcgcaaagtgctggaattacaggcatgagccaccgcgcctggtcttcagccacatttatctaacaggaaaacacagcaactaaccaagactccgcaaaattctattcatcccactgggctccgactcaggaattgtttccaaatactggatggcccggatctcaaacaaacctacaaggaaaaactcatgttggtgaaactgtgtaacactccagactgggaattacataaaattctgtgcttataaccagtgtattatttccagggctaaaacaatattacaaaataattctcataataaacaactcagattttaagcccttgtcgctttacaatactttttattcataatatagtaaaatctttcaaggtattcactaaatagagagggagaactttataatgaaactgacctttaactccacttttccgaagctctcggtcctggatgaatcctgcaaacatctgagtttccatgaagagatccaggaagtggcgtacacttcgggaggtgtgggacttacggaatggttccctttggaaaacacgctccccacgctcagtgacagtcatgttcaaagaataatgtcctaccaactccacaaaaaacctgacaaatgcttcggacaccagagagttgagtgtcacatctgctgcaacatgaaaaagaaaaaaagaaaaaaatctcctcagttatctgtatctggaaacactggctctggttatggaagtcgtgcctaagaagttatagattaaaggactgagaataaatctaggagtgttcattcttcactttctttctgcacgacctagaaaaggctaattgcttctacccttcccttcattttcttcccatacatactccttctacatcttgcaacctggcttgcacatctgttgatttcattttaactgcactttcaaaggccactggtgagagccagccaaatttaatctgcttttctatttttatctcctttaagctccatgctgcatttgtgctaactacctcctcatttctcttgtcccctacaactctatgctcttctgatttcctgattcctttcctgacttgatgacaaagcagttatttttctcttgtcctttctttctcttcctgagcatggtgctcagacactcctcttcaacattcccttccgtaaagggctaactggcacagagatagagctggctatgataatactgtaattccaaaccttagttttccagccctgttatctcatcttctacattttcaggctacctacgggtggttattatttggctgtcccattagcacataagttccatctgtctaaaggtcactatatcaggttctttttggaacttggactatgaatcaattaaacaaacaatacatatctaaagctaaacccattatatttccccaccaaataagtttccctctcaatattcccatttttttaaataaagattttttttccccaaaatacagacaaggtcttgctatgttgcccaggcacttgtctcaaactcctgggctcaagcaattctcccacctcagcattccaaagtgctggcattacagatgtgagccaccatgcctggctgacattgccatttcatactgcactataattattccataaaaatagtgatttgagtgctaaaggtatgttgtactgtattaagtgcttctacaaacataataatctattatttttatttttcttttacagaggaaactgagatgccaaatgattaaataaattctccagggtcatcccacctagtaagtgaagatgctggactcacaagtcaggtgatttttaatccctataatatactacattatattgccttccaggtcccaggctcaaacttcagattcgacttacactccctctttttcttccatatccaaatcgtctttttccccccgccctcttcacactgtctcttgctcttttcccagggatccacacaggatgggaatcaggaacctaaatttagtcagagttctaccataaagcagttgcataatagtgggtggctcacttttctcagttggcctgtccatatctatgcagctagcagggctgaccaggtgatttccaaggtctctttctgaattacattttgactgtaatctaggtttttgttatattttgtccaacacccttccttctcatc

SEQ ID NO: 34617 - DNA, 2316 bp, Homo sapiens
acaaagaagtagattatttgattgctacagacttcgcggtaaatgattcagcaacagtgtatagataacaccactgtgctattctagaaaatttcatcaatcatttaaaaataggacacactcaaacaatgggggtcactttgtgggaaaagtttaaacaacttatttacacagtaagcaaggatctatcactttatctaaaacactgcagaagaatcactagctttagggtaaacgtttgtaaagtgcctactatgtaccaggcaagtagtagttgcttcacagaatatacacgctccacacgcacgttcaaatatctgacatttgtagaatactgtcactcatctgatttgaccctgagaatacccataggcatgaacttgccagtttcacagttacggaaagagaggcccaggaagttaatttggccgaggtatcacatctggttccgcgggttctggccctagacttgagccttttgactcataatctaatcatcagctgctatacagctctagttactcaaaagctcttaggtgttccactgtcagacttttaaattaaaattctacttgacaactttcggtattgtgcgtattagatgctgttaagaatcaaaacaccaaaaaaagcaaaatattgtttggaagtgcatcgtcccagcatgtcgaagttcaagctcactggctaattttggagaaagcccgcgtttccccaggctgccgggcgctccctccctcttccccagcagagagcggcgcccagcctaggggtccccaagcccctgaggtagcgaggaggtcttcagccaggctccgccacaacccgtgcggccacgagaggacgtcccaaagctgggcccaacaaccggttgctcctccggacggaggaggtgccgagacagcggggcgcggagacaccacctccgccagctcggctcgcaccgtccgaggactacgccgcggcgccacagccccgcacccgacgcccagaagggtgatgccgacagccccgagagtccgaagcccctgcggcttaaaaccccgcgccgaatcaccccgactcttacctgtctgtacctcaacgttgtctcctgtggccaagctagtctcccgggtatcactcgggtccgctccgtcccgcccccgcaggccctgccgaaggccccgtcccggctgcagccccaccccctagccccgccctccctggcaaggctcagttcttattggctcctattcccacccctcacgctatgcccgcctccgacaccgccccggccggcggtgaggggaaccaccacgcctcaagtccgctgtatggccagaaccttgccaggacctcggtcactgcagttccagcaggcgggcgaccagtgtcaccgtcgtccggccaagccctcgagccagagctccatcgccttcgcctgccgtcgcatcggccccacggagacggccctatgcttcatgtgaaggtttactcttcacaactactcaacaagataaagcctggcttaatcagggaatccaagcactgtttcctaggctgacctcagtgagcaaacaattgcactacggtgccaacttgaaacgtcaagagaagcaaataactctcgcggcacctcaggcttggaatctcagaacgggggtgccttgatactcccagtgcgtgaggtcagcccccacgccctgttgagacacacatgcctaagcgctccgcctgcaacacgctcttgcttaggtatgtgcgtggtgttgtgcctactgcaagctgtaacccagtttcaccgaggctgcgggacaaggatcagttgagcctgtttcccaggcactcgctaaccaccccaccccgcctcgccccgccccaccccaccccaccccacccagccagagcctcttgggtctggtgaccaaactcttcctacatttgttcacacagaggtaccaaaatagaagactaccagaaagagaggtgtttagttacgtatcacggatgactgtcacaagcaaacttaacccaaacaataaaggtagcatatcccaaaccgttgtgaaactatcacctgtagacagtaaaacagaaattacattctatgatgggggaaaaaaaagtaatgacatacttaaaaaaaatcatgtcccaatgaggaaataaatgtggatattgtttgtagtaaattttgcacactgatcattatgggcttcccccaccaaaaaaaaaaaaattcttatataatgtgtctatctatttatttattgagacagggtctctttgtgtcactcacactggagtgcggtggcccaatcatagctcacttga

SEQ ID NO: 34618 - DNA, 1757 bp, Homo sapiens
gtttgcaatagtttacagaactgttaaaaactggacaggttttagaaacttcagcagctaataaaaatgaactgttctctataaacacgttaagcttattgcataactgaatgtatacccaaaataactttttactttctctcctcttattcctttaatacagaatatgggtaaagatgatccgacaagtgagagacaggatcaggtcagcgggctaccactgggcctcacctctatggtgggatcatattcatctacaaagtggttctggattagctggattgtcagtgcgcttttcccaacaccacctgctccaaccaccaccagtttgtactcagtcatttcacaccagcaagaacctgttggaaaccagtaatcagggttaattggcgagccacatctacagtactttaaagctttctataatcaatggaaatgaaaaccctagtgtgaccttccatttggttcttaaagtgactagagaacgcaaaaacaccggattaatatcggcctcacacttctggagtagttttctagcaacccccatccttagctatttttcaacagtccttgggccccgccctcagcctaagcaatggaaatcccccttcctattactccccgaaggcttctcagctctagcaggaagcctccaggccgcaactccttcccattctcccttctgtctccaaagatctccccacgtaggcaccaaatggaaggacccccgcccaaggcctttgtctccagctgatagattctgctccatttctggcatcagtgaaacgcctgaacattccacagcccaaagccgaacactatgcatgagataaacttacctcaagctccactgcctctgctttggacagatttaggaccacagccgggaaaaatgttggagaccccggaaccgccatgaacagcccccaccaaggagcggcacttccggccccgcccgctacgtaatcagtcggcgccccaggcgcctgagtccccgccccggccacgtgggcctccgaaccacgagtcatgcggcaggccgcacccagacccgcccctcccacacgggacgtttcaataatgaaagcgctaggtgctagtgtctcaaaaatcagtaaaactttattcgcttccattctttcgccattaacagaaaactggagaaagcaaaaatgtttcgtgtttacaaagataaacggcctctttacccagagatcaaaacctcaaacgacaagggggaagataaaaccgccctcccccacatcccctgagctgacccttgtcatcttagacaaagccttcagtccactggccagggaccctgtatatggccaattcaagaagagggccaagaaatcagacccatccattcccgtgatataaagttgaacagaagctacaccaagggtcaagtgtctgtattttacaggacacagtaaccaggcggctacttataaaaaaaaacaagattcatttcaggcacaacttttttatttttttttgttttgtttttaaatcagtaaaagaaaccgggtcctagaagctgcagtgatctaagcagcagcaagtttgtgcattcattttttttgtttttgtttaaatatgtttaaattatcacactgctggcactcctcatttgcatgaaattctgcaccatacttactaattgtagtaaagttaccccccaacccacgaaaaaaaacctactctggaagaaaattttcactgaaatataaccaaacttctttaagtggatt

SEQ ID NO: 34619 - DNA, 944 bp, Homo sapiens
caaaaccatatagtccttctattctggaaatctcacccctaacttattttccccattgcataatattagttactaataccaatcttactttctcattgctaatatagtcactttttgtgtagttttctgtttttattaagctacctcaaatgactgaaaaaaggtgaagtagaaataaaaaaacgaatgaatgttgatgatttccccttggctgaaaatatttgaaggttttggttaccaactcatagaaggatcaaattcagatacagagatgctggcacttacctgatctttcacacattccactgtggccctgcgcaggggtgtgatgttgtaagccatagtttgtgcattttggcccaggacacacaattggaacttgacgctctcccctttctgcaggcaatcccctttgttggccatcccaacgatgccaaatggatagacctcacctttcatatcgcctgtaaaacaggtacaaagtctaaaagctagtatttcacaacagtcctctgctgatgaccctaggaagtttatataactgctaaaaatgtgttatgttacttaaaatatatttacattttcagtactcagaagtttcaccttaaagcttaaatgaaatcctaaatgttaaatactaccatggaaccaaatgagaatgtcacagctcccatcagtactttattagctgatgaacaattttaaactgcatttataaattaaaacaaaaaatactgtcatttacaatcccattgcctaaattttaagcactatgggttgccaatattcacaggactatcttcttcccaagttcacaatatgagccaaccaaaaatacttttgtcccatactcaatgagccagtaaacaactaggcgggcacaggcaaaaacaatttagataaatttgacaccccacctcctttttttttgttcgaattctggc

SEQ ID NO: 34620 - DNA, 2787 bp, Homo sapiens
tattaccttctcttttattttagtcccagggctaaaacgaaacaaaaagaaggccaaatatttatctaagttttatgactcaggtatatccctactgaagtatataaagcccctccttacccacaccaaggatatccattattggttagtaccaaaagaaaaccaaggtatgtattatagtgctcctcaatgcaatatcaagaatgtttgcctttagttactcaaaatgaaaattactcagcattttagtatagagtagcttatatctgtgggctataatttgaaacctacattctaaaaaagtaggttagtagcagtggctgagaactgccagttcataccagcctgatgaaaatttaagcctctcaaaaagatttaactaccacagtgcctttgagcattctccctctccgccctgtctcccaactgtttaaagagcgccatattcttttactcatttaaggtgcaaaacacgaaaattaacttgcccaacaacgttcagatattctttgcagattcaagcctgtttcagggagcgttctctgcttcacctgtgagttaagcaagacggccgccatctgggtgtttctaagggaaaaccttaaagcaaaagaaccttggcactaagatttcgtattgataaaatagcatggcaaaaatttgaagctgtctccgacgggggaactctaaaacattctacatagaatgacgaagccaggccgttcattgcacaatgtgggtgggccaggcgctggcaccatgagaactacaggaggtggaagggaggacactactgagctttcagggcgcacgcccattccccaagatagaggggtgggagccacgtgcctaaaagattagggactggttccctttctcaagacgccgaaggggagacaatgaggggaaggttgggtgctgagaccctgctctaggtgactggagtaacgatgtcaattccgccacactactgtgccagatgtggctggggaaaggtgtctttaaacacttcccctaagatatctagatggagcagggtctcagtctatacacaaagaaggcgccactgccgcactgcgctctggtactggtagtcagattcccaagcaggtaacggccaggaaactacagggtccagagtcaaagtaggcccctcttctcggtctcaggctcttccaacctcacacaaaggaccgcgccaccaccccctcgccccgcccgccgggacatgtagttcccgtttccccagacaagccgcagatggggaagcagccagactacagatcccagcagcctccgcgcccgagccccgcaccctctgcctccatcttggctgctgtcggagcctccattttcgctccctccccccactttagtcaccaccaccactaccaccacgcgcagccggctggcctcaactcctcgtttcagctctgcgacctgacatgaggcccaggcagttgaacgggagacgtatgaaaaagcccagggcagggaatcggggtgcattcttccccacctagagctctacgagtgcccaccttgactcagaaggcttctcgttagccttggtcttattctcagcccttcccctgggtttctgctacccccagttggaccctgaggtcgtactcaccccaacagctcagcgccccctctccagcgccgccataagcagcacggcccggtacgtaggaataaatctcgcttctctcgcgagagttgcgggctccgggcgcgtgcacgagaaggggcggagtgaagcgtactctcaacacgcttgcgcagcagggctaagtgacgccaagcagtttgctgcacttaaccacaaccaacatggtggctgcattacattacattccttcttgggtgtgctgcgggaagcaatctcggtgtttactgactcctcctggacactaggggtggcgggtggctttaggcgtctctagtcttcgagcgtttgaatacgttttagcccacaataatggggtaaaccttgaaggccaacaattctgatggcatattcaggagtcataaaaaatgatttatcttttcccagcaaaaatccggaaggacctcacactcgtttcttcttatagtgcaagcattctttcttacgtctactgttttagaggaatttcattagtatagagtcagctttgtagcaaggtaatttagaaatctaaatgagacctttgttttccacgaaaaacattgcaacagatgcacaagagtgagcaaggctgcataatcactaaacaaaatgaaacaaattcagtcaactgacctttcaagttacgaaagatattcctgttgtgtcaggtaatcaaagagggtggatcagtaattaaaaggttgaaataagagcaaagagatgattcatccaatgggggaagaaggaaggagaaaaatgggtaattatgaccacaggaagttcaatggattatcccctgccagacagtagagcatgctcctctggtgagaggaatgcttttcccagattcaatgcttctgttttcacagattcactggctctctcacttgacagtattggataaataatgagcagccagtcttctgagaactctcctacccactttttgcttacaacacatttatttgacatgttgtatgtgtaaccactgggaagtatacagttgtaaagaaaatcggatatagacttgtcctcaaggaacttttagtctagcatcattgatgatcacaaaaacaaatctaaacatacacattggaataagtgcaatgaaggaaagacaaccttcaattcaa

SEQ ID NO: 34621 - DNA, 1195 bp, Homo sapiens
aattttaagtccatgaggctatgaactcttttgttacacatctgaggatgcttaaaaataaaccatgcaataataccaactctacacagcacctctttggtaagctgctgcaatattagtcagatgaccttgaaaagggtaatctaacaaactttattgttactgggccagatcaggaggactctcctactaaaagtactgacctggaaatatatgtacacttttgtaaatgtttagggcaattttgcaataactttaaactattaccagatatgaaaaggcctgactaacctctgttttcctgttgcaagtctctaatctgtgtgttctcttgggacagcagaatgtgaggtttgtatttggacatgtccttcatatcggatgcatcctcttgatactggacaaatagagacagactaagcatgccttaaagagaacagcggcagatgcaactgaagaggcagaagttagggctccagggcaggattctcagccccgacccaggaaaatggtctcaccgccgccctctgagaccgggaataaattccaggccgagttcccactttacctcgctctccacccttcagtgcccagaatccgagagcactggactcctaccctctgcctgacctggtccggaagcgctgtccccgcctcccgcatagctgctacccgccggtgcagcgccgccgactgatccaccagcgactcggcggccgcatcgtgctcccgtagcctctccagcagcgtcttggcgtctgtcaggatcttctcgatggtgcagctcatagcagcagcaccaccccagcccctgccgggctcagctacgcgactcgctcagatcttctgggagtctgtctcagcattacaggcgtcatttccgggcacgtttacaaggtgtcttggtaggcgcaatgggcgcctgcgcagtggcagcctattttgcgggttgacccgctttaacctgcggcttccttgcagtccttccttgcgcggagccccagacctacacttgccacgccgttggtttccagttaccacagcctggtggtcaggctatgattagctgggcagtgggaaggtctcctttccctactggttttcattgatgtgggttgttcttcagtcacagttagtttctttttattttcattatttttttcttttttgagacggaatcttgctcttgtccagg

SEQ ID NO: 34622 - DNA, 4001 bp, Homo sapiens
cagggcagaggagcatggccagagtgggcaggtgaccatttgcccaggaatctgcagggctgtcttgctttagagagtgagagtcagttggtcagtcttttttttcctccctgaattaatgtatttgttcattcatgcttctggcctgcatgaaatattatcctcagtgctttgtcatatacaggaattgtgagatcccccctggccctgagaattttgtagtctagttaatgggtcaactggacaatggaaatagacaaatggaagcaccagagaataatctaaagacacatagagagaaacagtactttagcaaaattagggtttaaatcctggctcagagtgggaagcagggattcagctgaaggctattttggaatcccaggtatgaagtaaaaaggcctaacctaaagtcatcgtggaagggaaaaggagagatacaatctgagctcagggacatggcagtcattgtctgatctgctcaacttttcactcacagctcctagctctggaaaatagcccaaagcttttatttttgcccaagactggccctggattggtcagggcatctgacccaagtgccactaatccagaggcttgccagtggcatggctcgtttgaaaagaggagcctggccaagccacattccccactaagggctctgaaccagaagacactgagagaaaggacagcattgggactgacgctgcaggatcacgatgttgcggggagtgcagccaggatgggcacatggaagagcaggtgctctgagaagcaggagctatgaagtgggggaaagtgacagagagtatggggaatcagagagccgttcagtggtaaggaagggacagaaaaaatcgttatcatgtcaatgacagaacattaggtggaaatgtacaaagtcccactatcgagggcctgagggctgctgcagatccagagccagcctctgcgtgctgctcccaccccactatgccaggccgtttggctttctctgggtgcccgggtccttgcatccttcaagaaacccccatgacaagaggaaagcttggttagtctcagtcttatggaaacagaatctatgctagcctaagtcatttcttagagatctggagaatgaaagtcagtggaacgtccctaggcacacacacatgtgagtatctcagtgtaaacgtatctgcagactccaccacaacccagaagtcctgtgagtgtggggcaagcatggcgggtagggggtggtggggagagcgccgagtgtggggagaccgagggatcagggaggaaagcactgcctccccttcctggagagtccagttggaagaactcatgggtcatggcagtagaaagtgctacttttagtttccttcaggatgtagatgccatttaaagtcaaactatttcctaatactggtgcccagaaaatgattcattggagaatgctgatgttgttttctgtgcccgacatgaagcagtgtgatgctgtttcagagcagaggatattggcctgaagggctgtaactctgtgctgtccccaaaggccgtttctgggcagtgtttatcttttgtctgcctgagactctctgtgtggctcactcttcatcgtgattctttgcatgcctgtaacatgtgtcatctacacgtattcttttggcacccatcacctacagttttggttacttcccttagaggcttgtgtttgtgtctgggggtgtgttactttctttgcttccccagaccctggatccatattcaggagtccctgctctgacactttgtgctatgtgaacttcgacaagccacgaacgtccccacacttctatttcctcacctgtaaaatgggaatgatgacatctgatgataagcaaccatggccaacttatctaacagaaatgaaggtccaatgccaatattggagaatgctttgtaaattccgaattgtagtgttcagtgagaaattgataacattttcttcttgtaaggactgtacttcatagatttttaatggctgtctcacatcgcaaccccaagataacacactgctgagcaaataggaggagctcaataaataattgtagaatgtgatcatcgttgttctcatctttacaaattccttattaatgccgttttgttgctgccagataactcattgtcttcccatgctgacattatataagtctgggacacacatgaacatgggaagacatcagaaagttacataactgaccagtagagaataaacatcagttacacataaaggttaagtgcattttagaggttagaaaaagtgatgagtgaataattgcgataggaaagtggtttgtgggaacagctataagatatagattgaggtaggtgggattggggaagctgcttttatctaattaagaagaccttcaagaggaagtggattttcaggagcaggtagacgagagggcagaatgggcttggtgaagaggtggccagagaacattccagacacatgagtatcctccgaaggctgtggggcaagataccttcagggtggtttgcccctcttgacagttggaatggctagaggggtgtgtgtgtatgtgtgtatagacatagggaagcggagggcaagggacagataagaagggtgggaaagaggtaagggagacctgctgggggtgatgaagacaatgtaagactgataaccttcaggtgtgagatgttttggaggagccctgttgagatttctttacactgtatccaataaagttgtcctcagcttctttgtttggattcggcacttggaaatggggctagtttaaaatcagagggagggataaagctaagaatgtgggcagggtaaagaaaccaggtccccaaatccatataacaacttacagaccttatgccattttagttaaacttggcctagcacctttgggtttgaaggtttatcattaaatagcttttatttacttgcttctcattgtgtaaaactgttaaaacccccaggttcctatttgttctaggccccagaagtgaataattgatcattaggcattgtaacattggtctggggcttctgaatgtgcacatccactcaaagtgagacagaggatgggccttccccctgtccaagccaaacagctcagtgtcacatcctggcttcacctatttccatggatcctgcaacccagacatgatctcatcagggccactccctagaaggaagtggggaagcacaggactattctgtctcattttccaaatagagaaactgaggcactgagcaatgagagaagcttagtaaggatgagataatgagctagctgcagggctgagaacaaactgggctttggctcagagtggctaccattcagtacaatgtgtgtgtgtgtgtgtgtgtgtgtgtgtgtctgtgtgtgtgcctgcgagcacacctgtacattccctctcatcctaaatcttccaaagggacatcctgaagatgacacagtttaaaaagggaccccattttgcaagacagaatgtgtgacaatgagctagttatagaacctctgtaagtccagtgtcctcacctgtaaatagggaataatggtatccatctttacagtattgttgtaatgagtcattaaggttagtaaggaatctaaatatcaggatccaatttctgatccccagcaaacatatgagccaccggatcacagtgcccacttggtggagtttatgtactgacctgacaccattcttggttacctggttcagtggtggaagccatgacctggtcagcctagagaccagctaatctaatgtgcatctgtattctattaaatttactttcctaagtatgttatttcagtgggggaggaagctttgagtgcctactatgtgctgggcaattttctaggtgctctatgtaaatgatcctattgaatccttctcatagtcttgtgacaggtattaccaaagcaaggatttgcatcccctaagaaatagttacctgagtgtcctgaacacagagcggtaga

SEQ ID NO: 34623 - DNA, 687 bp, Homo sapiens
cccccacttgtctgtccagcaaacatctcctcagcatgagggtctgctctcttgggaagaccttcctggcccatccaccccttctgcctttgcaagcctgcatccttggcacccacgcctccccgactcgtcctaccccctcagtctggccataaacttcttgggagtggtgatcatgcctactcacatgttcccctggtgtttatcatagtgttagcacatagtgggaattcaaccaatgcttgttgaccaaatgactgaagcagggtaacggaaaattcaagtccatgctgatctattaatacctggacctgaggggtggtgagcgctcgttccccccgctagagggcactctggtcgtgtgcttcactggaggccgcgagcagtgtggctccacttgggagccttgtgaaaccagttacgctcccgttgctggcagcttgagccaagcagcacagacgcacttacggctcaggccagtctccttaccaggcgccatcattctcttcacatggaccctttgtttctctcattgccttcccctcacctcacctcacctcatgctccccctggaggtacacaaccttcacctatggcacattcagaactttccctacttcctttagcggtagccaataatatctgaaataacttcagctaagaccctaattaatgcccattcctgag

SEQ ID NO: 34624 - DNA, 2178 bp, Homo sapiens
gccttttattttcctgtccctttagtcttgaatgcccttcaaatctcattcaccctctggctagttcttactcatcttccaactcttactcatcatttaagactcaccttcctcaacttccctaccccgaggcagaattaattacatcctccttttatataccataattatataatttatttcattatattatagataatttatagacgccgaataccctcttaccacctaccatagttgtcaatatatgttgaatgattaaaaaatataaaatattgaaaatatacagtgcaccactgtaggaggtgttcttatttttactggtaatgccattgtgaaaaaataaaaatactcagagtccccaagtgcctttccagggtaataaaaattcctgcatttggaaatcaaaggaagtttccatgtctttttttaccctgtctctttcacgtaaagtttggggatacaggttgagacatttctgttaggttatactgagtttacgaggtataagatgggaccaaatgacctcaaggattcccatcagagaagtacgcagtggtgagagcggattcctcagggatgtggaggtcaggagaaagtcccactttcacttcatggatgcggctgaagttctttcacaatctgtttcatggtgctggtggtgaggtatatgcgaatgtgtgtgtggcaatacttggagatagtttgaaacttagacatgacatgacctcgacgtgactcactagttgctgtcagcgcatcttccctaataacttgatgagtaagtggcaaaatatctggcctaagctctttttcctaccaaaccctgctttgagaatgcaaacaagatgcttcagaaaagaatacgctccacattcaattagataaagatttctcatacatttgggaaaaatcactcagaaaattttcagccctcattgcagattaatccccagaatttcgttttatagactatccactatttcaaaacatttcccacagggaattctatcaatgggtagtaagtctccagaaggttacagataggagctggaattctctcctttttttttttttttttttttttttttttttttttttaaaaactaaatttccaagaactagaccagatgatccctagacgtggtttagtgttttgtgttttcaggcttttagtatgttggtgctggaagggacttaagggaacatctggttcaggcccctcactttacaaatggtatcaggaaagttaatggctttttaaggtcatctagtgtatcaggagtggagctaggactaggactctcaggccctctaacccctagccaatggatcatctttcctccatgccaagttagacacaaggcaaattgctacacaagatgaagagaaattttaaagaaatacaggcctttcaacaccttgagtatggatgtgtaccactgttttcctgagacctgaacttcactgtaggaccacctctcaaagggagacttataagagacttctgctgccagcccttgtcttgcacatcatcttagaggacctggagatgttgatgtggataatggatcaatatttaacttatttaacttagattttaggggcaggttaattcaatgaacttaattggtatttgctctgtcctcccataacaaacaagaatctctagcgcatctccaactttcagcctcctttatcccttaatcattaaaaactgctttctactcccctgtgagtgagtcctgcttccctctctttctatccagttcaggcccactcccacccttgctgctcctcaatgggatgcttcacctgagcccatggagccccagttctattaacgacatattccccttaacctttccctaaagccctttttctgcttccttaccacaacagacttgccttttccctggatactgttcttgcaatcttcttccacagagattttccttcttccattcccagtggaataaggagggtgggtagagtgagtttcttcatttctttcaaattgtgcccatcagtcatcctcaggcaatctcaatacatttacttttattttgaagtttatcagtggctcactaagccttctctaggagtctattttttcctgtctctttaaaccttgaacaaatacctccacttcctcaggctttgtagatagcctcagtc

SEQ ID NO: 34625 - DNA, 1845 bp, Homo sapiens
gattaggataagatgaagtcatgagggcacagcccgcttgagtggaagtaatatctccccaagagagcttgtttcctctctctgccgtgtgaggacacagaccaaccctgggacagtgttggaggggaatgcaaaggcggcaggatccccgggagccattgaggaggctgcttgccccgtggagacagcagaaagcaggcttgacagacccagaaaccagaaattcagagtgatggttgccaaagtgctgtcactcagccaaacagggacctggctcaaatgttgcaaagtgaagcctgtatctgctccacaggagccacaggccagaggtccggctgttggtgctactctgggactatcactcaggacagcaggcacaggcgaaaggcgtcagacctggaatgagaccgctctgagtgccccgtgcccctcactccctccgtgagcctggagaagtctcgttccctcttcaggcccccttttgtaaaagagacgaggcaactgtttttccatctgggctctctgggctctctgggcctcctgggatccgaggatataggaccaaggtaagctctagtttcatcaggtctctttggagttcatttaagaaaaaaataaataaaagtgtactactgatcattgataacaaaaagacagggcaagcttgaaggccacagcactacgggagggtgatgcaccctctgtcttcgctttgaatgctctgatctcagaatcagtaaagccgtggctgtgggatcactctcagtcatggtgaaggtatgcgaagaatctgcagttatgttccatcatgtggtttgctaaccagagggaaattacccctgtatcagatgccacaataattgtcattcaatcattttcttgttgcccagaaggggagtaatcataaaggaagggtggtgtcagcggtgttgacatggggccaacatatctggatggaaagtgaaatctcagtcagtcatccaggctcaaagcccaagcagagaggcccccgggaaggagcacagggctgggagtgagtgtggggctgagaaagggctgtgccaggaggcctccctgctccacattcctcacctgcgatccctcacaagatgaccaaaacaacccagtgaaactgccttgcttggaatacatacgcaggaggaagtgccctagccacaggaggctgtaatacactagagggcagtggtgcccaaggccatagggagggaaagtcccatggaatgcgggcagcctttccctcaatccctctgaccattcctgtgggggaatgcaggcccagggttgccagattttctcattttccagtagaagccagaaacatgggtttttatgtgacattttcccatttttaaaatactttgcagatcaaacaaaacatgttgctaggccagaactgatccattagccatcagtctacaacccctgaattccaaatgagtgacttcattttaatgaaaacaccaagaaaattaggtaaaagtgttcattctcctgaaaatttggtccctgggagcacattatttattcaatcatcaagtgcctactgtgtgccaggtacaaatagaatgctagaagttttctattttctcatctcttctctgaccataggtcttcttttctctgtttcattcatgaacttttctgtatatgggaaagtgggaagaaaaatagaagggaagaaaaatataggcctggaaaaaaagtttggcaaggtgtcattccacaagtggagggtaaaattgtgtctccaagtccaccgtcttcatgcactgagcaactagcacagagctggtcacctggttattgaaagacacagcaacaatt

SEQ ID NO: 34626 - DNA, 1363 bp, Homo sapiens
tttatagtgtgtgtgtctgcccagaagagagtgggttactgggctgtgcacgtctgtgtagggtgagtgtgtgtatgagggtgaatgagtgtgggaggtgtcattccctggtccgtgtgtaagagtgtgaccgcgcacgccttcgtgtgtgtcccgggtgtgtggggtcggggcggtgacgaggtgagggggacgccggccgagccccgccctccgctgcaggtgggccggccccgcggcggggccggcagcgctagctgttcttggctcgcggccgcgccgggctcgcagggctgggctcgggctgcggggcggcgccgggacaggaagcggaaagcagcagtgcagcggcggcggcggcggggctctgcctctccaggagcccagcgcaggccgcagagccggggccgctgtgagccgagaccgcgggccgcggagctcgggcggccggcgcggaggtgagtcccgcgagaggccgagcgctgcgcggcggcggtccccggggcagaccgttggctgggagacgcccccacctcggaccccgcgtgcccctgcgccctcctcccgcattcgccccgccggacttcgaccccgggtggccggctcccgcctcgggccgggggctccctcccctcctccggagcgctccgggtagtgcttcctctgactccactcttctccccatgcgttgcgcccctcctggccctgccgtgcgatctccgccgcaccccactccttggggtcccggggttccctgctcacacctcggacgtccctttctccccgggctggcctttggagtgcgccccttcggtgcgcgtgccggggcggcgggcaggccggcagggagtggccgagcgttggaggcaccgggcggctgcagcagccgtgcagggcgggagccgggcgcgcaccggggttcccacccctggcggggctcgacccgggcgccgcctggcccttcgccaggaaccgggacagagctggtctgtgtgcacacctcgctcacaaaaaattgagccggccctggaggcctggggggcgagtccggttgcgcctcggagagcgcaacaggcaggtaggagtttactttcaaaaacgccggggtggagcagaggcgcctggcgggtctctgcccaaggtgtccctgctggaggaaatctcaccgcgccggggcagccttcgccaccggcaggacctcatttccttctgcagtctttgaactgccccaagcatcgcgcctagagaagtgtgaagctttataaaaatttaaacgcgtccgtggtggcggcagcagtggggcggagccgcggcctggctgctgtgtgatgagcagatgagacttggagctgaggaatctgtt

SEQ ID NO: 34627 - DNA, 521 bp, Homo sapiens
tgaccatcttgctttgttctgggtggaagggctccctgggatgcaggactttcagtactgaaacttggacagaccccagtaagccaggatgatttgctcatcttacaacagataaagagctcggagagccagccgatagccaggaagacattttctctctggattaaagcagccacatgttcagtgtgttgtcaaggcagaatggttgctgtttgcctgcacagctgctgaactcaggacctctgtttgtgaaatgatttcagaggcctggaatgtgcaacgctctatagaaaaccaaatgccactcttttctagttcagagctgtggttcaagaaagcgcagggatgaacagtggttccctttaagctgaagaggaattgcctaagagctgatgcactgtggtggtaacccgtggtgccgtgacccagggcggctgcaactaactggggaaggggaggagctgggtattgcataagctcttacacaaggagatccattctgaggaaacattgatatccat

SEQ ID NO: 34628 - DNA, 605 bp, Homo sapiens
aatagttctatgcctcacaactgaaaaccaaatagttcctgtttttcttttgcatacagtctcaagtgttgatggagtagcactgtgatgttcattaaggttagaagacgctactcatgaaaactcttgtttgctaggcaggtgggattatgggtgggttttattattctttcaaaaaaatttttttaatcttgacataaaattccttttaaaataaacatttttaaaaggttatgaaaaggtctttccaggaagaaacagaatattttggagagttcccagccatgaggtcatggagacaacaaacaaatgggtcaagaagtgccaattgggcaaacaatttcaacatataaagagatcactgcataacttctgtgaataatcaagcatatcaaagttgttacatcaataaaacttacatataattaagtactgcattttttcatccagatgttccagtggctagcagataaagcctcaaaaaaaaaaaaaaaaaaaaaatagctcaaggggcatttcaaagccattgtttatgtcagcataacgtacctgaaaaaagtgtgaatagctcatcttgtccatcagacttggcttgtctttgtctt

SEQ ID NO: 34629 - DNA, 2734 bp, Homo sapiens
caaactgccgtttatcctttaaataccttggcagccatcacatcctgccccttcgtcttttgcacttcctttgtacctcgtgcatacttctataagcaaatgtatccgacggttttacaagaatttgcttgcctaccagtgtacttaacccatggctagcacagaataggactggaaagaaatgctgcacagacagcacttttctctgaaggctctagggctccccaagcccccgcattaaactggtttgggcaaaacgacaggcattgctgagagccgccaggccgcccgccagctgcgggtcccctgtaggcagagccctgggtcacacgcggacgcggtcccgatgtttcttctcaggccctcagcccggcccacttcctctttcctcactttaaggcgcagacagcggtccctctcaaaacaaaacgtacaccaaaacaccattttttttttaaacaggaagtccagaggcccgggtccagggcatccagccccggatctcgaacgccctcctcgcccctcgccccgcgtagcccggctgcgctccccgctccccgcccggcgtccacctctcgagcctgacagccccgccgcccgcgcaggcgccccgccccggcccggcccgccccggccccgccgccagcgcttccatccccgccccggcgggtccaagccggtgccgggcgcccaggggttgccgcgctgggcgggagggcagcgcctgagagggcggtggggtggcggggttcctgcgcgcggcccgccatggaggtggaggaggcgttccaggcggtgggggagatgggcatctaccagatgtacttgtgcttcctgctggccgtgctgctgcaggtaagtccccgcggccccgcagccgcatttccctcttcagggccgcccggcgcagggctaggcgtccgctcccagaccgccggggccggggccgaggccgaggctctgcaaacaccgaggtgtggcgagcgtcggggtggggcaggggcgaggcgccgcgcggtggcctgggcccggccggcagcgtcaaggtcgccggccggcctcagagcctcttgggttctgctgggccctccaccccgccaccttgagtggtggaaggagcgtgttgggggaggtttctcagccgctatgctggttaaggagggatgcaaaattgtgttacctgccctacgctgttgcctataacacgctgcaaatatgaagggaattgttaccctacctgtggcactgtcaccttggaatctaggacacagtcttgataatctgcagacaaaaggttgtgtctaggatcgcctccctctgcgccgggtgtcctctgcctcttttcctgggcttgagggggcttactcttctaggggctttcaaagcataggatttatttccctctggtttaagttctgctggctcattcggccctgcgccagccttgggctgagactcccgtgagccgaatagtgccatctaccatgtgtggttatcaaatggaatcacttcttcattataaagaattctcagaacctacttgtacaccccagcctcaaaatatcgattccatatgcgaaaggtcactacagattaactgcgccaggcaaggattagtccttcaccaacttaaatggctcatttgacattagtcgcttctctcaatatgccagaggcatttcattcacaaatcctttcttagtatttgctgtgagccagccattttactctttccttcagtcatcaggtttaatacgggctaggatgtgctgaacatagggatgccatggtggacaaatcattgactgccctcaggagcttgcattccagtggctgcgggtggggcaggcagacagttaagtaatttagttagcatgtgatgatagttattctgcaggaagtacagagtggtcatggatatagccaccagtccacaagttgcttaaagcttgcataagacagtggctcaacaggaagatgggggaaggtaggggttgacttattgattaaaatgtttggaagttcagttgatttcatcatcagccagaaacggttcaaatgatggagtcagttctttttctagccgaacagttctcagctcacgaatatgtggtattctgaagttcttttaagctcgttgttttagctttaaacaagctttccccagggagaaaaaacgttcaagctaaatgataagagtatttaataccgagaaagaagaattgcaaccatgatgcctgatctttatttataacagtttctttgagaaaaccctttttttctgttccagccatgaattccaggaacatacatcctttcttgaacaatcccagctccccatccctctatccctacccttcacttcctgttatcattttcttatttgcctagccaagtatccactaacttggagtaagtttgtcttcagtagagtgaggttctaaaaaggccagtgttctcggtttaggacctgttaagtttctctaacttacttttatttatggttgacccagttagttagagtttgctatcaaaaagttccaagcccatgcctatgaccgttcactaaaccttggatgatttatggtcagtatttgcggtacaaggaccaggtcttagagtgttggggatgagtgactgattgtttatcttatagatgtgggtgggaagatgccctgtagctgtgcttataccagtggaggagatgccagcctaggcaaaagtgaatccttca

SEQ ID NO: 34630 - DNA, 2706 bp, Homo sapiens
ttttatatcaggcctttctataaaagaagatagcaatttaagcagtcacagatgcatgtatataattaaatttataatttgtaaggtgattttacacatcttaaaatatattttatttactagaatgtcactttataatgtgacattctaataaataatgtcattttgcataatgtttaatgcaaacaaataagcattcagtaatgtttattgagggccagttgtgcgttaggtactgaggcttctctggagatacagaacagactggcccctgcctcgggttgttcactactgtggacttcagcacatcacagacgattatctctgcctggtattctgcattgtcagattcagtctgagtcatcttgggattacaggaaatcttttaaaaagtcagagtttgttcctggctaatatggtgaaatcccgtctctactgaaaatacaaaaaaattggcaaggcgtggtggcgggcgcctgtagtcctagctactggcgaggctgaggcaggagaatggcatgaacctgggaggcggagcttgcagtgagccgagattgcgccactgcactccagcctgggcgacagagcgagactccgtctcaaaaaaaaaaaaaaagtcagagtttgtaatcctgcaaactttaacaaatttgtatatttaaggttgattttgatcaagctaaccttcctccttcttggaattaaaatctcagacactaagtaaatcagtaacaaacacttctgctggtaaaccagggctagcattatctccccgggacttctcagattggcagcgtagggttttgcatgccttgttaacctgacttgtaataagttcttagtcttcacaatggaaactgagccaaagcaggtttacatttccgtacttgcatttggtgtgagtcatgagaaaggagaatatttattttctgaggaaggaagagaacctgagctaactttgaatttcctcagtggcctagcatacaagtgccttaggcttactgtaattcaatccttttgcgaatcctatatccaattacccagatatctacatctaaaaaaagcttgtcttcatcaaactgtcagacaggagctgtcagagagtctatttgtgggactgccctgtatttcagagcatttgcccataaggagctaaatcatggagtagggaattgggttgtgcccccacaacacacctattccctggatatgacatcctggtaaaatcggactgtgtagcttccctgagcacatgattatttcttcgtttcctgattgctcagttggccctgttggttgctttccctgctcacagccggcaattgtcgctggatcgtagggcaagagaatattccagttataacattttgatcagctgcggtactggagcaatcaagatagggcagccacaggtgcaaaaataatgaaagtttgtgcatctgatgacaggtgtctggggtaaccctcgaacattaggaaagaccccaccggaggaaagggactcacaagttaatgattacagtgaaagcagaagtaacaacaaaaatgagcacatgagagaaacagtgggactttcgtaatgttgaaaatgaggtggagagagaattctaaattgcaagttcagagaaagaggctcttgctgtctgtgaaaaacaaatagtttggcactactatgataagaaaagcccagggaataagattctgaaaaatttgggagcacttgatatcaaaagaaggagatttagaattacatatagaaacaaatggaaaatcaaggctgttttgaggggtgctatcagagggtcattggagaggatgtagctttacaatatttatatcaggctgtgcattggcaggagttctgtagaagttggactgaaagctggaggtaatgacgtgggtggggcacagagcagctagggagctctgatgcggcttttgcttggggcagagtatgggaagatatgcaaacgctgaggccccaaatagtgcagtggcctttgtgggcagcacttacaggtgggcttggaaacacttgcctttggaacattgtttaaaagtaagtagtgctcccagaagggctgtaatttctttagattatctgatagcagactccgtgatgtttaccagcttcaaggagatcagaccattgtgaaattttttttttttttctgtagtaaaactagccccagccagcccaactgggaatttactgcctgagctgttttccaacataagttttgctggcaaaaccagacgtgagtgttccctcgactctaaagggacctgtttacactgactttatttttactgccagctttcaagttggaagagggaaattacgtttaaaggtcagcaggtgagcagaaggattcctgaccagccattcctgtgggtgtgtgcccgtgtgcactctgtgtacgtgtgtgtgcctgtgtatatgtgtgtgcctgtgtgtacgtgtgtgcctgtgtatatgtgtgtgcctgtgtgtacgtgtgtgcatgcttttctaaatgccaaccgttgtgctctgcgctggctgacaagacctgatcacttgtttgcgggcataatgatgggtgtcaggctggttgttgggcagtttcctatttgtttattgtaaagaaggtaaatcaatccgtgggattttctggcttggagagcaaggggtgtttactgtcaacaggataaggaccaggagat

SEQ ID NO: 34631 - DNA, 1927 bp, Homo sapiens
acaagtgcaaatgccaccatgcctggttaatttttttatttttattttttgtagagatggatttcatcatattgcccaagctgctcaacaaatatctactaagcaccacttatatgactaataacatgatagttgtgcttttgaattcacatgaaagtgaattgaaataatgtacagatctgaaattccagggactttagatgtttttcctctttttaaatccagctgcctttctatgggtaccagaagtcatgtggatacatcatctaaaacatcaaactattgttttcttagagttagacagaaccagctggagctgattagggctttccccactcaatgggtcaatgactggccctgggcaagagttaaccaaattccatggtcagagctttccaggaggaggaggcagctgactcacagccgaaggcgtgcatgcagtgggacatggtcatagttcaagctcctttggctgctctgtttacccacttgttctacctctcggctgccggtctgcctgctttcccccagtcgttgcttcactggttcctggagaaaggggctaggtaaattctgattgtttgcttttttctttaagcttagaatcatctcaacagctcacattgtctcaacaaataagctttcattttgcctttattttggaagggttagtcatgaacactgaccataggtcatcagtacaggccaaaaaaaaaaggagatattttacaaaatctgttacgtcccctcctgttacttcccacctttaatttgtgtcaaaacattcaccattccatgtcattcattgttggctgagtgccagcccagggtagagaaataataactgaacaagctgtccaaagacctaaattcaaattctgactcttctacttactggttgtgtgtccctgaggagatctccaagcccctctgcatcttgaattccttatctggaaaatggcaagaaagctcaccttactgtgtgactgtgaagttgaaatggtcaaatgcattagaattacggtgttgcgtctgcatggaactgaatgcatactcattcttctttctcaaaccttaggtctcctctggagttcctggtttagttcactgtctttacttgtatattcatgagataataaactcagcaggttaatttacttgcccgaagtatttacaatgattcagtagcagaacaaagaggtaatccacttgtaacacccaggtcgaggtctccgtgtatctggtcactctgctgagggtggagtggttaacagagctgcctgacgagacaggttggttcccaggacttccgttacctcccgaatctgtgaattcatgcttgttttcaatcctttcctgaccctaggttttggctcccagtcagttcctcgtcacagtcccaataaaaggcctggccgggtacagggaggccagggagcagcactggcggtactacacactgcagggcaccaggctgccctgcccgttgcgggaccctgagggtctgcagcagtggctggaggtggaacagtttatgaagagcctgtggcagtggcatgagacagatgtgaacatcgacggagacattgtgcctgccaaggtcctcctagtgttccggaagctggtggaaaatgcagttagaacctgtcacctctcaggtgagctgatcaggaacaagtgcaagggtaattgctggcattcccctttcactctataaaacctctgtttgggtgttacctgcagctcacagcctacatttgagaaaataatcatgtgctcttcacatttatttaatcttcataatatgaatcagctttttttcctgctgttgatgcacagaagattggaattcatactaacaaaatagtcttgtggctttaagaaagttactgtgctggcatagatataaaatgctgtggattatgca

SEQ ID NO: 34632 - DNA, 956 bp, Homo sapiens
tttgaaaaggtggcaaatgtaataaggttttaaatttaatttcggccgggcagggtggctgaggcctgtaatcccagaactttgggaggcctaggtgggcggatcccttgaggccaggagttccagaccagcctggccaacgtggtgaaatcccgtctctactaaaaatgcaaaaattagccaggcatggtggtgggcacctgtaatcccagctacttgggaggctgaggcaggagaatcgcttgaacctgggaggcagagcttgcagtgagctgagatctggccactgctctccagcctgggctgggctacagagcgggactctgtctcaaaacaaaacaaaaaccatcttaagcaacttttaaaacagctacacagtcacggaatgctaaaaagtgaaaattgactgtaacattggttcaatatgtgtgtacgtgtgtggaaagggaggaactgacgtgcgccacagtctgattccggtagattctttccgtctttcccctgagatctgagggttttgcaggaagcagggctaccagcagcttcctgcgtattcccaattcttgccagcagagggcagcaagggaacacatatgaaaggagccaggtcccacccattctcgtcctcggagcccagcaggtgtcacacttctcagcccgtaacttacacctggtccctccagagcaaggatgagtggattccagctcatgccaaattgttgacctttcctgccattttagccgagatttacatctttctccttaaaactcagattttaaaagggagcctatgagaggaccgtccatccaggctcccggggcattcagctccattctgtttcctgggacagattgcacagctaagaaaagccagagaatattactcctttattctgttcttttttttttttaattctccaaaagaccgttcaatccttcttcactcttccaggccc

SEQ ID NO: 34633 - DNA, 669 bp, Homo sapiens
cccttctctcctcctctctcctgcctctttccaggatgttctttgccccacagtgagatgtgaggggcatcaagaaggctccctgccattgactctctctgtccagggaccgccatatgtgacttgtgctgtctgtgaccaggacgcgggctcttgaaggagcagcgaggagcaagagagaggggagcggacgccccgactcgcgcagggctgaggctggaggggaagactcacagggactacggtctacggggaggccgccttgcgcgccgcggctcggaagcggcagggggcgcccgcggctcctcgcggccccgagccgtgaagggctggggaaattcctcccgctgaaggcagagagcagactgggacactgcggttcccgagagccgcagccccgccgcctccgcccacgctggccctcgggaggcggaagactagctgacggcggcccccacacgcgctctgcagcctgggggtaaccctcagcccacccagtgcccagcgagggggctctgatccacaggctccgcccagctccctgggtcctcttttcagtgggcctcttttattgcctagcactggggatcggggtggggggtggacagttaccccagtatagatactggctcatccggacatatctgtgctgctgcagggcactcagcc

SEQ ID NO: 34634 - DNA, 1304 bp, Homo sapiens
tgtgcctggcacatattttaggggctttgtgctttatctcatttaatcccctcggcactcctttggagtaggtaggcagcataaacccattttgccaatgaacacttggaggctcacagagaaaaaagaacttgcccaaggtcatgggctggagtggacagagccatattctttatgcgtttgtcataatgagttccttacagtgcaggtgacaggagagacatgaaggcacagcctaccaggaccagaagtccaggaggaagactcagtccttctgctgggccctgcaaccctatgagcctcgcaggaaccaagagagagggagttgagcagagagggacccagaggcaccctctgtgggtgctgttccctgaccttgacatagaggacattcctcaacatggatgtgggtcaaggtccttccctgatggtggaatgggtggagctcgtagtgtgacagatggtagagaaaggtgttcttacaattgcccctgggctaacattttccagttgtacctttgaacgctctaaaaaatcctaaaaatcactttcacaaaagttaatcattcactctgcaggccagatgacctttgctatgtagttggggttttgtttgctttttttttttaaagtcttgtagtttgtaattggacacatatcctttaggtgaagaagaaaataatttagggtctagtaaaaggcttggttttcttcttgccctccatctcccaggagtttagaaacattttctcagtgagaggctataaattgaagactgaaaacaaattaatcttccaaagctgtggccttcatggagtactatatacaggagaccccaggagacaaaaacataccaaaaccaaaaaatcaataaaatccaagccatcacccaccctgcacctgattccttaggcccctgctgtcatctgggtggcagctaagtttaccaacagagaggattctggaaatttcattggtacagtactctaaccagctttgccctttgagaaatggactttggaaattgcattggtacagtactctaaccagctttgccctttgagagatggattctggaaatttcattggtacagtactgtaaccagctttgccctttgagagatggattttggaaatttcattggtacagtactctaaacagctttgctcttagagagatgcaagtgtggagcttttctattttaatatttcaatcacctaaaagttaattgacctcctataataatttgggaggtcaaattggctatgtaaactggacaagccacccaacttctttaggcctc

SEQ ID NO: 34635 - DNA, 1204 bp, Homo sapiens
ggtgagtctactcagggcaggagacattataaatccatgtgaggccaggagagaccagattgcatgctgaacaggcaataaaaaggtaacagtgaagcaataaaacaatcctccaagggaacagggcacatggccatacacagcagacaggtgacccacggactgttggagagctgcctgagggacttcagcctaccatgagtgtgcctccctacacctgtttgcaaagcaccagtcagaacaggttggcacaggatgtcacctggatatgagagccaccctatattctgggcacctgcagggaccactggctatgcttcaagggaccagcttgctcttttacagaattgaattgtgccctcagtggaatcatgattgcctaggatcccttgcaggttacctcaaactgggatctctacacaaacttggtgaagggtatccaagagtgggcctggcatctctagaaacatcctggattaggtgtttgcactctgtgctctctttttgtttgagataagatctcactctcttgctcaggttggagtgcagtggtgcaatcatagctcactgcagtcttgaattcctggactcaagtgagcctcctgtcttggcctcccaaagttctgggattacctgcatgagtcactgcacccggcctctgtgctcccctactagaccctgagccagatgaggacaaagtccacactttattcatcagtattcccagtcaccaggggtgacccagagcctgacacgagcctattctcagtgaaagtttgttgaatggaaggcctagaccaggagtggacaggctttttctgtaaacagctcaagagtaaatacttcagactttctgggccagatggtttctgtcacagtcctattttaactgtaaaagcagccactgataacatgtaaacagaggagtggggctatgttctgataaaacttttaaaatagacattgacatttgaatttcatataattatacatgtcatgaaagaggcttcttttgattttttaaccatttaaaaaagtgaaaaccattctttgcttgagagctatgcaaaaacaagcagattttgcccatggggtgtagcttattaaccccgggtccaaagcatcaaaaaggtgcactttctgtttcccatgggtgatcaacataagtcttccatgcgcactttttgattacttaatagccact

SEQ ID NO: 34636 - DNA, 409 bp, Homo sapiens
ccaaagaagatgagctcatttccagaacccaagaggtggctctgaccctctcttcccagttattgctgaagttgggtggctgaaaccagtcagggcatcatgctggcaccaggccagtcttgcatcaggcaaatctgctgactcatctctctcttctaaacaagctctgagagttggcatgcaggaagcagcaccaaggagtctgatggcgtgggccacctggcagggactgaccaaggggaggcgaggagcagcagccacctgccaccccaatcccacattcttctaacagcaccagggacagaaaatatgtgcctacccaagaatttcagggccacaagtagaaacaagtatatcataacagggaaggttgcaacatgagaaatatgctttccctgagaaaagtgga

SEQ ID NO: 34637 - DNA, 918 bp, Homo sapiens
acaccaccatgcccagctgatttttgtattttttgtagaaacaggggtttcaccatgttgccaggctgatctcaaactccagggctcaagcagtcctcctgccttggtctcccaaagtcctgggattacaggtgtgagccaccgtgcttggcctacagaacttattagtctgatctaactgtacttttgtacccaataaccgacctctcttctccccacccacaacctctagtaaccaccactctactccccacctccatgagatgaagggtttcttttagctctcacacattttgttctcctttggcctcttctgatgactgctggcaggtgcacccctctccagctatgcaggactccctcgggatcgtcaccagttcacatgaggatctagagccttctctttgccttcctcactttggttatttgtggttttagcattttgatggcattttttgggcttccctgccatcccttctgtcaggttttaaagctcttcctggcaggtgcctgcagccagccccctgaaggattagtgacagctgccggcagccggcctgctacggggaggcactgtgtaatctgcctttgttggcctaggcctgttgtcagccagccctggggtgactgcactgagatttcataagagggaaacataactttgtcctctctctctctctccccccccgccactccccagtcactctctccctctctccctctctctctctagtattaggattcagtgggttatttccccacctcttcccttgcaaatttttttcatataaatggattcagtatctgagcatttttcctctccaaattccctaatctgcaatacacatacctttctccagacataacaatgtgtgtaattatgttatccaaaaaaagagaaagggccacgtgcagtgg

SEQ ID NO: 34638 - DNA, 678 bp, Homo sapiens
gaacagatcacctctaggtgctcagcaactccaagatcctatgacaatttttacatgataaacgggacagaaatacaattacttccccattctggaatggaagcaccacaaaggcaggcatttttgtgtttttattttactttattttaattttttgctattgtaactccagtgcctagagcagggatagaactcttggcccaaacccagcccacagcctgctttcgcaagtgacattttattggaacacaaccatgctcattcattgacatatcatctatggctgctttcacaatcttgtactacaacagcagagttgaatcacagtgactgaccgtatgacccaggagacctaaaatgtttgctctcttgtcctttatagaaaaagtttgacaatccttgatctaggatattgcctgagtcacaatagatgctcaacaaacatttgatgaatgaatgaacccttttctctgttggcagagaggtacagacaccttggtctgggagaaaacagagatatagaggataaagctattaaattcaggggtggccagacctggccttgagtcctggcttcatcatttacaagtggggtgaccttaggcaaattatttagctccctgtgtgtcatatgcctcatttgtaaagcagcaataatactagccatttataattagt

SEQ ID NO: 34639 - DNA, 1197 bp, Homo sapiens
cactgtagggcatgtgtggccctctgctcttgtgctttcctttgtgtagagctcctgcccaggccctgagtgagctcccgctccctggtatctggctcttttccatgacccacactcttcaatgactacatttctcacactggaggactagatttcccaatgttcgggctgcaagaatctaccttgcgcaggaagctttgtcccctacatgtcacagttcagctccagtaggaggtaccaacagaagcaaggtgtatggaggcagtggtgtactttggtgcagcccacagcttcattacacagttgcctagggaacttccaggccaccatccagctgcctccagctgcctcctgctgctgtttctgttggacaactccctccattgctgcctagagcatttaaatggcaagatgactcaagataccctgccccaggggttcctggcttctcttccttcctctcccagcacctcccagcccttttccctgcagtcatcacacacaggcaccattcaagtgtgcaactatttttactaaagtgtgaaggattctcagggcacaaactatacttagcagaggttaaagttcacattatgcaataaggcataagtttaaatcattaaacagcctgtcctatgctctttctgtcctcactcctctacaaatggactttttcagtcctaacgcttctctttttaattcagcctatgtataactcaaggcctttgttctctgcaaggaagagagaccatttctttttaggcttcaaatcactccctcagtctcagatagagattttcttatgaccatcagaacctctgatttagaaggaagctatgaagaaatgttaaaaggaatcttcccaatgttgaaaaatctagcctagaaattttaaaaaatgtatccaccaaggggcttgaactgacgctagttgacaactgcagttggcttttcaggcccaggtagtgagaaggaattatgtttgagggtgttaatttcagcataagaatgaagaggagggctcaaactagctcatctgctagaggaaagaccggggtccacactgcgtgtgtgccaggatgtttcaccacatggtccctctggtactgaaagccctgttactaacagtcgtagctgcctgctctggacaggaagtgcctcagtgatgagagtccccttgctcaaggtcacagcccc

SEQ ID NO: 34640 - DNA, 2138 bp, Homo sapiens
tgacaggtggaggcgtggagaggcacctggcaagtcctcaaacgcctcccccttgatttagctcctctagctaaggatacgcattcctttgggtttcaggtttttcttccctaaaaagagaatccccaaactggacaagcaggttacattcacacaatagcgtgaatgaattcgctggtcgcccttcagattctcattttggaatctcgaagaaagagaggtggtgggaggagggcgcttgaaacttctggcgatgccagttcagatcgattccagctatgacggagcgggaagtggataaagaggaccccaagtcacaggaggcactctgagagcaccaagcgcccggggaggccatccgcaggtgggcgcggggcctggattccacagaggggcggagtccctcagtcaggcgctggctgcaatcacacccgagcgccagccccctccagcatccctgagtcccagaggagatcgccgaagcgctggaaaagccgttccgcccacgacttctggtgccgggtcggcggcgactgggggagcccagttccgagaccgtaccgcacccactgcggacctcctgggccctacatagtaggcgggtcatgcagggcagcgggaggaggggcgtgggagggccaaggccgccgagtccccgctgttcagccagcaggagcgccccgcagccctcccgggacacggtggacacgcttgtcccagacctgggcgccctcctgccgggagccaggactggccgcagcaggcgctgtccgggcccgtgggcggggtttcgggagggggcggagccaggcccacggccggtgtcaggttgctccggtaacggtgacgtttcgcggcgtgggcggggccagcacgcaggttgcatattttaggaagtgaggaggaggcgcgggctggagctgcggcggggtctggggcgcagagcagcggcgggaggaggcggacacgtggcaacagcggtagcagcccgggcggcggcagcaacagcggcggcggcatcggcccgagccgccggccgccctcccaccctcccgccccgcggcagccctagctccctccacttggctcccctggtcccgctcgctcggccgggagctgctctgtgcttttctctctgattctccagcgacaggacccggcgccgggcactgagcaccgccaccatggggaagggggtgagtgtccggcgcgcccggggagggggctcggggagccctcgaggggaagaggaggaagtcgggagggcgaccgcggccagcgggaggcggcggaggaggaagcggcgccgcgtggagtgggctggcagagccgcgcggcttaaaagacgacgcagtttggaaatggagggagcgcagtaacggggggcgggggaagggagcgccgaggggctggagcgcggcattgcttaggggggtgggcggaccctgggcgggggctgcgcgccccggaggccgagcgggccgggggctccgagaggcggtgcttgggaagcctcggggccgggaggagggggcttgcagcagcgggggcggccccgggactgagccggcatccctgagcctggctcccctccctgcgaccgccgtcacctccttctccttccttttccctccgccctccgtgccctgaggaaaggcgcgctcctccccttcccctggggcgctccgccggggcctcctcccgggcctccgttcccgccgcggccccggttccggcgggggcagcctccgggttcggggctccttctcctggggacgctggggcttagcttgctccgcgcagaggcggccgccctcccccaaagaaaaaactggctgcttctaagtgcgaagccggctgggcgggctggtgccagaaagggtgtgtcttcactgccctaagatggcctttaaggtatacttttgagggctttcttgggccactttccgtaaacacaggatgcaccgatggcaactggagttgtcatccgatggtggggagaggcgtgcagattttttttgaagggacgagccctgaaggaggataggcagacccaccagggcctcagggtacaagaaacccgaaaaaggactggaggctgcaggcaatacggtggtaggaatctctgccggtttcca

SEQ ID NO: 34641 - DNA, 5951 bp, Homo sapiens
tgaattaataggccatggagatggtttgggtaactaagttatgtccatttatctagatgtctcctttataaccacacacaggcacacatgcacagtagtgatgcggtggtaacccacctgaatagttagtagagcttaaacccagatgtcttacaacaaaatgtatagtggctagcaaacacaagattaaattacagctgcgaacactgggatgatgagctgcttggctgctgggtggtagttagcattttgagtattctgatacattaaacattagtttacttgtgtgtgtgtttgtgtgtgtgtttgtcctgtgacttattgtgagcgtccaaatgttcagaagaatatttcatgttgggatttttccacatggggattaaaatgtgggtggagagtgactaaagccctgctgataattggctaacaaggaagcctgtgccggcagctaatttttaaggtcattgtaaatttcttcccctcctctcctcagtaccctttgtggcctagcttttgatgatatttcaggtgattttatatgtccttaaaagtctagttcctaagcatttggtaagaaaatgaaagaacagctcttgctgaatcattcctggatgaaataggattttgtccctttttttctttctgggttttattgccagtgacttggcttaaaccgtcagctaggcctaccaccggcaactgtttcactcaccaaaggtacacgccataactgtttagaaatgtgggaaagtttgtcttctcaagtgtgtaaaagatgaggagggggggtctcaccaggtctttcactgcattccggatttagtttgaatattatttaccgaaaaaataaatcatagcttatgagtagtgatttaaggaagggcagggaaaaaaggttccagtgaaggtggcaggggggatgcacatgtcagcagaaatcctggttgtatggtaatgttatcagctgcccttttggagctcagcttgaaagtgtgactaaagctcctctggctgctataaagctagtactttagacttaaagcattgtaaggcagatgcctcagagtggaaagttgcccgggcctggccgggagctagtggagcaagttacaggaagaactagtgcctagagctggggggtggagagagcacttgtgcctcaccctttgcctgtcagttgttcagcgtgtaacagttccctgcttcttaggttctttctgtacccttttataagggtgtatccccttttggtaacttactgtttgttaatttgtagtgttccctgccagtaagcttgtaacactctagtgactcaccttcgggtgggagggtaggaaagggagaggcctgcctcctaaacctgggaagatggggagagagtggtaaacctgagagcccaaaaaacaaaccaaaacaaaaaaacaaaaaaaaagatgcctttaaaaattcagttagatgtttgcccagatgagggctaacacttaaaatatacagattcctgggaatgttattcctaaattgcattcaaaaataaaagtgaactcaacatcttatagcacaataggcttggcactcatccatgctccatgccagtaccctcagtcattgttttcggattattttagcaacaaatgaacagataagtgactttccattcaaatcaggctatgttcttttaaatatatctaaacttaagaataagaaaggctttaactaaaatagctttgaaggattttgtatggtaaagtaaaattggtttcttcacttaaaaacaaacaggtttaaaagtaaaataaaataaaagccctgaagcttcagtttctcatctggcttttggatagaatgctcatcctggggatcaagtgaagtaatctatgttctgtttatggaaggagtgctgtgccagcctgagttgtggctattgttattgggcttacataggtacagtaattagagccaagagaagatcaaatctttacagactgggtttgttgttcgtcagtaagtcattagcccttgcaaaattagagagcagtttttctttcaccatgagaacatattaaggtttgaaaataatgggaaatactgttaattgcccttcataggaaagtcaagtagaggtgtcaattgacattattgcaactgttatcttcgctcaacaagcaaatctcctgtttaatagcatctttctgtctactttcacttctcaggtgaaggactttgttcgcggttgatgatcatttttacgtttttgaagtcttgcaaaataaaatgggcttttcggccttctgtgatgagagggagcctgaacatttgtgctgtgctgacttcttctagctgccgagggctctctgccagccaacaggctagaagaagaaacccgagtgtcagatcagatgggctcacagtaatcagagtggctgggtttggacggcaaagcaccaggcaaaatgtttcccatccctgccagagctgtccaattctagattacactgaaagtacatgtccagtacatgataatgtgcagtagagagaactgtaaaacctactcactcattttaaaactctccatttatatattttgggggagggatgtggaacctagtcaggtctgaactttctcacgttgctatgaattgagtgtatgagaggaagtgtgtattctttggctggagtcatagagagactgttcttagcatatgactcacctcattagttgtgctgaaatctgttgtcaggaatccacaagaagttcttcatatttattttgtgtttcggatagcagattctgttacgaaagaagtacccttcaccctacactttctctttggtttggtttttatttgcatcctgagcaaagggatttttgatcaatagacctcattcctttgttcctttgtgactttacagtgaatctctttatctggttttagacctcacttactagttcctttgtgagttatgatgaaatatatctgcacgtgatctctttccagttttattcaaaccctatttagtaatgactattggctgtctcagtgatttgataagttgattcatgatagttcgtgctttgtccttgggacttgtattgtttgggagcctgataatcagtgtaagattttgtgactcagtgggccttgctgtgtagatcggtgagctgtgattgctctttctagtctgttaccatgtaggggcaggtccctaatgcactttggggttatcctcttgtgtgtttcttttatcttccacatgatgcttccatggcaccatatttgttttattatttcaattcatgtgacatttctttagggccttggacagcctttatcctcttcagcctggcagtcattttccttcctagcctaggcttcagggtactaattgaggagtgatcaggacttactgggagttgatctggtcctctcataacgcatatgctgattattaatcagttgtctctaaccagagcaatctggtaaaatgaaaaaaaggagggtaaggtggtcagcagaaagggggagttaaggaataagtagaaagttttaacccttcataacccatgcacctaatgtagaggtagaattttccattgaagaaactgaagtttttgtctgattgttcttaataactgtaaaagcaaaaatatatctaaagtgcactgattctttacaccttttagaatttttattttttgaatgatcatggatgtacactactgcaggtagggtaggctgtcaggctcattaagaattgacatgcaggcagattggggaggaaggttaagtcatgttcttttgggttgagggaacctgctggctagaactgtcgctgttctttgacccttgctggctgctgggctgcccaagtttggatatactaaactgggctcacaaagggatctactgctttggccttggtaaattatattctccaggatgcatatttgggtgggcaagagaaggaatatgaaggcatggtggcccctcaggctcacctcctctgcagagaactgctgctcctgcagtgatgtgctgctgctggggctggatagcagccatggtactatgacagtgtcctccctcaaccccggccatcccttagccctccagtccctggctagacaattccttgcacataaactaaactacttagtcatttaggagcaaatggagatgtaataaactgggctagatcatttcttgactgttattttctttaagttttcactgttaagatcaaatgaaaaataatgccaaaggagttttttcttcaaaggtttgaaaagaattttcatagaaagcgaaaaatggcagtaatgtatatgttaattaagaccaagttataataatagcctttgtgtagtgctttgagaatacttttacatacacaattgtgttggatgatttaataatgtatcgaccaggaaaatgagaaagcacccctcccccttaccttttacattgaaggtagcccagacttggcagcctctagggaaccagcaaggtcagagtccatcacacaactttcctgctaaagtggtatttgccaaatcatgtccagaggtgttgtttctacaatcttcttggcaactccgaaatgggctgcatttggggcacttccttttgccatccttctggcccttcttgcccgtcaaaagcttttgtctgtgggctttggaaatagtccagtttttaaggtgttttatttttcagagttaatggtttcttgactaatcagactatgaaaatgccttctctaggttctttaatagttataccaagtgttattcccattttaggaatgaagaaactaaggctgacaggcaaaggtcatgtagccagcatgtggcaacactagaataaattggcagactcaacaccattagcagacctgtctggagggaatggtgggtcttgaactttcaagtaccctctaaactttttcagcaggaatttcagaagtctcaagaattctgagctccctgctggccatgggacattgtgctgatatggtgggaaaaatgcaggttgagaaagccttcgcatcctgccctgttggaggctggtgtttgggatgggtatgaaggcctttggcggtggctatagcttatgcagacctgaagcaatatacctctgggatggaagatcctgcttattttgggataatttctaaatctgtcatatctatccccaaccctgtccccattaaatggctaattgccaaaaaagaggaagcaacatcttcagctctagcaagtctcggggatgtctcactcattgtgaggactgtgaggattcggtatatatttttaagtgagtgaaccttgttacatgttttaaccttggttcctcctgtcaagaattttatcttctcatgtcttgggcaccttttccctctacccagatcaaatagcaaaatgcttagttaatctttgagaggatagaatccatgggaagcacaggatgaaatgatgacgctgtgctaagctgtgtcaccgtgggtaagcccctgcccttgctgtgactttccacttcctaaattagaatggaagggggaaaaaaaaaaaccataacccaacttcatttttatgagtggccctttagaaaatagtgtaatccgttgagtttccattgtacctttcctcagagatgctcaaaggggcgggggtgcccttacatggaacatgatgagagtgaggattaatcactcccagtcctctgggaggggggaagtgacctgaactttctaattgaaaaagtaggaagtgtgtgcccaatgcccagatgagtgggaagattactgtagttgattgaggaaatgccgtatttatcattcacccttcccatgacctttgtttttccctaatgccttaaaaaataataaggaaacattgtcctacctgattctaccactgttcatctcacgcagtgtgcactccctgactctga

SEQ ID NO: 34642 - DNA, 674 bp, Homo sapiens
cagcttgatttgaggggtacagtagcccatgataaggctggtgtattcacatgacatttttcttcttttcctcacatataggtggataactcctcgctcactggtgaatcagaaccccagactaggtctccagatttcacaaatgaaaaccccctggagacgaggaacattgccttcttttcaaccaattgtgttgaaggtaggccatttttgggcactttgagcatggcgtggtatttctcttgggcattaacaaaatcaaaaccataggcacaatctcttgttttattggctccatttctgagaacttgtgtcaagcacagagcagaggtgttttcctagctggcaggaaaccttgtggcagtttcccttccctccacctccaccctgcctcttctgtcaacaacaccagtctggcatgggtgttggagctgctgtcctgctactggagagaagtccctttgccaaacagcatgtacagccaaagagctggcccttaaaaagtgcttttatcaactctttttgtttttttagtcatcctatgtaattgtgtaaaatccgtggcttccttcaggttagatacaattaggtacagttctccctccccttctttttaaggcaccgcacgtggtattgttgtctacactggggatcgcactgtgatgggaagaatt

SEQ ID NO: 34643 - DNA, 1636 bp, Homo sapiens
ttgcagggcccgcattgccagtagggctggcttttagggatgctgctgttggtgtgtgctgtacttgttttctaggattgggacaagcttccttgagctcctgactttagagaccaggtttgggaactgatgggtgcagcaaatgcaaacagacagcaaacaggccaaagaggagattcattcactgaagagggccctggtacagtactgtcgaggttttgcggtggcctggacacggctggctccttcgacttacacaatatatcttctctctctcttacctgcacttataagaatcggtgctaagggtatgtgcctaccacagtgcagcttgtagattaatgaagaaagaattgctgccacttcccaaatattaaacgccaggttctgcctatgcatattctctcaaccttcacaacacacctactaactccagcttacaaatgaggagacgaaccagcaggctgttccaggcgtctggttgtaagagcagtggcagtagagaaaatgatttattttagcaccagccactgtgctaatccctttagatatcatctcatttaatccttttaacaaccctgaagcaccatccttattctaaagggacttcggacctctctgcggtccacactgtcccctgctcggtgcaggagtgtagactgggactgttccgtctggtggtctccccgacaagggttcacctggaaactggcctttgggctgggattgggactctgtacttaggctggcagcccatattaggactgggcaccgtgataagcactttcttaccgcaaatgcacgatttcactcggccctcacacaccccacgaggtgggcaccgtcacagtgccatctcacaggcaaggaggccaggcccaggccctgaggatgcgccgctcaggtgggagcttccggggagctcgcgcgacagcctgggggagcgcggattcgtctctgcgctacggcggctgcagagggtcaacccgcggaggcggcgcttcgcggcgggtcctcggcctgaggctgtgggatgcctccaaacccggcgcggcctccgtctgcaaggagagcagagggtccccgccgggagcgcgcccggctgcggccccaggcggccctgcccgcagccgccacctgagcttgggcgcggctcctatctcccacccgcgcgtcggccagtgaagggctccgtgcttaaacatcattcgttacagaagtattgcggccatcacacggcattttaaaaacacgaatgatgataaataactttaacactgcttccaattctgcctccaagcacagcatcattaccatttgcatgcgtttcacttcattcgatttccatgtgtatggatttgtttctacatagctgtggtaaaacgcacatactaaactgaatccagggttgttttccactttgtaacatgaacattttcaccgtgttagtactgacgcttcctacctataatttttaatggcaggactttaaaaaattgggttgatacgctgtcacttctctgagcatctcgcaaatgttcaacattcaagtggcttccaaagcttcacgattataaattattcattcttttttgttttgtttggttgtttgtttgtttgtttgtttgttttttga

SEQ ID NO: 34644 - DNA, 1419 bp, Homo sapiens
cctgtcccaatcccagtctactattttctgctccaccaccatagctgcccagggtgaagacaccatcagttcttaaggtcacttctaatttggggaaataaaaggtcttgaaggttacacagagatttgtgcactgctgatcttaattttatgcttgccgtcataaaaccagtttatgcttatacaactaaagggggaagacatgcatccaattctctcagtttcagttctttgtctttgcatcagttatttagatttttcccttctctgctcattatcacttttcctgaggaggtaacaaaatgtctttttcaattttcttctgggactaattctcactgggatcacccatttttttctccagtttgcaactggctagatttgattggaatagataaggcctccgaccataggctgttgaaaggccctttgtttgtggattacaagcggtcattcagtttatcccattcattatgcgaccctacttttttgagttgcaaggttaaggcctggggcaaaatgttgatggaaaggaacattaagcaccaagtagtaccgtgtttgtgttcattccaatccacattcacctcccttaactggtgaaggttatgactacagcccactctctagtgactcatttcaggaaaaggacatgtgacaagaacctgtctcacatgggactgcttgccaggggtgccaggacagagatggcattgttcaggaaagattcaggaagtcaaacatccggagaaaagcatgcatggttaactcaccccacaggctggatgagaacatattttttttctcactgatcaatctgtttatctacttctacaagggcactcagaggacttctggaataattattccttttggtcttaaatgcagctttcctgatgggccaggaaagggagaagggataagtattcctggaagtgttttacctgttgtcacattaattctatcctcccaatagctttttgagatcaacattatccccactctcaatgtataaatggggcaatttagataaggcaagttaaggaatttgcccaggcctatctgctactaagtggcagacacaggattcaaacttggatcgaggttgacattgaagtgtatttccaatgtcagaaaatgtcctctttccatgctagtgcccaggtttcctctcagacaagtagcagctgctaaatgctactgcagagcattgtctctcccaaacacatctctgttctgacctctttccatctagctgtcctcaaaacccacacaaattccaccttctccatgaagacttcctgatcagcccgtcccaagagactatgtacagtctcacacgcgctctctctcttctacctctgtaatcctctctgcttgcactcctggtttagcccttaatagatataacttagtgca

SEQ ID NO: 34645 - DNA, 3722 bp, Homo sapiens
cctttgtctaacgggcaatatccttacatccgggacctgggggtgccgagcccgtgaacttcccttgcggcctgtggttggagacaaatagctgtgctggctccgttggcagagttggtgttggttttggtgccccaacctcctttttctggaatctgccccatattcagtccccagatggaagtaagctgatactcaggtaagaagggggcgaaagtcagggtgcctctagtgtggagtcgacgctagggctggacgccatggttccacatcccagagcccatctgaaagaccttctttggcgtgccgctcagagctgctcagagagcgtggagctcggcccccagctcagcccagggctctgtgcactcatggaaaggggcatcgtgcctggaaacgcgagcggccattctggcgcagggacagggcctgggcgtctgtgtgtgctcgtgcccagttgagagacttggacggggcgcggagggcttgcttctttcccaacctaagggctgtttcagtgaggtcgtccttctgaggcctgagatggtgccgggggtggcctcaccaggaaaaggcgcaaggcaaacattgaacagacaggctggagctcccaggaggagctttggtccgtggcaactgggagaagggcctcttttggggacagctgataaaaaagctgccaccctatcctccagctcccccacctcagggccccactggaagacaggcttgactttcttcatcccgcgcagcacgggcttggtgaagctggaaggaaccctctcatgcagtctcccggcttctgcttccgactgaaccctccagcctaggcttcaggccaggcctctgtccccacacaatggggacttggatagtgatttttaggattctttctagctttctaccctgactagaaaagagaagaggaagtgccccgttggctctgccgtggaccagaagaccttcccctactgctcatatttagttagcaattacccaaggtgtccaaggcccctccaacactgtcactcactgctaggagaggccagaactccaactcaggctgtgcggctggctgcaagggggtgacgtctgggttagctgtttggagacggaaccacaggtcagctttagagctgatggcgccttcatgggcacaacgggaaaccaagacaggcagttaccaagtgatccttcagcatctgggcgagacgctttgtctttcccagagaaactatttcaatgagttcttcccgggagagagggaaaacaaagctcaaataccagagccgcagaaaccgcctgaggctgatttgctctgacaggccggcggctgccctctcccagggacagccttggtccaaaagaataaaggagaccttgcaggccagaacccaaaagtgcaaggtgcaggtttgcaaagtgtgtccctcaggctctgtgcatccccaatccagaagttgaacacccatccacatggtgccttcacagcacatgaagaaaaagaggggcaggttgcagaggagcaggacagggggacgtgttgccaagagcaggcaaaggtctgacctgatggcagctctgaattgggtctggcgggagttggaggtaactgcattatgggaaagactgaaaggttaatatgaaaccagctgatactgaaagagaacaattaggaaggttaaggggtttaatattagataaatggctgccagaggataaagttcacaacttccatgaaagaagtctgactcagagaattctttttagtggaccagaccaaggtctgattttgttatttttttttcttcccagtaactgagagaaaattaccattcattcacataagattcattctcttccctcctcctgctccttcctccggcttcccatctctctcctgtttggaaatgtctgatttccttccagttctggaatgaatcagggtcccaccttccagtctgcataccccacactcctctccacctgtaggggttctttctcagtgagatttgtggggccctacaagaatatttttgtcagtgttgcttgtattctggaaatatttcaggccactaagcgatctcacagatcagtagtcaacccaggcgagacattccgagccaataaggagttaacccaaacatggggagacgggctggttgatttgaggtggctgaggagattgggggagatggggaattctcatagtctccaaacccagcaattccttcctgggagttttttaaacattccttcctgggagaagggcctctgatggggacagctgataaaggagctgccaccccctcctccagctccccacccccgtgccccactggaagacaggcttgatttccacatcctgcctagcacgggcttggtgaagctggcagaagccctctcatcagtctctgttcttctgtctggactgaaccctccagcccaggcttcaggccaggcctttgtctgaacagattcccaggccccacccaccctcgactaactgaatttgaatctttgagggcacagtctgggcatctgcatattctgaagttcctcgatgaccccatgacctgcccagtttgggaaccactggctcaggggccacatggaaaaaaggccaggcagggaggggccggggcctctcagactttgggctgggccatttgtgtgattccctagttcccatcccagccagtgagtttcttggagcagacatttcctcttacttatcccctcttacaatccccacacagggctggccacgtttagtatgtgggagctgaattaagtttccaaatctcatggctcatgtctgtaatcccaatattttgggaggccaaggcgggaggatcacctgagcccagaaatttgagaccagcctgggcaacatgggaagaccctgtctctacaaaaatttaaacgttaaaaatattttttaattaaaattttgaaatgtctccccttcctagaccctgaacctgttcagttctcaagttgacatgttcagaggcctggctggtagagcccgggcctggtcccacagaatcagcatggtcctgaaacacaagagcacaggaggcaaagctggaagggcccttagagaacctctagtccaatagctttcaaattgtaatcctaggtaccctggggtcccatggtggaacctcagagagcaggaaaagggaagggcagaggctcagtgggaggaaatgccggccctccccccacctccacccttccttcaaccaggccagctctgctttcacagctttgtgtgactttcgcaataaccaaatggcttccaagcttctccccttgccaaccccacccccagcccctgtctattttccatctggtgtccagaatgatcatttcaaaacataaggctcatcatgtccctcttctgttcaagaccctacatttggctttccatttcactcaacagcaatccaaggtcctcttcatggccggcaagtcccacctgttctcaccccggctgcccctacctcatctcagccacgctggcctccttcgtatccctgaatgcaccaagcaggctcttatccgacacctgggcaggtcttcttccttctgctggaaacactcttccccaaatagctgcatcccttgcttcctcttgtcctgaccaccctatcaaaaaaggcatcctgttccatcagcccagccccttcctgtactgtactgactgtccctac

SEQ ID NO: 34646 - DNA, 1029 bp, Homo sapiens
cagcattattttcctcatgttgaggttgggagcaggctcagagcaggctcagggagcttccatcacttgatggaggccccacagcagggcccgtgtgggcagcccaggactctgcactcatggcgcctgccactgcagaagacgcccttcaccagccactgggtctcaacagtgtggctccggcaggcctctcagtgggtttgtgtcacccaaaggctgatgaagaacaggggggtggggtggcagtgagaaagcacttgggaattcagtgataacaaggtcacccattctctctctgtcagcaactgatagtgacagttgtaatagtgacaggcagacctggatggaaatcctggttccaccactgactagcaatgtaaccttaaccatgttactactacacttccatgagcttctgtttttccatctgtatagtgggactaatactacttacctactcctactgaagggtgagacgcagcaggcaatgcgcttagcacagggcctggaacatagtaaatgctcagtggtaatagtgcatagtcttccttaaacttgcagtgacatttatttcaccatgattagcagctgaggctgtggggtgacatcagggtgatgagtcactttgtctggctgggtcttacatccggggcgatgttctgttgcatccaccaccctcccctgccccagctcagggccctaacagtctagcagggctgggactttctgaaaggctcccctgaccacaccagttcctcaggaagcctctcaaccccagcttcagctctactgacatcgccttacttccctttaaccccttttgaggcccagtttagaatctgtatctcagccagagctctttccatgccagctttgtccacgctgtttactcctggatagttctcaggcccagccatataccaacccagtgcctgcagtcaggcagacctggatggaaatcctggttctaccactgactagcaatgtaaccttaaccatgttactactacacttctatgagcttctgtt

SEQ ID NO: 34647 - DNA, 1527 bp, Homo sapiens
ctaggtgactgtgggcatgtcgtctcaactcagtacatctgttctcttgtcttcaaaatggggtgatgctatctgattcaccaagatgttttgagactcaaataagataaacattttttaaagtatttgccacaatgacagggccatcagagttgctttcatacctacacaccctgtgtacacttgtagcaatgagatggagtgagggactccatttctatgacaagcagcaaggttcctggggaagagcctactctttggaggtaggcagaggagatctggatactgctttcaccagcagcccattgcacatccttgggcaactcacttaatctcactgaattttagttgtgtcacccaggaataatagtaggaaaattccatctagcttgagctattgtggtgaggattaaatagaggttatgggatcaaaggtgtctggaacacaggagaggtggaatagattttatccttgtaggtatgactcagtccacaaactaagatctgaaaaaaaataatgccctctagtttctatgactcaacttatttctgattctaagttcccatttctcttggttggtgaagaatttaaaccccacccttttctggggagcccgctgcccttgcactgtggactatgacttcacattatgaagtagggtggggatttgcccttgatcttcaatctacacagcttaaggccagatgtgctttgccctgtcttcctgtcctgtgtctctcttgctcccaggacatgttcaaagcacacaattatccccacagcttgagttcagaggcaggaaacaaatgagtgcaagaaaatagggaggagtagagcttgtgaactgcagagagatgcccatctaaaggcatatcattttttttttaagtttaatactgtgagagccaaaaaaaacatgcctgtgggctgactgggcacatgagcctcttcactggtctgcgaatgtgcagggcctgctctcacttcagggcctctactgggaatccccatcctgggatcccatctgtgaccccttgacagctctgctggagggtccctcagtgaggtctttccttgtcccttcctacactccccacccccttccctgttttattcttctctatggctcttagtgctgtggtttccttatttaccctggttaatgtctatctctatccactagaatgcaagccccaagtaggcagtcaagaactatgtgttgaatgaatgggtggatggatggatgacttcatcgtgaaatgagacactcaccttaggcagaaattgcaagggcaacatcaaaaacctcagtaatcaagatcaataatattttaatgcaattttttttagtcacagtgcaaaaaatctgtgataaacaaactatcaaatttttaaataaaggcacatccaaaagaagttgcaagtgagctaaagttaatttaaaaatatttaaaatcatcacttgttcaagaaaaaattctcaaacatgacaatgttctcaactgaaaacaaaacaagaagtagac

SEQ ID NO: 34648 - DNA, 746 bp, Homo sapiens
ctcaggggacttccaaggaacatgcatccccagaatagttcaaaaatgcctgttctcagtatttcatatacttatgcctgcctctgtaactaggctgggcatttctcaggggcagaaaaccaagctttctacctccttagaaatggtcctttgaagcatttctcaaattttaaggtgcctaagaatcaccaagggtgcttgttaaaaatacagattcctgagccccaccatcccaggtgcttctgatgtatgtggcctgtttgttctgttgcagattctaatgtattgatctagctctgccaatgtctagtctttcatccagcactttctgaactgaacagaggtgcatcatcagccccagagactgtgtatctttggagggcaaagactaggtatgactcacctttcaaccacagcacatgacataatgcaaggcacacagatggctcctcacaagcagtacaggacagatggggagacagatggatagaaggatagattcagagagacagtcttcaaataaaatgtaaattcttctacccgctatctccaaagaggtacagtatggtgtttagcatggactcagaagcccagctgcctgagtgcatatcccagcttcatgactaagagccatttgacattgggcaagttacttaaatcaccttgtgtctaggtttcctcctctctacaataaggacacaaatagtacttactctatcagactgtaatgagattaaatgagttaa

SEQ ID NO: 34649 - DNA, 1610 bp, Homo sapiens
gcccagcccaggcctcttacaacactgacttatctgatcgtgcgggtacttttgagtctatctcaacccctcccccttggctgtcttccatagatgcacacgcgcacctcccgggcaggcagcggacgctgagcaaacggacggacgggctggagggctggcagtggggtgcaggagccagccatgagaacccctcaagtacagttgaactcgctgggaggttactgctgtactcccggggttttgctatggcctgactggggccaatgtgtggagggtgaaggaggatggggaggcaaaatgggaagaaggggacctatttcctgaggttgttgtgacgacttggctgacaacacacggagaggatggaaccagttctgatactagtttttaggatttgaggggaggaaaaaggagcaggagtcgcaccacttaggaatcccaacgtgaggccgctgccgactgggcttcctagttgcctacccgctcctcgctgtggggcgattctgaaaagtcctctctgctgatacggcggacgccgcgcgggcggggacggcaccgcgcggggagggcagcaggcgtcgccctcgagcaggtggcatccgcgcccgctccccgtcccgggcgcgttcacggctgggaaaaattttgcagtccgctgaagcgctcagcgacgttactggggaagcccaggaaggaacttggtcactggagctcgggagggggccggcgggggggcgcaggccccgcaggagaggctagcgggccggagcccgtccttccctaaggccacacagttccttgctgactccatgagggacactggcgatgaaataacaactttctcttcctgaaaaggctcccacggctgagttgttcccggcccacagcgacccgtccccacccgtctctgatcggcaaccgcctcgagcccggcgcgtccacccagcctgggtgctgcccagtacccgccggccggcgcggggcccctggggcaggcttcactcaccaaagcagtgcagcaggcagaccacgctgaggacccccagggcccgccccgcgtcgctcccagcaaccatggctcgtcgggccggcctctgcgcgagtgcccagccacaagcagccctaagttcaagcaccgcctacgcggtcggccagaagtagggctccgccccgccctgggctggcagccggcggcccgccccggcccttcctcccccaccctccgcggcgccgcgtttgtcttcgcgcttccactccccgggcgcgcctctggcctcggctctgcgcgcctccttcctgtgtccccggggcgccgtccagtcccccagctcggtccctcccgtcattccgccgccattccatacgctatttttaagtaagaaattctttccttgaaaatggcttggttttaaaaaccaaggttttaaagtaagaaattctttccttgaaaatggcttggttttaaaaaccaggtttctctgccttcctaccgcacctcccgcgcttccccttagcgtttggggcgtgctgtaggcccctccgtggctagacggggctgtggctcccagagagccaccggaggaggcagcaggacgggcgggagcacc

SEQ ID NO: 34650 - DNA, 438 bp, Homo sapiens
cccaagtctgaagggttttcctctgggtattaggagttgaggtgttcggttagagaagaaacaggatgcacgggagatcacacacagagtaagaggtgcctctcaaatgcctttcccacgtgtctaactctgctttgtttaaagcacagtcagacccgccatctgcacttttacctgctgcctgacgaaaaccagatgccaaagccaaaggcctcccagcactcacaaggccctttgcccttaggaaaacaccatgattcagccaggcaagattgatgcaacactgtaacaaagcgtgtgcaaagtgcctagctccggactgcttgcagaaaaggcacattttgactcttctgagagtgggaaagatttgaaagatgggatttgcaccttattcctattcaggtctggagatctggaacttcttcctgaagctccatg

SEQ ID NO: 34651 - DNA, 1199 bp, Homo sapiens
tggcgttcggcagccctgaagcggtaccccagcgcgagcagatttctaaaacaaacacaacagagatttttatcaaaggcaaagctgcaaaacccactggggctgagcgctgagctggtccggacacctgggtccggttcctggaccaggacagtcaacctctgcattctgaccttgggcaagtctctgtctttccctccgcctcagtttccctgcccagagcagggcaacagtgggaagcccgattgttcctgaaatacttccaccaaatgcttcactcctgggaattcccgtcacctcctaccgagcccgggcgccgcaggtagccccaccctccgccagggcaaatcgggaaggggctccgcggtggggccgcgactcccggcccccgccccaaccgtgggagctctgcgcgcgacgcgtcccaggtggccccgctattgttttaccttgcagggtgtttatatctcgctgattggaaagaaaagaaaccggggaagaagggagtccggagctccgctttcagctgccggagcgcgctcgcagcgcgcccgcccagccaggggaggggtctcgggcccgacccggagctcagccggcgcgggcccgctccccactccccgctccccgctccccgctccacgcctccccgcctccctccccggggccccctccgggcgccgcccgcgcccccgccgagcctgacctcgcccctggccctctccctccgcgcgcgtcggaccgtccttcagtccatccaggcgcacgcctcaggggacgcgccgcttcctcttctcccgcaacggcaccagcagccgcgctgcggcccctcccgagtccccgcccctccagctccagcccggcccgccgcactcggcgaggcgagcgcggggccagggcggcggcctcgaagagaggcccggccccgcccccggccccgcccctggagacgcgagtcccggccccgggcctggcgggggcatgagggtggcccggggcaccggaggacctgggcagggctggcgtgtgggccgagcagcccggcaagttaatcagggcttcacacccagactccggggccgccggcgagatgtacaggcccttcccaaagcccagctggccacccataacctgggaagccggcggcacagaagctcgtccttcctcctggaaacaaaaacaaagccctttggagactt

SEQ ID NO: 34652 - DNA, 1057 bp, Homo sapiens
cctaaaagtgttgtgtgcctaagacatgcccgttctaaactttaggcagcgtgcagtagggtggggtccaaaaagtcttccttatcaccataatcccctccccattctgcctgtggagaagtctggccctgcttggggaacaaggatcatattagaggaataaatgcttgaggaatgaattcacaagatggccaaataccacagaggtgtgcacatctggagatgagcacagtcaggactagacactccagggggtgaagggccacttgccaatggctggcaggtcctgctggccacatccagccccagggacaggaagcagcagggacctgccctgtctggaaactctgccagatggcctagcatcccaggcttgttctgctctgcattttatcagccagggccagaaccagcctttcataattcagagccccttgggaccctgtcccaaatactgcctctaatgtggacttgattcactaaggcttaactttaatctgtccttttttgtccaagcctcaggtgtgtgtgtgtgtgtgtgtgtgtgtgtgtgtgtgtgtgtgtatgtgatgttcacatgatagggaagaaataaccggcatttcttctccttctttctgctcaaaggatgtcttatctaggatatgcagggctggagggcagggacaacagtcatttaaatgcgggggcctttgagatcactggtgggaagacagtgaagagagaaaagaagactgggagggagaaggaaagggggagagggaggagacacagtaggaacacacagcaggggaccagttaatgtttttgaaagaatgatgcaatcctgacaaatatgtgtactctgatatgttatcctaggctccccagtttggcctaggtagaagtcgaaaaacaaatgcaggctgggcacggtggctcatacctgtaatcccaggactttgggaggctgaggcagatggatcacttgagatcaggagttcaagaccagcctggccaacatggtagaaccccgtctctacaaaaaatacaaaaattactagctgatcgttgtaat

SEQ ID NO: 34653 - DNA, 985 bp, Homo sapiens
gagagacagagagagacaccataccaagtatcaagaattagaaagaattagaatagcactggatttctcaacaactatactggaagctagaagacaacaaagcgatgctttcaaattctggggaattttcagcttagtattctaggcaaactatcaactatgcatgtggcttatagagaaaacatgtgttatacaagcttttctgaggcatgagtcatagtgctggtggccatgagttcaatgttaatgcatcaacaatatatctcaaataagatgtctttaaacagaaacacacataaaattaggttttgtattgatcagttgactcactgtttactcactcagtgttaaggctcacaggaatctaaccctgtatttcccctgggagcaatgtttcagtttgctaagtcagtgtttgcaataactttacagagcataactaccatgaatagtgagaatcggctgtatagacttttccttttctttctttttgcactgtcttcagattacctcttctcatatccccttttccaccactggaccaactacactgttgctgatgattgctgtggtgatgaggcaggacgggagtgaacaagtagagagtttaccagctctcccctgtcctttccttctctgccccagtttgcagacacccatcccccaacatgtgcttgctcacattctggttcaaaagagccttcagtcttctcagagggttctcaattatatgttagtttatcatgtccatgattatttctcttttgtagcttttctctgctatagttctgtagtttacagttgtggaggaaggtaccagcagtacaagctggttcattggcttgtcaaaaacttgatcagggaggatgttagcaatatgatgcaagaacaaccaagaagaaatatcaggtatgaaaaatataactgttgaaacaaaatgcataatagctgaagtatgaatcaggatagatacagctaaggactg

SEQ ID NO: 34654 - DNA, 1087 bp, Homo sapiens
acttacttaacactagatgttgaaattcaaagagagatttcacacataaataaatcagtgctaagaaaaaattttgaaatagtctatcatagtttctagtatgtcacaggcacttactaaatggtaactattatcattatctgggaactattgaaaaccaatttcattaatcacagccaaaaataaaattgatttggaatgtgatttacccagataaatcatcagctcaagggactgcttggagagaaggagagctgacctatgcctgttgactcaccatgtaaacacagtcatggtaatttactagcagcaagacctgtttcctgctgagcagttccagtctgagctccagagctagacgcagaggaaggggtcaaacatgtccacatggaacctgttttttctttttccccacccccaccaacttctgagtgatcagaggctcccttgttgcaatgtcatcaaaatgagacgtggaaattcctcacctgccataagctagacagagcttttgagatgcaaaccgtatacactctcagaggagaggattgaaaccaaagagagaagtcactttcaaagcaccatccccctaccttcccccttccatacacatgctaagcacacagagcttttgcaatctgctacgaaaacagaattttaaaataaaccccagtctactctctcaaatcagaatttagaagaaaatggatttctgtaaggtgaatttgctctcccaaagtagttccattcacacacatgtacatacacacacacacacacacacacacataaaatgcagcactcattaataggccaaatatggaacaagcaattttatcctcagcaaaagagagacattcaataattatgaggacaggcttgaggctgcgtaaaaataaaacttacagaagccagcagatggcacttaatcataatttttcctatgatttctattaattgtcaaatatttttcattctgccttcccaataaaacaaatgatatgctaatgtggcacagtaagtaacattttccctttgagatattgaataggcttgttacataaaattcccccacctacataactag

SEQ ID NO: 34655 - DNA, 1573 bp, Homo sapiens
ccgaacgagcggggagttggctgaggatagactagacacgcgtgggtgactccagcgtgatggaacgcggggtgtcccgggatagggctaaagcgatgggatttccagacgagtctttcccaggccaacttttaaaggtcggaggaaagtttctcgtggggtgggggcccagaggggatggcagggtgggctccgacgcctcctcgcctttaagcgggtggccccggctcttcctccgttacctggagcggggaggggcttgggaaagtttgtgtttgttgctggcaaagcgccggatgggaggcgcgggcgggcgctgcggttcttcccttctgctttcgggaagcggtcggggctgcacactcggatcggcggggccggctcccgggcccggccggctggaggagggagggaaggaggcgggagggagcgagcggagccaggggcgcacgtacgccccagcgctgggatttatcggctcgcgaggagagcggagcaggcgcgcggcccaggcggaggagcgccgactctggagcagccggagctggaagaggaggaggaggagaggcggcggggaaggaggaggagggggagagtcgctcccgccgggcgagcatggggcgcctggcctcgaggccgctgctgctggcgctcctgtcgttgggtgagtgtgcgcggggctcagcggggcacacggggactggcgaggccctggagggctcggcggggcgcggctgcagcgcgcggcctggggcgccgagggtgcccgggctgctcccgggaaacccggccggggtgcgcgggttgttcggcccggcggggagcggccgcggggccgcccggagcctggcgcgaatccgctcgggccccgcgcgcggggtgcaagtggccgctccgccaggccgagcctcgcccccaacatgtgccggggggagtggcccggggccgtctttcccccaggtctccctacctgttggccgccgggagcccggctcaccttgaactcccggcccggaaggtgctgcggtcccggcccgggtcctcggctcgagagcggaaatgtgagcctttgatatgccccgccatagccgccgccggccgggtcgctcttcacccaacccgcgcggagttgcctttccagggaagcgagagaatcctccaacttccttccacgaaggtcacagggtggcccggagcgttacaatggaaatcggcgggcgagtcctgccgtcattttcgtcgtggctagatcttctgcctcagtcttttcttttagcttttcttgaagctgcctagctgcgtatttatacacaaagacctaaaagcctggcttctccaactttttctacctgttactttccctcccttactatcccctcgtcttccaccctccggaaaccctgggtgccccgtgaggttttggcccagcgccctccccccacccaaggaatcttttgtgggttttttccctctccattttccattcactccatacacagacaccatcttcacgtagatccacatggtgatcctagccagccacggaaatatgtttattaagtgcccaccatgg

SEQ ID NO: 34656 - DNA, 1343 bp, Homo sapiens
cctcccaaagtgctgggattacaggtgtgagctaccatgtctagccgaagagttgaaattctgacatctccaaccaatagactcagctggctaaaaaatgtgcccctagtatttggggaatttcttccttttcattgctttggtctgaacaaggaaggttcaaaatgatgctggataaataccacctactaaaaggatacattctagaaagtctatgtgttatagaagaaacttatgtgtatgagctcagtccttactgcatcttggctgctgtctggccctccctggctactttgaggtgctactgttgatgctgctgctaagcctagtgatttcatctcagtggttttggatgcagatatttttgaggcttatccctttaggatgtactgagaagcgaatattagctgatttggtgtctgtccagtgtacactactttgcttatgttgcagcgaggagttaaaaaacacacacatttttggtacaactattcgttttcccattttctgaaagctggcgcattgaaacgttttcttatttattagaagacattacagtccatcatctttgattgagaaatccttacagtaagttccaagttaagaccatagtgtgtaactcacggcatgacacagcacagggtactgagtcacattagtcaaagtaaaaacagttatgacccttgaaggaataaattatttgtgtccaactttacttttcaatacaggacattgctactttgctttgtaatctttttttttttttagtacttccgcagcattaagggaatattgactctgtttctgacattgtgcaagattacaaagtccaaaatggaatggaaccagttataagtgaatggcagaatggatcataggtgttttttaaaggcttgggtgaatgagttattagatcactgtacatatgggactgtcacaattatagagatgaaactgaggccaggggctgttattattgaaaagttccatggagcaggtggggctggagagtcgggagccaggagcaggaggaaatgcatttcaggtatgaaagtgggcagtacggtttctcagaggtgggagtagataaatgtgtacaggttggtgtcccatttggggattagctaacttcagctggaaaagtaatagagaccttaggggacgtggatattaaactctggggaagggaggttggtggagaagaatgtgagcaaagtcaccctgaaagatgttggcagcatcaccagcgcccacagagcagctaagagccggcatgtgtgaggctggagaggtccgctggagcttacaggaagccagcctgctaaattaaggtgataagtcag

SEQ ID NO: 34657 - DNA, 999 bp, Homo sapiens
tgtaaatcatgagtagctagctagaaggtttgttagaaagagctctgaaccaaaagtgagaaggcagccttagaatcccgccattttctagccatgatattgatatactctgagtctgttttctcatttgtagaatgggattagtaatacctaccacatagtgatatgaggtattctataagactgtatatgtaaagtgccttgcacagagcctgatatgtaaaaggtccctatttaaatatttcttgggcctgagtgcttatgatcagaggacataatacctgcaatttctatggttctgtggaactaatattggcgcatatcaacctgaaaaaaagaactttttattaatcttccaggaactagaacagaatttttcctttagtaccttcctggtttctttgtccagtactctctccccccatctgaatcaggaactacatttttacattcctttcaaatgatacaattgcaatgcaacaattcccaaggtaaaagaataactgtctgtcttgctggctctattttttcttttcttcttcctttttttttttttttcttgacaacagagagcttctttttccccccagaaaagaggcaacatcaccctgtcaatgttaaattctggcagaaatgaagccactgaaatggaaagagaaaaaatattttggcaacagccaggaatgagaaattgcatagcatttactgggttatatatattctgtggatacaggatactctctattattggcaatgattgtctctgtggtcaatgcttatttctaaaataattctcttttcagtgcacatggcagattgattgcattgatggcctcagtttgtttgtgttaatctctccctttgctctatcactttgtagttcccctccataaagaggcagagtatatattaacccatctcttgcctttggactttcatgtggcttgctttggcccatgggatggtagtggtcatgatgtaagtagaagctttaaaaaa

SEQ ID NO: 34658 - DNA, 986 bp, Homo sapiens
cggctaggacgggtgaaggccaagggcggagaattatgggagggattaagactgcaagagctgagtgatggttggttcctgaacaaagagggcggagtaaaaggcggaagcagaattgggggcggggctttgtggaacttgggggacccagcgaaatggaagaagttaggtgtccagagcacggtaaggggctagggtctcagcgtcccggggcctgttgatttagcgtggcgtaatcgttgttcactttcttctctcttcagggactttctgctttcttaagaccggcgtccgcgatggcccgaataaaggaaagagcttctacgtgtgccgggcagacacgtgcagcttcgtgcgggccaccgagtaggtctggagctgggccccactccctgtggctgcccggggcctcccgagaggagcttcccgctccccgctgtcgggcgtcacagggccgaggagtggtggggccctagtttgcggtgtcaggaccctttaagcaattggtgatcccagggcagcgtggcgtgttcggaagacgcccagctaattctggctgtgtgacccgaggctggttacccccctctctgggccgatggttcccctacctgtaaaattgaggatccggtgttttccagctctgggtttctattcacttgacaggccttaaccactcccttctcctgcccagacagtccctccccctttaaaggagtaaggacacacagcagacatagtggaaaataatttgtccctgttttgcactagttttaggcccgacggttttttttaaatgtttgagcttaaaacactctagtgattagttgttagccttcttatttttaagtaggattctctgcatctaaatggtgaaattgataattcaaagaaattagcgctggaagaaacaacggagggcctggcgcggtgtgtgacgcctgtaatcccagcactttgggaggcgaaggcgagcgaatcgcttgagc

SEQ ID NO: 34659 - DNA, 818 bp, Homo sapiens
gaattgaaagattacttctcagaaaaaatacatgattagcacagtttatggagagaatgaaatggtaatgacataccttagttcagcaactgtattactgaattaattttaatatgttggccttgagctcacagttagggaatccgttgaaatatctcccagagaagttaatgattaaaagtaggcagctgtggaatgccctagggacctgctgcaggttctagtcatttaaggttgcattaatgatgtggcagatggaatgagtgtaatgttgattaaatcccctccaccccaatgtcaaataaagaagagaaataagagccagtgagaacttaaaaaaaccacagggacctagccattgctttgcacccagaaagcagtcaataaaatacttgtttgttaagtgaataaatgattgttaaaagtgacaaaatttaatttgcaagcaaccacatgtaaatattacttctcacaagaaaagaaactattcagacttgcaaacaaacataggctcaaggaggattatgccatctggcctcctatgactctccaggcctactgaccaccagagattcttttttttttattttttggagacagagactcactccaccagagattcttgtgtgacttgttgagtcaaaggacaaaaggaccccatggagatgggctagaggcaggtacctattgatagagaattctattaaatgggcacagattttaagcatttcatttacctctaagatttcattaaacccctttaaaattggaagactgagccacttactgaaaattaattatccagcttgtgagggcta

SEQ ID NO: 34660 - DNA, 866 bp, Homo sapiens
aacagattaacaaatgacacccgggaaactaaataaacaaataaggaagtattgcttacatgtactaagtgctagaattatatggcagacatgttgttccaaccaagcagcatgtataacttatatcaattatccatttagtaaccttaggaggagaacaaattttattgtctccattttatagatggggaagtgacacagggagattaagcatcttccctaaagtcacacagttggcaagtggcagagcagagattagaatttgtctcttaaatctgtactcaactccctccaagtgtaccaagggtaggagctcaccgatggggcgtgtcccttttctttgccaaggggaacaagcactccatgaggggtcacctgctttagctcgtgagagtgactcaggcagagcagaaggcataggtcaaagtggttcctgggaagctcgcccgttgctgcctgtcctggcgcatacatcatcggtcagacgtcctcagccgcccgctcacacggctgccaattcacacgctcccaacacccacgctgatgttactcaataggcaggacaaaagaaaggcacagggaggcaaagaacgatgctatagagagaaaaaagaaacgcggggctttgcactttctgccctgaataggctcattgttcccagcctcctatggctcaggaatgggcccaccagacagaaacaacagttcccctgccggccaagccctcataaggtgcagccacaaggcagcaagcgaagctttaaataatagggcatctgctaaattgattccaagggagaccatatttggccactgctcctcttttcccacacctcagtgtagcctcagttcttactggtccaaga

SEQ ID NO: 34661 - DNA, 2910 bp, Homo sapiens
gaacatgagacttttctgcttgatttttaagctaaggctgacttactctcctgacatttaagggcctcctctccaattcccagtcatcagtaaaggatgtgtacagggaatgacaatattagaacaaaaacaacctgcaagtaaatcggatgcaagagtctatgtatcttgcaaggaaatcttttgcacttaatcacaacatggctctcctcaatactacggagaacagaattgattcagattgtttttaagcctgaacgtaaacaatattgtcgcctttttgggtttcagcacctccttattcatccattttctcttttatgggaagggggttgatgaggtgtgtgaagatgatagaacgtgccccagaaactgaacaatgaagagacgcctgtcatatcgggggtacctagattcctctgaaaggaagcccagctgaaggagcagggtcaccactttattttaaaaacgtaacatggcacatgttggtgctctattaatcgagcctcgggggcccaataacgtgagcatgggctgctgcgtggaagtttgagaccctgttgctgaatcctcgggcctgacggtctatcgctgaagacaagacttccaaagaatcacagtaaacgttaacctaagccatcagaagccattaactccggtgacactacatttcagcgaaaccttcgcgacccaacccctcgctccctctcgcccaaacgctgggtcaaccccacgaactggcggtggcaaggccctgggcaccggtgaagttctcgtggcagcgcagatcggcgaccttctcttctttcgcgctcagacggcggcggcagcagtacgctttcgggctgctggagccggcagcggcgcgaggccggagcccgggcagccaggctgggtgggggaggggcggcggcagcggagccgggagcgtgcgcgcgcacctcacactccgccgcccggggacgcccactcgcgagccggggccggtaggccggcccgggtcccatcgcccccgccctccggttcctctccggcgtgagcccaacgggtgtcggcccagcagctgctgcgctcaccaggcctggggaggcagggtacggggaccgggccgcagccccgagcggcgtgggcgcgctgcctctctggcagccgccgccagagccagcagctgcgagccaccggaggcggcgcggaggaggcccccgcggccgggcaggaaggagacgcggccgacctctgcccgcccgaggcgcggctgctcccgcgcgcccaggccctcccgccgctccagggctgagtgaggaatgagccggcgcctaccccgggctctcggagcgtgggccccggctcggcttcttaggcgcgagggctcggccactgcggccggcggcctagctcggggagcaggcgccggggttcactgaaccggccgcggagaggaggaggaggaggaggaagaggaggaggaggaggaggaggagctcggcgggggcggccgccgcgcctcccctcccccaggacacgccggggcttctcagtggccgccggaggaggaagttccgctccctgacagacccgtgcggtagcaacagcggcggcggccgcggcggctggccggactcaggtgtttcggacgctattgcccttcgcgccagccgtcgagtgggcagcagcgggactcagccgggcgccaggttcctgccaggcagcgccgggaagcgcgggcggccgagaactccttcctgctacttcgcccagcgccgctgcttcggcttcccagcgaagtgggagaccttcctccctgtttgcagacgtccgtgggagacccttattttttccaccgctaaggttaagagattctggaatagaagcgtcgaaggagatcaagtgaaccttctacaactcctcggatgtcgccagtctccctttcggggcggaagactacgtttgagcatctcactgaggtgcaggaatggaagaacccaccttgcagcttttctgcagtgtggcttgcctgatctacccctaggaatgaagaggaggcttgtaataatccgatgaagtacagatgttgaagaggatatcgcaggacctaaacttgtgatcgtttgggggaggtcacacacgtttctgagtgggaatggatgggcgtgaatgacgtgccctcttaaaaagcacaacagtcctttaagaggagcaaaattgagttttcccattttggccaagattttgaagacagttcaatgtattctacatttgacataagatgagaactttctaaagtattctctccaagagcgtaaacgatgactaccccagccctgctgcccctctctggacgtaggataccacctctgaacctggggccgccttccttcccacatcacagggctaccttgagactttctgagaagtttattcttctccttattcttagtgccttcatcactctgtgttttggggcattctttttccttccagactcttcaaaacacaaacgctttgatttgggtttagaagatgtgttaattccacatgtagatgccggtaaaggggctaaaaaccccggagtcttcctgatccatggacccgatgaacatagacacaggtttgtttatttcagaagttctggtactaacatttggcagagcaaggtacggtgattggatcgaatctgtcttttttttttcttgcagtaaaatgtaatttttcgagtcataaatattgtattgttacttcaagactggctgaataaaaccatagactggagggactctacctccagtctatggtagagtccatagactggtaggactggagtcctacctaagtcgttcttctcttcggttttatataagaaaaacatttgcgttcagagttgtgtctaatgtggacatctgggaagggagg

SEQ ID NO: 34662 - DNA, 1076 bp, Homo sapiens
accactaaaagaataaaaacagcatgtaaacattcccaatctgtagagagagaacacaatgaagtgaaagaaatagcttggtaatttttataaaaggcaagaatgaggaaagacaggaatgatcaggctaaggtgaaacagtgatgtgctgtttatgtgaggcataactaagtgataagaatatggaaaagttaagtgtcccatcccacacaaattgaggggttcaacataaaagagacatgatcagacttgtgctgtaggaaggtgatactgactgcaaccacctgtaacatgggatgtgcactgtaggaggacaagatggaggcctgggcttgggagctttgagctagcttgggcctgctctaaggctgtggcagtggcagtggggataggctgggtgggctgcggagatgaaaaggccgtttcagttatgctgagataaagttaaaatgacagccactggcctctggtctcaaacagggaaatcaaaacctggcctgcattgtgaacccaacatcaagggtttgggaattgtgtaagtctgacctttgttcacttccaagtgatgtcatcagttcacggggcctctgagcctcctaatcctgccgttgaggcaggtggctgtcaagctgtcatgttgaaaacctgcttctggagttgttgtttggggctctgctccttcagaaagtagagagaaactcacacggtatctgaaaactaccaaccctcatgttattccaataaaaataatctcttccacttaaataaagcttgcttggttcagatgtttgctctcacaagttcttcacaacttgccatgtgaggagatgctattattttattaggctgtgcggatattatttttcacatttctttttactgagaggagacagagatccagagagttgatatggtttgcccaagctcacccagtgtcagtggcagagctgagagtgcaaaccaggttgtctggtgtgggctcaggctctctgtgctgtcaggtttgaactcgttttggtaataggagggagtcaggagaatagaaactggccaactccagcctatattttcatcct

SEQ ID NO: 34663 - DNA, 520 bp, Homo sapiens
agaccctcaggctgacattgccaggtgccactttggaaatgacagctgctaagaagccagccctgccctcccagacgtgaccgtgcaaggccgctgcttagcgccttgtgaccaaacaagtgggtgcccagaggagctgtccactcttcctctcactgtcctggcatcaggaagactcggctattgtttttttggtcctggaaactatgtcctcatctcaggctttctccattaccaccaaccccgctctgcttggatggctgccctggggaatttgttctgtgcaaagcaaataaaaacgtatttcgaactggatcactggcagcaagggcagttctaactgccctctaacccgttaaactagaacaaagaccaagtgtcattccatggaaccatgaaggccaatcccctacccctcaagagatacagactaaggccagaagggccttgggacctagggataacacccttgctgtgcgaatgggaaccccaaactcagagaggagaagcagcttaccca

SEQ ID NO: 34664 - DNA, 1901 bp, Homo sapiens
ctgtggcattccgaatggggccgaagcggctgcggctgccgacattggcgatggactccccgaggcccttcgtcccactaactgcacacaggtggtccccggggccagagagccgccggcgctctctccccgaagaccacgccttcgcctccagccagtttgcttggggaatcagaaaggtgcccagggcccagaaaccattaagttttttccgacttcaaaaacacacaccggaggtaggcgtgggcgttacccgcctcactcctgggggcagggagaaccaacgcgaaaatccccagagaggcggaagaaaaacctgcctgcgagagaataggatggagatgggaaaagcctggggaagagagagttatgcggcaggaatagcagaaaagcgtactaagcaaaaagaaaggtgtcccactaactccgaagttaagtgggtgtcgacgcagccccctctattgcgcttgcgcagtgctgcctccctgagcaccccgccccttcccgccgctgaggatttactcgtctcttggcaaccattcacccgaagagccaatcagagggcagccctcgccccgcccctgccgtcagggccgggcggaagggtcccgaggggactggctccgccacgccccgcccctggctcccccgggagggcggctcaggggcggggacgggggcgtggtcccgccgtataagaacggagggggcggcggcgggacggctcactcggtgccgctgcctaggggctgtagaggtcgcgccgctcctgctggggcctgcccacgccaaggacctgcctctgtcgcctcctcttctattgcccaggtgagtccgcgacccccctcctctaaaggtgcggcgatgcggcagcagccccagggagccgcgagctcacttagtgggggtccgcccccactaagtggtgctcaggtctttgcccagcctggtagggggcaggcggacccgaggggagctgcggacaggtgccgagacccggtgctcctttcccctcctgctccctcgaggacccccgcccctgacacacccgtcccaaagggccagaagagacgctccgaaagggagctacaactttccagagacctggggcttggcaaactccagcgagttcctgctccgcgcgtcctgcaggctgcgcgctggccaggcgcgggcagggcgtctgaagagtgtgtgatcggcgcctccgctcctacctggatcagacggcgccccccgccacccatgcctcccttcctggcttgcagtccctcgggctcgccccggcgctcccgcgggcgcgcacaccttcgccggcccgccgagtgtgaattcgaattcggcggtttcactaggcgcagctggagacgcagcggtccggggcttggatctggttggggaggggaggggcgcttcctaggctcattgccaagtcctgagttttaaggagaagggcggagatccttaaatttaatgcgctcacatcagactgtggacaccatgagcagcaaagggatccaagccagtgacttgtgcgctgcgcgtctctcagaaacttcttgggaatgcggtgtctgtgaaacctgcttcctctccttttgaaaatgaaacttgctttactgcgtaggtgaaaagccacggcaagtgggtcgactcggacggataccggtgcggctgccccgggaggtgtcgcagttcggggactcccttcgcactggtcgcgaggcaggagggagcagggtgggaggcgagtcagaggagggtgacttacctgaagaatacaggttggtagcctgcacacctgaactcaacgctggcgggcgagaaaaccaagcagcgctacctccaagtaagggcgctcccctggagaaatgaatgcctggcgagcttctggagaaccc

SEQ ID NO: 34665 - DNA, 1051 bp, Homo sapiens
cacttttcacataactggcatagatttggtgcttcaaatgttgaactggatgggttttccctggaggacttgtccttgggccattagccacttagaggctgaatcctggatatttacctgaatgtgttgtaatgcctcattttggtgccagaaaccatttcagtccccttgtccagaccaatatttatacgcaggacaacttgtgtgggatgtgctggtgcccagcttcctggaatgagtagtcatgtcccggacactaacacaattgaacacaagctcttggcccctgagcaaggtcagtactaagggttgcagtcttcacgctcagcagtattatttcaaactccccacccacccagtcctcctggcagacctatccttctggtgttttagtagaattcctctcatgccatccccaagtgttcattcctcagccttggaatgaagctcccgtcgttgccacccgggacctctagggttccagaagtacacttctaaacgagcggggattctttttctccttcactgtccgagtagtcgcctgggcgggatagtaatgcgcttggttgtaatctggggttagtatcagctggaagatgctgagagcatcagcaggacctgtgggggttttccatatgacctctgagcagccagagcctcagtgtgatggtgccattctgccaccttaccttggcctggagcctcatcctctccagaggccttcagctccgtatgcacttatggcaggtggagtcagaggcaagtcaggggtggtgcccagactgggctgagtggtctacccctgctccctgcctaaaagctgagtcaagcgacttcctgtccgaagtgacggcattggacctggggccacggtgctggtttcctgcctcctggccctgtgccttctgcaacacgggactgtgtccttccctggggataaatgctacctagaagcatgtgctgccctggcggtgagccactcctcagtactctgactgtcatcactctctcaagcaggtttctgtcagtgccgcccagaatctagggagct

SEQ ID NO: 34666 - DNA, 1085 bp, Homo sapiens
ttaatatactagctataataatcttcgaagtctaataacaaattattttattggactatttagaatattaaaagatgtttagacaggatttggatggcccagttctctttaaaaagccatccaaggatgtttgacctgttttcatttgataaaatttcctagcagtgaaaagacattaaaagtcataccagagtctcacattagaatttgctcctgtgactccctttcaggagaggaattcaaacagggaggggccaatgtgacgagcagcattcctctttcactttcattttgtgctgtttactttataaaagttagtgtctacagaggctaggagtttgtccgtgctatttttattcttttctttgtttcctgtattttaaaacattaggaatgctatgtatttttaatagttggttgaggtgtaataataaaacatacctgtttgatgagtttcagcacatgaacacatcaccaaaaccatcaccataatcaaaataatgaacatattcatcccccaggcccccaatacccacaaatttccttgttccccttggtaatacctccttttcacccaccctgaccctcacatttcaaacaaccactgatctgctttctgtcactatgtgttattttgcattttctagaattttatgtgaatggaagcacacagtgtgtactcttttctgtctggcttctttcagttagcctaattattttaagattcattcctgctgttgaatgtatcacaatggtttgttcctttttattgctgaagagtatcccattttaggaatataccagatttgtttccagtttggggttattaaagattattataaataaagctatgaacatccacatataaacctttatgtagactttctctagggtaaatacctaggaatggaatgggtagatcatgtggtcagtatatgtttaactcttaaaaagccaaaatgttttccaaagtgactgtaccatttcacattcccaccagcaatgtgtgagaattccagttcctccatgtctttaccaacacgtgatatggccagtgttcttaattttaaacattctgataggta

SEQ ID NO: 34667 - DNA, 800 bp, Homo sapiens
tgaactcattcatccggaagacaaatacatagcagcaggcactgtgccagtcccatgtcgggcactggggagacagaggtgaaggaaacttgatgtctgctctccagaacttcacagggagacagacaggggaatgatagctctctagagtggtgtcctgatcaaggtgtggattaaggacggcggggagacagaggtgacaaggattcgccctgagaagtggggagagaggctttgtcagggagagcttcaccagggtcttaaaggatgcctacggtcagccggagagggaggaggaggggcgtgcaccgattcccacggctgcagcagggggcgcggaagggtaaatgcgtttactgggcgagggaagtcgcggctttctcctcaggctgaacctgggcatctgtctctgaggctaaagcgcttcagagccctcatgtctgtcaggggctcccgcaccgtgtctttctgagtactgccacctagtggccactctcaattcccacatttccctggacagcctggagtcatttgtcttcccactgatttgagggttaagcaaacagtgagcacacacagtggataagtgacttctccggtagcacacagtttgtgaggctggggctggaacagaacctagctcttgtgatcccaggaccaggtctggtatgggccggtttgcccccgtccacactcgctctggcaggttgaggctgaaggtcaagtcgatagatgactactctggagcgcacttcaaatcctcttcccaggcttcagaggggtagggacactttaagaga

SEQ ID NO: 34668 - DNA, 727 bp, Homo sapiens
tcgaatgctgtgttgctggttggccaacctgcaagggtagatgagcaacaagccggtggctatgtctgcagccatcagcgcatatgtgtagccctgcaattttggcagtggctcagcgtaatctatttgccatctggtcaagggcatctgccctactgtcacttgttgtgtcacattgggcagttgtctttgtctcaggtatgcttgagcacatgctgggcacttctggcaggcctccaaaatgtcctgtgagggcaaagacagatgccagcacctattgacctgttgcatcagttaacccccgcttgtcccagtttcctgtgtagccacaaggctacatctcatataggtgccaactctaaccacctgaccttggccaaggcatctgcctcatcattaccagagtgaccaaagacatatgggctgacatgtgatagatagttacatctttctgatgacctgtttcccagaggtcttgccacatagtttgtccccaaatgggctgatggcctacaagccaattctgtaacttgcaggtagtcaaccataaagttaaacctcaatagactccccagctattggtgcaaagtatcataggtgactcctctctgggaatcaccatcctcaaccactctgagttcagcccactgggtgctttgtccacacccagtatcaaactatatggtgtcagtgtcggctggattgccacagcagtccaggcagcagc

SEQ ID NO: 34669 - DNA, 1550 bp, Homo sapiens
ccctctgagtatgctttcagcgtttcccttagtctgtccccaggaccagtgattgcagagcatgctacctaagtgttggtgccacagggattcagctattctcacagggagccagcaaaagcctcactgaccagatgtctgactccaaactcctttttatcctgctcagatctggacagatgaagttttcaggtacccagtggcaaaacagtggtctccccatggctagtcccttctgtgtgagatgtttcctttagggaaatcattaaatgatgctgccgggaaagtaaattgcctaaggtcaccatgagccaggagttggccctcaggtttgctgggttgggaacttaattccttaagttcctcagagataagaaggctatggggagctgattctctaagtaagagcctgattgacaaatgaatacagacttatcaatgagggtatcaggtaggatcataagtgcccaaccttttctgagagtgcccctgaggataaataatcttacttgggatgctgaaatataaaggagattttcttgatgtagacaaaagcagagcaaagtttcaagagtgttcttgtttataaggctatttcatcattctagagtagctggattcactgcctttctgcgctctggagacgtttctgaataaaaagtactggttctcagaatttgagggctctcaccctggcacagtgcttgaggtcacccaccagtttagagagtatttatgcagaccatctgtgatgccagatataatagggcacaattgggtagatgacaacttcttttataagctagggctttctaattttttgtaaataatgcactcatgcaacaatatgtgtatgaattgacagaaggattctagccatcccaggtcctgttctgccaccctgagatctacaggaagtaaaaatccccacacatctgtgactcattgttgctcatcagttggccctgacagatctgttggaaagctctggcacataccatcatcttctttactagattttggagcatttagcagagatgataaatattttagtcttatgagcaacacattttctcttaggatcagattcttttgatatcgtgtcttggggttttctgtctctactttcagcaggtgattttttctgaccctgccccaaccatcccaaatctggaatgccttctgtggacaatactttcatattgtgtccagatccccacttcagggctgaggcacaagcctccagctgctgatggctcacagctgtgtcccttcctaggcaatgaccttggcagagaactatctggctccagactaaggcccctcccaggcatggctcaatagccaatgactgcctgatgcagagatacaatggttgggcccttggctttagtaggagacaattctgaaggctcatctcagctccagcactccctgtagcattggtaaggcctcagttacaacatatgaagggtcaatttctcccccacctatccttgtaagtgcatctctggaaacatacccaataaaccttctgcatgctagtctct

SEQ ID NO: 34670 - DNA, 868 bp, Homo sapiens
aaaatttttatttgaaaacttttctaactataagacaagaaagtacagtacaatatttctgttcatagttcacccagaatattatgtactcagcaaaggtcaggactaacagctctctgcaggaatgtttgttttcaacccttcatagcaaaataagattcttcaaataagacagcaataatctggtatggagatagtcaaatctcctggcttttattctgaacacaacatctgagtctactccaactcatttcaggacgtatctacttgaggaatcttgatgcttttgtcacttcttttctcgctctcccacctccgggtcagttgccaaagcatgttaactctgcaacaggagataatcattgaccaagactcacaggactttctgaactgtttctgtggcactgtgttcttttcaggaatttgcctgggcaaagtgcttgcatttattatattagatttgggctgacagagaccatttcccaaagatataattctggtaatttctttaaatatctagggttatgcggttggtcttgatttacaaaggatgtgatagtgatgatgacaatgatactttgctagttggatatagtgcttcatagtttacaatttacctgcagctatattttgaggggataagaagagaacaaagaacagagataaaggccacataaaaaaaaaaaaaaaaaaccccgagaagctagggtcttctgattttagagcatgtattctttttgaaagactcaatcaaggtaagtgctataaacaagcaaaccaagaagtggtagtagtagaagaaaaaatcttcaagccctaaaacacagcacaatattaaggcattctttctaaaatgggacagacactc

SEQ ID NO: 34671 - DNA, 2064 bp, Homo sapiens
ttaagtctcagtgagcaaacaaggaggagtcagccttggtcacttccccctcaagcggccagagagcggaaacacaaagccaggccagtgtcactccagggattgcgggaacctagacaacgcaccatcctgggctcagcgtctacccacccctcacccgaggtgctctcggttccgtagaatgtccagtccacaggaacggcaacacggacttgtctttgggactacaaccagcaagagctcccgcctgccccatttcacctgcaccctagggcgcccgcctccttggctacagcaccactgttcctagtgcccgccgactgcccaccctttcacttctcgtagagacggcgtccccgacaacgcctcgggaaagaacctaaccaacatgcgaggaagtggcgccaggctcgttcttcaagagaagtgacagaactaaccctcagcctgcaatcctgaccagggccgagtcccgagcgcctcggaccgcgcccccggccctctccgccccgccttccctcccggcctcagtccctcctctcacagcactctggtggtcccatccgggcggcgggcggcacggatcaggctcctggtagaaggcggccgagcgacatctccggcgaccctcagcaggagcgcgccgagtacggcgagtcaaagtcccaggagactggagtgaccagctgcaaatgctctgggctgcgaaacaccggcttccgctcctggccagagctcaccaatcagcgcccggctttctccgtcatttcctcctagaaggcaaagggaacctctggcggaagaggcttccggaacggacccggaaggggcaggtcttgtgggcgggtccaatcggctgggagcctcgtggaggctgaggtgagtcctggaggtgcgtggttggggcggagagcattatctgcggctccgattttgcagattctggctgaggcgttcgtgatgtcagcagcagccgagacgggcgtgttaaaggccggttgctagggctgggggaactcaggtaactacgggcgtccccacagcagtacttggaagcccctcagctactcggcgcggttgcgggtgctgagcagagctgcctgaccgtgcgtgtgcacgggctggcctgaggatgatatgaccgtgtgttcggtgtgtggaaccctccgtcaccctcccctgaccgaagactcgtttaggaatgtgtggcaggtctgttgccacggtccaggccttcagtgcatcttggaaacatcgttttgggggctgtaggttaggaagcggagatcatggggtctcggaagaaggtttggtcgtgaactgtcagaaaggaggcgaaagctgtgcacgtggaacaaagtgaacagtgcaagttgtatgggaggtagtttaaatatcgaggcgatgaaaaaaggctgctagaattgggcttactcgaaaggaagtgggcctcagaagataatattagttaaaagaagtagaggagaacatggatgttattctaagtaaaacgaataatatgaagaatacaaggtcgcgggacgaggaaggaaactagccagcctgacaggaaggtttattcgagaaatacgggggttagataggatgagtttttggaaactggcaaacgatttagccttttcaaggctttaggatagggaaagctcatttgaaaagattagtcggtagtattatgacgtttaaatgaaaagagtgaaaaacatggaggcggaggtgctaggtggaaaatcagtgcagtaatccagtgataaagagctggaactgaaagtgctggagagaaagggatcctgtttcagagtaacagtcaggtggaattgactaaagagaaagaggcaaagagaagcagtttagcatagtggttaaaagcagaaattttggagttagactggctggattgggatctggctttggcaattagctgctaaatgactttgagttagcaatttgccatctctgggtctgagttccttgtctgtaaaatagagataggaagagtgacttcccttgtggtgttattgtggagaatttgtttatttattttta

SEQ ID NO: 34672 - DNA, 544 bp, Homo sapiens
attagattcaacatccattttagtgggatcctcatttcgataatccaccctcaaagaattccatccagttagtgaggcaagttattcctttcctgaaaccacacgggtccttctaaactgagttcctgctctttctctgttcgatttcttaaaatagtttctgaagattttaaccacaactgaatcaaaactaaccagcctgtaatttcctggtatgtccgtatggcttttcttttaaaacaacacacacacacacacacacacacacacacacacacacaaatggcattaccttggctggtttccagtgtttcggagtttggactggaggaagctggaaggtgtctgtgaaaactactctcatttctctttgtctctcttttggaggaggctctgggttgcttgtggcttcatcatgatgtattatcaaacgtaggcacttttaattttgaattgttttaagaatagtttaccagtattacaaaaagttaccctagttctttaccgcctatcttccttctcttcaattatagtatatcaggaa

SEQ ID NO: 34673 - DNA, 778 bp, Homo sapiens
ggtcaggactttcctgaccagtccagttgcttttgacttgttacttcgccaagggaaatagccggaagaaagggaggtacctattttcttctaactgcagaaggctctatggattaccatgtgccaaaatgtaactggacctcatagagatcacattggggttcccgcattgcatcacagaaggggaaggccagagaaaggattcctttaaagctgccttttctaaaaaccaaaggaactaaccaagtgtcagaaatctttgcaagtcagaaatccctgcaaggactctaggaaatacagtgctttgctttttatggcagttctgctcctgctaacacaatttagggaaagagacatgatggctgtgatttttgggagcagaaaaacatagcagtacacctgcagaacctcaccatttaatgatgaccagatcccacgtggaaggggatcctaaggggatggaggtcaggcgtttactgtaaagtgaaagctgtctgactgggtccaaccccaagagtagatgtcaatatttggtttgcatttttcaatgccagctaaatactgtgctgacaatcaggctctgtgacatctgattcaaaacattcaaatgtgggtttttaaaggtcatggcagtctagtgtttccctctaatacaaagataatgacagcgctgaagggaagtcaacactgaaaagtgttaccccagagtggttgtggagtctcttttcctgacgacctgtgaaaacaggatattcacctatgtctggggggtttgggt

SEQ ID NO: 34674 - DNA, 1242 bp, Homo sapiens
agtttggtctcagatgaaaaacaaatctttcaggaatctgtttgaaggacaagtttttgagggaagaaaaaattaaagagacagaatttaaaggaaatgtaccttttcacataacatctccaaaggtttctcctccctggccttagttgtattaattaaaagaataaatctccaacattctagcactgtaaagataatttgcccatcatctatgtcaaaataagtgtgcgtacctgtgcatatgtgtgtgcactggggggtaagctagccagggctatagttataggggggatgagagacataagagaacatgtgagcagcgagctggcagtgcttggggagtaattaggcaaaaatttaagcttccagaactagtcagaaaaatagtcctgaatgggttaaaaccttagttctctttaagccaaaatgccaagtaaatgtgcttggcgtgaatcaggaactcaaaaaagcacgagtcttaacgggcaaatgagacttattaaaatggagaaaaatgttgccaggcaaggcctgtgtctcctgacctcttcaggtcagctctccaggcagagaggcctgccaggaccggagagaggctctacgctgaaagaccaaaggtcactcagttccaggaatgattggtgaatgaggaaattaagcttcaaagagtgcagctgaggcagaagccatgttcatgttgtattgtgtgaagatatttaaggggtctagatgctatttttctgttagggagcttgtaattctgtacacactaagaaataaaaatatttcctttatcattgtcctggctcaaagaattacatcatatttactatctaatgatttgatccaacaaaaatataccaaatgagccaaattatttccttgcctgaggatcaggtccacctacagacaccagtgtcctctctccttctaagcattcctcttctctctagaacctccctacattagtaagcacaagcccaatgcttagaattgccctaggcgctctcatggaaaccaaatatatgcatgcatgtatgtgtgtgtgcatacatatatacatatgcacatttatacatatatgcatatatgtgcatatataagatagagagagagagatagaatggactcccatgaagcctgctgtatgatttcccttgtgtgttgacaagaagtcatatgaagcagcttgaatcattgcttaacctgctgcatattcaatctcgagtgaattctgaggtt

SEQ ID NO: 34675 - DNA, 1300 bp, Homo sapiens
aagttttgatcaaataatacatccatatttctttttcttttctcatttgaaactgtgtcttctttcccgccccctgcccttgttctctgttcccacttcccatctctgaatataaatagttgttttcacattctttggatttgggcacaatgagcatagctcaccatccaaaatgcttctagttttgaagcctccttctgagcatcaaaaaagttgagatgatttgccaggtgtgcgagttcttgctgtgtgccaaagtaatgcgccaaatcactcaggaagagacataagattttccagtgtccagatgagccaatgaaatatgctttcaaatgcttgaaatataaattgactaccttttgtgaaaagattctctgttataactgaaacctggcaagagtaggagcaacctgaggggactttctcctctctgacttgaaagccctggggaagtggggtttcacttttaagcaggtctggttgccaatgaattcagtatgattggacctcacattttagatgccaggaaattttcattaaaaataaaactcttgaaacttgaccttttatggtcataaaattccacaccatttagcacattaactagcacctgaaatgatgagggaacgtcttgatttagtttagcatagaaagcatctgataaaatgagatccgtaggggcatctctgaggttttataattaccatgagctgtcatcagtacattatatctgttgtcttcctgattcattaggatcattatagctaaatccactgtaagtaaaatggtggaaatgtccataggccatccaccatgtattccacagatgaacagaaccaacagggcagataaaggctgaataaagtgacaaaaaacacttagctttaacttggacccccttctaaactggtgctatttcacaaaacctttgattcctcaccactttcctttccaaaagtacaaagtcaaaaaggaaatgagggtaaaagagtgatgcgtcagaggtttcataattatgtaaaagttcactaccctcccttccaaaagcacaaaaagccaaaaaggaaacgaggataagagagtgatgtgtcagaaggttttataaatatatgaatgtttatttacactaaataaaattataatttccccaaagtttcagagtttcagaatattcctgtcttgtttttgtctcaaccaagccgtgttctacaaatatttacacaatcataaggcagatctatttcaggaaattgaagaactgagaacattctccagataatttactgtaaattattatcat

SEQ ID NO: 34676 - DNA, 2952 bp, Homo sapiens
tgcatgccatggcctacctccagaaatagcctgtcatgaaagtcctgccccaaagaatcaccaccaagacaggtctagaggcttctttacaaaaggctagcttcatttttgatctccttatcactaacaaggtcttctgttagcccatagtgcagaaccttggaaaaaaaggcaataggaaatggcttgcaagcacattctgctgacctggacatgtaaaataagctaatgggaaggaagaggatgggccatctgaaatgaaagtagtaggtattcattcctcactggctaaattttgaaaatgacggcctttgtcttgttataaacaaagaatgatcaaaaggagagcatttgacatgtagtccataagcctgagttctactacgctctaccactaacaagtagttgcttgaccaaaaatatattgctcaattttgttgtctacaagctggaattttgagtgatttttacttttctcagtacatacaatttttaaaaattctgaggtgaataccattttattcaaatctaaatatattttaaatatacataagtttagtagagaagtgattcataagtcattttgtaaagaaaatgattgccataactgatttttagcataaatctggattttaatataatgtactgcacatttcacaaaatggtttgaaataaaagtttttggtttatttgaaaattcttacagacagaataccaaagataacccctggtaatctgtcatttgaatgtaaataaatgccctcaaactataaaaaaaaaaaatctattaaaataaacagtcattgcaaagcctacgcacttatgagacagatgtgtcacatttgtggattcaatactgtctatacaagatgaaattttctgattgaataatcttagatatagctggtttccctacccattttgattctctcctaactttccataggtaacagcttttaattttatataggaggagtgagaaagaatttcgagaaaagaaagaagtatcaacaagagaaatgacacagtctctaaggacatttatagcaggagcaaatggtcctataaacttcagcaataagagattcactatataataacctagtcatagtgactgaggctaagtcatcaagaaaggggtgttctgtaaactctcttttctaaagcaggaagcatctgatatattttggaactatttcccaggagaaaaacagttacattttttttcacactgttttagctcttaaggtagtaattttctgaaaaaatgttatttgtctacaactccttgtttcctgggaatgagaaatatatgagatatcactgcaggtgctgaagccacctatagatacttatcagagaaaaatggcaatcttttaatgataataaattaccataaaatttgttttaagtgactcaattactaaatatgatgtggggaagaaaacagcatgagggatttgatctggtgatttagactatgcaacaaagaatttgattcttacgttagctatccatttctctttgccgaagtgtacacagtggcggagcatacaggtgttttctaaaaggcaggagccatcaaccatcagcaggatgtgagggaagtaatgtcacatagaaaagaagtgcctcttccccagtgattcttacctgtttctcccagaatctctgaatcctttagcaaaagggtttcggtcaatttttaatctggtaatctggaaacaaacaaataagtatgaattgcttttatattaactgatttctttcttagtactcctagaaaattacaaaaatcacttttttaataacagttgttgcttttatttaatttcctttcagctcaagatttaatttgaagctggatatagaacttggcctggcacacagatgtctgacccacccgactcacttctctataaaaactaaaatttgcccagtatgtgactctaaaaactctctcctactcaccttccttgccccagagtggtggtaaatcacttgcctagacagatattgaaatggaaaattggtcaatggtcacgtccatggtacatgacacacgggaggcacttaaaaaatgcttgttgaatgagtgagtaaacaaatgatgtgtaagtgagttaataattaataatggactcagtcaattcagttaggtggaatcagaccacaagacaatctgccttagcctgaaagacccaaaaaattgactgcatttgccatttcactgaaggcatgcctttcctaccactagaaattattcatttaatgacttgaaatgttcatgtagaagacagaaaaagcagacttttgccagggtcttacccaaaggaaaatctacaatgtgagactgaatggggcaggatgcagtacatgttatccagtctccaagactcacaagcaaatcagaaacaaagagccagtttcataaggctgaccaagctagcacatccaattgtgtcaccagcttggtcctcaggggccatgtggttcaacccccactcaatgcataagtccccatccattgcatcctatcttagttctggcaaaccctgccatggttgtatatattgccctcatgcctgtagactagaacaagcctgaacaacatatgtcacatgcactctagtgtttccactttcagccttggtacctttgtgtctgaattgttaatgactcactacatgcaagcaatggagacttaggcataggtgctagggagctcaggaaggaaggaaggcactcccaatgcaaggtgattctagaaataagggaatctcattatttaagaccatcttcatatttttgataattgtagaacgtatcactaggacagctaaagttgtttcctacattgcaaatctttcctagttctctttcacctcattttatcagagtggaatttcccaagaccgcagtctttaaaggtctttcaaagcaatgtgagat

SEQ ID NO: 34677 - DNA, 5453 bp, Homo sapiens
tccagccccctaattcatcattgttaaatagtgaatgaactcagttcagtgagcgaggggagctacatatagaccaaatgagaaagagatgaaatctgacttcgaaatcagaataggcacaaatgtctgcaataaattcagtacatccaaagatgctctgattacaaccagagttaggagccaatttctcctccttgtacagacacctggaatatagtaccttggggtggagtagagaggcatgtttcacctgcggcttcccagagaaaagccctagactgaaaccatcttctctgaatctctcctgcactccaagaaaaggcccagcagcaacttagaaattgtcaagacagctgcagggctagctgaagaatcactggagcaaagcaaaacttgaagagaaagagaaaaaaaaaaaaaaagaagagaaaagggaagtcagagcaagggagaagaatgtctggcaggagcctgtggtttgagtgaggcgggatgggggaccccctggctatttctgcctctgtttttggcggcctctccatcttgctgtgtttatgggcctgacgtgactttccaactaagtacatccgctaggcttgcactggaaaacttgccaccttccgcccagttcaggtttcatctgattcacaccaggaagctctagtttcgagagccccatgcatttttgcagctgaatggaaacaactggatgcaaatcagacctagagaacacctgcagctcttcactgcccttgcacctccatctaacctttgaagcgaatggcttgggtggccagactcagtgactgagcttctccaagctttgagatccacagctgcaagcttcccaggacccagaagaggaggccagtcctaaaaagtaccaaagtttatacaacacaattgagcgaccaggaggccaaactggacaatgagaggaatggctgcagggaaggcctgccagggtagaaagcacaaggtttaatttataggagatgacacagcctcccaggcaggctactgagtgagccggcagagtctccctcaggatcagggcttcgtgttccaaagtccaggctggtgtgaggaaatagggacaagcggccactctgactcaatcatccccagtgtttgctacttgttgctttgaagggaggagggagggcagagtcgaggtctggtcaacacagcagtggctcaaagtgcaatttaatcatcctggacttggcccaacccatcctcttggtgtgagggaggagcaatttgttattgctgctgtcatcgacactgggcggccatggacagagatctgcaggcagcagcagtagcaggaaaggctggggagcaaaagaagtgagtggcagttgtgctgggctataggaactgcaggagagtggtggcccccaaggactgggaattcatgcaaggtcctcttcatccaggccctgctataggaaacctgatgggaatcaagagactaaaaatgatttcctggttcccccttcctaactcaggctctgtgccccatactctgttcatattctgtcgagacacccatccccctgtgtttcacttgtctgattacatatctgtcttcttaagagcagagaatggtgtttattcatctttatacctcccagcacctaataccatatttgttgaataagtgaatcaactattgctatgatgagagtgtgattcattctctccactgaaattgagcatgtactcttctacagtctcgatgtttgcaaagtactgctaggaatcaggcagccatcttccttggggagaaggagcattactcaaagtgcatgaggggaagggagatgtcagaagaatgccccatttactatgtaaaattcaggttcctagagccttcctctgactctctgaagcagaagcttgatgatggaggccaaaaaaggataagaagtttcatctcactagatccccatatttaagtgtgaatcctgaggcctagggaagaaaagtgatttgctcaaaatttcctatctagtactagcagagctgggagtatcatgtgtctaaccccattctttcccactacaagctgagtcacttccatgagcatctccttggtacctgctacctgggggactctctggtgagctctgaggggaatgcaaagatgattaaggcactatccctgtcttcaaggtatgtacagtccaagtgctgagataagaccctctcctataatcaagacaggctatggtacctattggtacccatgccgaagcaaatgacaatggctttggtcttcctacaacccaatatatggatgtttactgaagaactttttaagttacagtcaacttctacttttccagaagaactacaagaagccaggattaacatttatatcatgaggatatgccaatttttcaaaagttctagtacattaagcccaaatcctagccaacaaaatttcttttttctatgaggacagtgttacacaaaaggcacattcattttttgtagaactctaaggaaaactgtgtaagggtccattactacagaccagcactgataacattttggctatgtgagcttacaatttgttccaatatcagataaataaaaaattgactatcgcttttttaggtaaaccctaaagacagccttcaacttctggttgcctacataacctcaaatcgtgcctacatttcctcaatgcgtaatgacaattcagctgatgataagggtaactatcatcacttctcccaaaagtaaagcaggctacttactcttgtctctgtggccaaaagcaaccaacaacacccccttctgtatttaaatgacaatgatgctcgttccaaagcctcaaaatatcctagatggacaagtggaaaactgataaggcttcatgaacttcagtgaaccacctcactacctctaatcaattatgaaatactagtgtatcatatcaaagtgctctcaaaaatggccaaaccaagtgctaaactgaagttttcatgtccccataaagtgtaacctctaggatttaagggactctctctacccctttacagtttcctcactgtatcggtttacttagctacacaataaagccttcagtgggaatctagaaaattggtgacaatgatgatctttggaaaaatatcagtgaacactgaccatttaggtaactgaattaatttagaaatggttattacataattaaattacaagttggtaggagagatctcaaaagcagaaatagtttatgacaacccctcagttccattaaaactaaaactttctagaaaagggaagaatgaaacttttaaggaagatggcatatttggaaaatggagataagaaacaagtcacttttgaaagtttttcattcaggcttatcattacattgtctagtctctgaaagtctttctaacctttatgctgtaaagcctaacattcttgttgaaaaagaaaagtagagaatatacatctaagtaaataaaataatccatgacagacctcacatccttagagcaaaacccagccataatattaactcacagaaatgaagaaaacgtgtgtttttatgaggttaaaaaatatagcaaaaagttgatttaggacactgttttatctgaactattactaaccaggtatttgaacggctctttcattgaatcaatcctctcctttacaatgtcttcctaaacactttgtttcagacctgcattactgcttacctggaccaccacaggcaccttccctagtgatagtacaaaatatttctagtttcattcttacttgtttccctctcctgagcatcagaatacatagctaaggccctctgttcttagacagggctatgattagttttgaactgtgacatatttaacttacaggctaaggccccagtgtaactctcttccctagccatggcaatattggaagccatgtgttgagatggtggaactataaaatgaaagcagactgggtccctgagtcaccactcagaagagagccatgctggaagatgtccagatttctcacagtattacagactattacatcagtgggtctcaattaatgaactcttcttctcagtatttgtaccgttgtacagtctcctcccacactgaccctgagtttagtaacatgacttgctttagccaagtggacttttgtaagcatgatgcaagagttgatacatgtttgcacactggagcctgtcctcttagaacacatgcttttggagcccagctgacatgcagtgaggacgcccaagctagcaacatagagaagccatatggagaagaacggtggagaccatctgacagccaaaatggagactacagacatacatcccatattaggtcatctcagccagccatttaagccaccccagctgaggccccatgtatcatgctgtgccctgaatacctgacccacagaatcaggagcaaatgaaatggtgccactaagggttttaaggcactaagcacagaaactgataactgaaacagtgagcaagaaataaacttgtatatattaagccactaagacttcagggtttgtttgtcttgccatggggctgaacctatcctgactaaactcatatctccccatttcttatctttccccattccatgctttagcatcctatttactactgtgacatgaatcttcctaaggcatagccctggttatgtaatagttactgacattaatagatcactaattgttggtgactttaattcttatgacaaaacctttatagataagtaaatggaagtcaagagaaattaagcaacttacccatgttttcagagctaataaggattagagtcacaattcaaacccagcctaagctcataaccactatcctccttgaaaacttccaggggctccaaacatctactcaattatcctttctgcctagattgtaaagtttttagggcagggactattccttactcatctacatattgtaagtgttcaataaatagttgtcaaatttcactgaatgggctatttgtctcaggcatcttgtaaaaacaacctgaaggctgtgcatggtgaaagaaggcatatgcactgggtcaaatcagccacatggcttatagctgcttgcagccactctttggagaaaggtgggaatagccagctggagtcatggtttgggtccccctccaggcttttccagtggttccaattctttcctactacaggaagagataaacacccttcatatatttcctctcacccccaactgcaaggaaaacagtaacactaattagttgtaacagggtgttcatttcacacaggtctcagcaggttgccctgccgttctttgaaatggtttggaaacagcctttattttaaacatctgaagataattgaaccaaagttgcacccagaaaccctgactgacatgccttttattctctccctcactaacaagaaatgtttgc

SEQ ID NO: 34678 - DNA, 1639 bp, Homo sapiens
actgtacttggaagacgtttggtaaaatcctgaataactgaaagggtatcccctccccctgacttttttgctatgagggtaaaattccaaatatttaagacaattcccaataagaccaggccgcgacatggtctccgtacgacgagattaatggtaacagcagtgttgtcaagcgcaggacaggacaaactctgtagcagcttgcggtcactctttcacagcctgctagatagagcagtgctgtggagccaccaggagcaaccagaatggaagatgcactgacacttgctcaagtaccacactgccaacctgctgccccgacccaagctgcccaatgcctaacaaaacttctctactctctccgatagccccttagcgtgttgttagggtaaggagggtaaaaacagtaataagaccacaagaagagcagtctctaaaacaacccgtctctgaaaacatcacacgcggggtaggctcaccgcgttgcccggcaacagcggcggcgctccgctcccagaactggaggtggcggcaagaggtcagaaagcggcgcgctttttccaccaagaaacctttacgtcatcacgtatccttgcaacgtcactacgctctgagcaggccgacagtcatagacgagtagaccttaggcgagggaaggcatgtactttccctaagaagcgggaggagagaaataaatagagggcagtgggatgagaagaacctcgcgggatgggaagccgcggagggaagggccgtctttggttacctggagagcgggagcagctgcggatcccttatgaagtgcccggatgaagctccagcgctcacgcgctttccgcattgagtgcagcgccatcttgagaagggcggagccgtcttgtttggaatgacgtctgttcagagagccaatcccagtctcgcgactcctgcttgctgggcgcggcttgggcctccaggctgcgcagcgcagccgctatcgggcggactgcagttcttgccgagcaggtggggacaggagcggggtggggctttagtgtttttccctggatcccttgtctgctcagccttcctggaaggagaatttccttgggggttattagtagcaacgctttagactggaagaaagtcaagtaggctgcatttctgatcttagctatgtgaaggcaacctttaaaaagtttgtttagaaactcccagttctcttagagggtaatataagtggtctttttagacatgtgtggcctcatttcccttttttttctttgagacaaggtctcactctcgcccaggctggagtgcaatggcgcgatctcggctcactgcaacctccacctcccagactcaagctattctcctgcctcagcctcctgagtagctgggaccacaagggtgcgccaccacgcccggctaatttttgtattttggtggagacagggtttcaccatgttgcccaggctctctcaaactcctgagctcaagccaagccatctgcctcggcctcctaaagtgctgggattacaggcatgtgccaccgcactggacttatgtggccttatttcattcgtcctgtaaactttgttgaaccctaccgtaatgtgctgggcactgaaggtacagagaaagacatatcttgtcttca

SEQ ID NO: 34679 - DNA, 533 bp, Homo sapiens
tatacacacacagaggacaaaatatatttttaaaaacagtatctgaagacactggagagtgattaaaagcaggaagatgctggaagaagccaatatatgaaagaagaaaatggcattgatgagtttttagattttacagcttttaggccaaggcaggttctagcctgcactatgtagaatggctaaagctccatataaaccccacatattactggctagaagaaccagagtatggggcaaccacagcacaaagaaaattaagaggaaatccccaaaagaatagagactaaagggggatccccatctgcccacatctcttactgacctttgagctgctctcatatgggacagatgccaagccatcgagtgaagtttagagtttgactgtgatttgaactgctgctctgaacaaaggagatattaaaaggataacaaaaaaattataaacaattttacaccaaaaatttgacaacttatatgaaatggataaagtctttgaaagatgcaaattagcaaaacttactcaagataag

SEQ ID NO: 34680 - DNA, 1336 bp, Homo sapiens
cacccaaggaacttctaaagggttactggtggaataatattatccttccatttgtgttagtttgttttttaaacctcagagtgttcatatgtgtccacaatattgtggactctttaaaaggagtcagaatgtcagaatttgtttttgtatgtctcgtttctagcacagagtaagcactcggtaaatatttactgatttatattaatatatctgtcgagcatgtaccttcaagtttgggacaaggttctgattttattgcccctagttattgatccatttctctactagaccatttctttttgctctgaggtgcccggcaacgtgataacacagcacacatatggaatagcctggccaggttacctctttagacagtgagtcagaaagacaaaggcaaaggaattgtgagtcatgcattccagggaggacatacacagcaacgtaactcatttttaataacgggctcagaattatgaattaaagcattaactaacaccctgtggtgtcctggaatgtgaccaccaaaaagtcattgccataggggcaggtctgggttggttcagcaactttcaaatgccagctggactacaggaagagtttgttgcattaagtaatttatggggtgctacgaagttccttaagctattattaaaaacatgcaaactcctccttggttagacctctagtaagtcagacttctaactaagcagaactgataggcctgtcttttgatgtttaacgagttctgcagcagatgtgagatgtgatggacagggctgtggtggtgatttactggtcatgaaacagaatgatgagagccctctcctgaaaaaagaaaatgtagccaaaggacaggttccccccggccccccacaacccctggccttcctctcccaccaatcccttccccttctttctttctgcatgtgtttttgatttccttacccccctgcctctcaagactgggatcatttccattcaggcacacacagaacactgcaagctaattagccttggatacagccacaggaagtcaggctgccaaatcctctttcccccacaattcctcaactttctgagcctgcctcaggcccatggccttgcactaggcctctctgtataagttgccagttctaattttgcaatttcccttcaccttatcgaatatgccccaagcctgccagtggatggagagggaaaggctttggagtcagtcttgtcctctggactttttccactagccccttctctgctttctccctacaattagggagacttgtttggatacagtttcagtgttgacttgttaatctgacctttgttaatgctttttaaa

SEQ ID NO: 34681 - DNA, 2125 bp, Homo sapiens
ctgtacatgttggtgtggctgcggaatgggaaaaggccactgagttccagtcccaggtgcacggctgaccatgtgatcaagagcccttcccttgttatctttgaagactcaggttctcagtgtgagacatggggtctcctattcaatgacctgtagtgtttctcatgcagatgtgaccaggacatagaaagaggccccctgaatggctccaaagaaaggcactcatcaaaagcagagccagacctcgccgacctatgatgctcaggagcctcatggtaaatggcagcatgaggtcaggccttcctggcagagtgggagccgtgcagccgtagcgcccagtgcccaagctgcactattggctcagggcaagcagctgaaagctagaatggccttagtcccaaatcaacatttcatagatcaggaaaataattaaaatgcaactatctcctttccatgattttactatatgaaatgcagtgctgagcacttgctacatatgccgcatttaattcccacaccaattctgcgaactagagacttgtattccaatttagacatggggaaattgaaagtgaagctataagtaaatgtactaaatccaaaaggtgaacgtggcagaggtgggatttaaaccaaggtccatcggattccacagatactatactgctatctggaagacactaaggactgaaaagggacttacccaagagggcccttctgcctagaaggactggcacctaagtcccccgtcgtgtttcaactacttggtcatccatggcgattcaagatggggcagtgtgggttgaaaccccccaccccaccttgtgttgtggggaggtcacccaaacgtcctttgtagctttcaatcctcccaaagtagctgcaaagaggacgtgatgtgaatattaaaagcccgaggctggaggacttgcctccccaactccagtgcggagccacagaacttcaaagcgaaaggaagcacaagcagtagggggaggaggtgtaaatttcccccgcggtcccttggaactgtgaacatttgcagattccccaagccctcccgctagctccctgccaggtgtccgaggcccgaccgcgccccgcccccaccgcgcccccctccccgcaccccgcccctcctgctcccggctttcatgtggatcaaggctggaggatgacaagctcctgactgatagatacatggagacttcgctggtgatttattggctttctgcacctgacgagaaccactaggcctatctgaggagggaaatatatgggctttcctgactccaagtggcagccccggggcgagcatgtgatgtcaagctgggcagaggaaagcggagctgtgcaccggcctgtgtactgtaagccggcccgggtcgtaaaagtgtcagcacgcgatatatttcttgcaggggatcctctctggctcttgccagcgcctctcccccgtggctggcagccgccctagccgggcctgcaaacagcggatgccccaggtcgctatccctccgccctgccccggagcgccgggccctcacgttctcgctccagcctggggtctctcacgtggcatctggccctggggacggtgcagcggaggagttaattgctgtcactcctgacttcagcgaaagaggtcgatcgtggggtgagatattgaagctggggattgacctgtggaccaagagtttgatggggcaactcaatagcaaactcaatgttcccagagatgaaccaagtaatcagttatttattcagaaaattaagtgccattcgtgtgccaggcactgcgccccctacccgcaggcctcaccttggccaccggcctgagttgttctcatttctcctccctctacctccaggcttcttcctcggggttagcaggggcctggagtggatgtttagtctaccggtcagactccaggtcttatatcttgaaactgtaagtccctgaattcacagacaattcagagtaaggatggaggcaaagaagaggaccttgggtttactgttcacgaggtaggtggggaagggcttgaaaaacagagatataaactgcatttgtaccccatgtcaatgggagttttaagattttgaccaatttgatgaattggag

SEQ ID NO: 34682 - DNA, 1862 bp, Homo sapiens
cagggcaagactctgtctcaaataataataataacaaacaattacattaacttttctctttcaatgtaatgagtattcaagatagagggtaaggccaaaaacaagaagagtaaagaaaggtactttttttgcctacctttatctgtgttttgtgaatgactagttgctatattagctattgttttatgccaagtactttatacatatcatgtcatctaatcataataaatttatgaggtattcattactgtccccactatgtgaaatggaagagactcagttatctacccctggtcagttttaatcatcaacaaagccaagatttgtatctgcatctatatgaatccaaaacatacattcctgggattggaggggagagattttccaatacaccatttgtacctttgtcttttaagccacttcctacttggccctttagaaatgcaaatatagtctttttcctccccttcaccagacactccctataaggcaagtttatctatgtgcttagatactccagaaaggaactgttacccaccaggagaaagcctcaagagaaaacagttgatttacaacccaaagtcccactacaaaaactctctcccacctggggagtttttggcctagtcctgcccacaaaggcaccagcagtcaccagttctacagctcagtagataaagcaccagagctagcacttggatgccctcctacctgctgacttcctcccctgtgtgccttcccctttaaaagtacctggtttctgccccacaagaaaagtggtacccttaggcaggaagcctgtactttttcccctaaactggctttggattaaatcactttctttataccagacctcagtcttgttaattggactctgcaagccacatctacatatcctctctacacaaaagcatattgatattcccaaagcactgaattcctttcccctccttctttacaggtgtgcataaaagcactaactcctgataaatagacttcagctttcaaagctgtcctttcctttagtagagatgagcaggtagggtaggctaagagggcttcacaggccctggagagcaaacaagactattgaacttgttggggcaagccctttaaaaggtctgtaagaccagcagttctttctttactcattaaacatgtttgcccattacctatgtgacttcagactttggacagtgtgagaatgtggaagagatatgctggctgacctcacatgtttggggaagggggagcactgtacccagcagaatatctcttgttctcaaatcatcctcctctaaacacatagccaactgtaactgcacaatgcgttcaccttgcctgctacctagacagaaccgatttatcaagacaggggaattgcaatggagaaagagtaattcatgcagagccggctatgtgggagaccagagttttattattactcaaatcagtctcgccgagcatttggggatcagagtttttaaagaattttgtaggtaggggcttggaaagtggggactgctggttggtcaggatggagatggaatcatagtgggttgaagttaggttttcttaatgtcttctattcctgggtgtaatggcagaactagttgggccagataacaggcctgggaggtgtcagctgattcatcgagtgcagggtctgcaaaatatctcaagtgttgaatttaggttttacaatagtgatgttacccccaggagcaatttggggaggttcagactcttggagccagaggctgcatgagccctaaattgtaatttccaatcttgtagctaatttgttagtcctgcaacggcagactgggcctcagacaagaagggggtcttttcgggaaagg

SEQ ID NO: 34683 - DNA, 3009 bp, Homo sapiens
tcttgacataagggactacatagcacaattatttttggtttgcaaatgaaaaaggaaatgagatgggagagattaggaaaagagaagaaggcgtgagaaagatttccctgagaaaggcactcaatagtttggagaaatcgagaaaggaggaagaggcacatctgtgtagtaaaacggatttcaattacctggtctgagaacaggaaaaacagctggtgtgacaggccgtacctcttgtaaaagggaatagtgacaagactggtcaagtagttatccactgaaaccataaggtggtgccacgggaccagaaaagttcttgaaaagaaagacctccaggctggggaggaggagcaaaggcaggcttgagcacccagctgtttgttgttggcaaatatgtctaaatattgtgctggttccctgttctatactttattgccatgaagtaaatgctgaactagaatgttcatatgacctcatctaaacagctccctgtgtttatgggcaaagaaagcacagaatatgagtacttgaaggacctcagctcagcttttaatttcaggtggcttcaaatctatcatggattaagctgaaatacacaaaaatgtatattttctcaaatgaggaaactgagacttggagcgaagacatgtagcctgccactgttcaaataagtgttagtagctatctctcttgaagcagcctgcctctcaggctgccacacacaccactccactgactggatgaagcaaaagtttattccgtattccaacttcaagtggagctccttttactggcatggctaagcagggtcagaaggagtagaggtgaaggtggaatgataaaatctagtgtagatgagttgagtctctagaaatcttgggtctgtgctgagaagctaattctcatgtaaggagaagctaattctaagttatattgccaggctatccagaagcaatttcaagagtcatatcgtatttcagaaagaaccctaaatgcagagacagaagacctgagttcatttattagctgtgctgccaaacttgtgcacatctctctgtctctctagggtccttcttggctccatcaagcaagttattctcatagtcttccaatcctcaataggcaggatgtgtgggaggcaggacaatggtaggtaattgcctaattaggtcacaataacttcagagtgagcatgtccttaacataaacatgccccaccacggcaaatctcaaaaactctttcaatccgtgacacacaaagctcctagagtaaagcaaagatatgagtcactccctatcatgactaaagaagccactctgaagaactcaagcatcatactcctcatggtagaacatgcttacaggttgagaagggaattttcattagtagaaacaaaaaaaggctaatgagagtggttgaggagtggcagcctaaaaaggagagattattatataaatcagaataaaacaaacaaaaaaagggccattatggttcagaaggctcctgcatccttgattcacaatgtgtgagagctcagggaagaagccagagctgattctgggctgacaggcaccaggaattaatccttgccagatctgaactggactggcttcttttcccctcactcccatacaaatgccatccttgattcctcagatcactgcaatgttagaaacactcagttccctttttactctgagggctgacctgctgttcctgggcatccaaattcttccccctgccctctcttccccatgctgggggctcatctgcctcagtcacaggagcattttccagtgccattgattcatgtcttccctgaacccaacactgccatctgcacatggctctcctagtctccatcagctctgggacccttctcctctcccatcacctctttcattctcagggtctcctctagcttcagcctctcccctgacagtgctgttgttgacaatgccatggtgatggctataccctttgtatccactatccttgaggggaagactgattacagcattttcagccaactttgaacagtctaatctctcaaactaggcccgtaaaatgtagccttgatattatctgacattccattgggaaacttggcataagttcctaaagaactaggccagaggttctggaaggacaccatcctatagcaccaagcaagtgtaccttaaagtgagtcatcagaggctgacttttctcccccgttgtatctccacagcctaccctgcaattttcacgctgagatttcccacagactgtgtagggggtttccatacaaatataagctgtgataaccctgagttcctaaagcaacaccaacatgaatcatatgaatcatacaaaatcttcaaaggaagacaactttttatctgtctggtgttaaatcagattgcaatattaaagaaaaccacgtcttccttgaaaagcctgccagcttctctacttccttcctccttccctcagtcaggagagtttgaacttcagattgttagcaacaggtactcctgaatgtccttgccctcagatttcctcctctttgtcactggtctgctaattttacctcactgttttatcagacaaaaagcctaaagaggttcaaggagctaaaatgagctaaaatttctagaacaatagctggcaattggtcaatttgctattttattcttttctcctctgtctcttcttcttgggcagtaggaataaaaaaggaaaaaagaaaaaacattgaaatggagacaaaataaaatgggaatacaagaagacaaaataaagtgggaatacaagaaaaccattagattacttgaatcttccctttaatttctggtggcttcaaggctggtagggatcaaattgaaagaaagtatatacaaatatattgtgctaagttcttcacttccaaatttaggaaaagctttgaacaaggaaggtatccttttctttaattataaaccttatattaaacctctaaccaaaataatagactactaagatttaca

SEQ ID NO: 34684 - DNA, 3123 bp, Homo sapiens
cctggtggagaattctcatccaataatgaagataaatgacaggcaggggaatgttaaattcaagtaatgaacatttgtaagcagcaactcagtgccatgtactatcctaatgcctgggaatacaaagtgtgttgggggtcccaggtttggttcttcattaggaggaacaaatagtcgaggctatgctttattactgaaaggatgcaaagcaaacttagcaaagggaaaaatggctctggcagcaaaatctggaggaaaccaggggtaagcttccatgagtcctctgccagtggactcatgcgggatgcagttaattcccccagcaacaagatgtgatgacacatgtaaaatgttacctacctgagcaggtcagtagagattcaatgcccagagtttcatgttggaggctggtcatatggtcaccctctgcctagcccataccaaaattctagagtcccagaggagaagcaaatgttcatcataaaccacattgtttatacaaacagtttatacacagggaggcactcttatcagggaacactgggaaccctgttgaaatccaagttcccagacaccaaccaaggtccaatattgcaagcagatctctggaagaataaaattcccaggcatcatatattagttcttttatgcttttatgcacacagagttgtaaataagcaactgtgatataattggtacttgcaatgattaattcatttgactaaggtttattaaccctttgaagggtggagtaagaatgagctaaattagatatggttgtagtaatttgtcagactcaactccatacctcaatgttctctcctcactcactggcagactactttttctataaaaggtgctatggctgggctccaaattactcctcgtagcctccatctagagcccaatgcacttcctgggggctctgtttcctgtctgtcatataatttcttcctgcttggcccttaagtacgtgctaaggctacttctctgtttgacttcaacagaatctggcttgacagatcctggcttgacttgaggtatcctcaagcaagttctgccccatccctgctccagccaagattcccagcacctcacatctcatctggcctctgtgtcccctttgtccattagaggaactaacccattcctggttgaagccctagttactgcggcctatcttcttcctttagataatgacttaaaagccattcagtttccacccaaaacctttggttaattttcacatggctgccaactgcctgggagttggctggagcttagaaacttcaggtttctctgtttttccttctggaatcctctcatgcaggagctctacatgctgtaactgaaagcaactagtgtcttcagcgtctctgctgctgtttctactgccctgtttctactggagagatttattcattacccccaagccctgtcctctttcctctttcagggtgttgtatcaaaagtaccaagctctgcgtttatagggctcaaattgaagatgggaataaatggagccaacatacattgtttctcaggtacccaaattagcaaaaataggaaaaaggtagatggtgacccttgagcctcctaataatattaagcaacatgttcagcgacccagccaagaattacaaagtaaactttgtcttgtcctttccccactctgtaatccacagctccagacaattcaaacattgagattcctgggaactaccagatagtagcatcagttcaccaagaaatgaagctggtgaggcagtgaaaatccagggcctagaaagctgggaatgccatgacgtgggcacattgaaagacaagaggcaggcatgatcagccttgaactttaggaagatcccaggaagctgatggaagacaagatgtggagtgaatgtgaaggcaagatacaaaaataagaattttttgtaataagcttttaagaagtggtggggcctcaactaggtctaaggtggtgtgtgtacagtggaggagaagatataagaaatactcagaaggccaaataatcaggatttgggaatgggaatgggaatgggagaatggaagggtggacgattactctctgacttctggcttagggatcactggctttagcaataactctgttaagataagaatacagggagaccaatgttgaatccaaacaatttcatactgcagcttccccttcatttccttttctgcatctgaagtgttctcactgggtttggtttggttttgttttctccttggaaggtccagaaatgtccttggtgtgtttgacagactttcaggcccatgcgcgagagcagctgtctaagtcaactcgggattttattgaaggtggagcagatgacagcatcacgcgggatgacaacattgcagcatttaaaaggtgtggtcttctgtagcctgtctattgttaggttaaggtgcactggtggagagcaacttggacagtagtagtcctggtttctgcctccaaaaaacacagatcactcaagacctaataatgtggatgattttgttgttgttttggtttgttagggcaggggagggagggctgatgggaagatggaaaaagagggaatttctgttatagccagcataagtgagtcattctccttcatctcagcaactttgcaacctgacaagatagaacaagagtcccagaatgaccagttccctaggcagggaggatgggcctgctgggaggcctagatctcctgagttcctaaactctggcttggagaagaaaatggaagacaggagagaacactcaggtttggagaaaatatggagatccaaggagtctcaaagataataagagattgagtcaggggagaagagttggtctgaaaaagtaggagatggagcatcggtcaaccaacagcagtccacaggcagaggctgacccgccacttatttttgtatggtccatgagctaacgatggtttttcatttttgaatggctgagggtggggagtcaaaagaagaataatttgtaatacataaaaattatatgaagttcaaattttggtgtccataaataaagttttattttaacacaaccatgctcagccatttactattgtttatggctgcttttgcacttcaaga

SEQ ID NO: 34685 - DNA, 4899 bp, Homo sapiens
tgagtgtgtcagtgtgtgtgtgcatttgtgtgtgacagagagaaatgaggggagagagaatcacaaagagagaatgagaaagacagagtgagagagagagagagagcatcagtgagagggagagagtgcgcactagtgcacagcacagagcagagccagagtaagaggcagtatgaggccagacatgcctcatttagatttcacatatatgacttttttttaaccatttgtctgttatcaccacaataagttgactgcagaatttgaagtagcaactccttgtatgaatagacccatgagggagttagaagaggggtcacaggccaggtgcggtggctcatgcctctaatcccagcattttgggaagccaaggcgggcagatcacgaggtcagacgtttgagaccagcctggccaacatagtgaaaccccatctctactaaaaatacaaaaattagccagcatggtggcgtgcccctataatcccagctactcgggaggctgaggcaggagaatcacttgaacccaggaagtggaggttgcagtgggctgagatcatgccactgcactccagcctgtatgacagagcaagactccatctcaaaaaaaaaaaaaaaagaagaggggtaacatccaactgaactatgaacccatcaaggtgcagaaacagagtgacttgccaagaacatctgattaatgtgtagcagagctcagaccagagcttcatccagaggcttcatcacttggcccttgagctgatgcttggcaaggtgggtcttcagtctcttcctttgcctccatgtgtgtcccaaaccaattccctgtcatcttccccaacccaaatgattggggggactgtgtgtctacatgtgggctctggctgcccagagggtcctgccctgtgcacagagaagccccccattgacagcactccgggaccacacccaacaatctagtcttcctttcactcttctctgacctcttcaaatgtcagatttcctccactctctgttttaatggtgtctttgataaacaaatattaatgcacgaccaatattaaatgtttgtaatccttgtgtctcagcaatatttgcaatctaacatctgatatcaggaaaaaagcaatgctcagcctagaggaacagttccgctatggtgaaaatgcagggggcataatggatgggcagggcctgtatgaagataaaaacagagaatcctttcagtgttctttctgtgccaggcactgtgctaaaggttttgcatgtgctgactcatttacttcccataacaaccctatgagattggtaatattattagtcttatttcttatagatgacgagacagagaggttaatcaacttgtccaaggtaccacagttagattatggcaaagctggatttgaacccagacagtgtagtgcagcttctgtgctcttaagctgtagttgtctagcagcttctctagacctccctctagctcaagtcatgccataaaagcaactgcatttagtctacataaaacacttgccaagtccacagtgccttggagaaggagggagctatggcttcatcaacaaaagtcccctttcttggtccctctagatccctgaaaactcattgggggaagagtccttttctctctgctttggagttcttctgctttgacatagcaattcctttgagccagtctgtctgaagttggcagcaaagaagaagcagaggaagggagtaggaagggcagaggtggaaaaacaaccagagaaaattccactctcaggctgttagccacctcctccccaacagcctctttcctacctccccccactgcaggaccttcttagagttgcctgacaaagggaagggtctggcagtagacaaaacatggcagaggcatcaggagagcaaacggtcctgcttgtaccccaagaaggaatttctccagccttgaatttttcactctgaattttactctcactgttctttagcctttgttgccagtttcagttaaactggcttattcttaccctttctcagaaaagctgattctaaacagccagtcctgcacctggggtacagggtacaaaaatggcacgtgggatgggcaggtttgagccttcactagaagcctggccttagatctctccttaacctcttagcctcagtttcctcaccaataaagtgggactcagaatacctacctcttgagatagagatacaaggaaataagcaagctgtgagccgtatgcaaattataaagcacaaatgagagtagagtatttatccgagctccatgtagcatggtgctcattttgtgggttaattccaggtgataactttactggcagcataactacctgtggatttcagagaagcctgaagacattgatgttgtaaccactgcccctggctagacagttggaatgtcagttcatcagtggctaactcattgtcagcatcgctgtctgcttttgatgctattttgataagagttttcaacgaaattcatcatttcaatgaaattcattcattcataattcatcatttcatcattttatgtacaattcctgagtcatggctccactctcctcccagttgcccaagcaggaaactgtaggggtgattttatcttctccttttcctctcagcccagctccaataggtaccaggaccttaaaggtaaggtctgaaattcaaacctggtgtatctctcccctcctctgcttccactgtttgaccctggttccagtcctcatctaaatgttggcacagacattccgattaatctcttgatcacctggctttctcatatcccctataccagtccgttttatatcctcaagccaaggttaacttcctgcatcacaactctgcttctgtttcccttttacggttttttttttctttctttctttcttttttttcttgaaacagcgttttgctctgctacccaggctggagtgcagagacataatcttggctcactgctaccttcacctcctgggctccatccatcctcctgcctcagcctcgcaagtagctgagactataggcactatagcctgggtactttttatatttttagtagagacagggtttcaccacggtgtccagactggtttcaacttcctgggctcaagtgatccacccacctcaacctcccgaagtgctggctggaattacaggggtgagccaccatggccagtctgtttttgtacttcttttaaacaaaaataataggttttatttgacatgatgttagagacccaaaatcattattcctggttacatatagaattaaattaaaatattttcctcttatacccaactctccacaatcaccctactccccttaagaaatttggtgagattcccatggctctagcaatgcttacattctaagacacctgacaactcactgttcagattactttcctggaatgaggtgaggtacaaacaaatatttgttctttcccaatcaaccacaacacatgctgatttctctgtctttgtttacttgttccttttatggaatgtacaccctccactctaacacccccactctaacatccttgagcacttatgaaacatcacctttatcagaaaacttcctagccagatccagaaatcattgcaatgacctgacccatgttcatgcaaagctccaaaacaagaccaagctaacagtgttggaaggagacattctgaatgagtcatgccttaaaagagcctgccaggacatcttggtcatcatccacactgcctctatcattgacgtcttcggtgtcactcacagacagtctatcatgaaagccaatgtgaaaggtacagtatcctggggaggagatggagcaatgtgggaaaatgagaatcagaaagaaggacaggatggaaagagaagtttctccactgaacacctgctgtactctgggccaagtgtctttgctgatcactaccaactagggagttcaagactgctaactttagttttttagatgataaaactagggctaagagatgacaagtaacttgtcctaggttctccaggtaagtaagtaagtaggtgagttaggctttaaattcactcttgtgtgactccaaaggctgtggatgctctttctactgtggctccaataaaagataaactaaactccaacttcagactcttgatgtcaagccaccgcttgcctcccagcgcaaaaatcataccttccagatgtcaccatagtcatcattttgaaccttgtgtgcaggctgatgagaacattcagagccctcctgtccacctcaaagaagaagtcctcttgagagaactagcaaagctggttcacagaggtctgtcaggacagaattatccagcacatgccttcccacaatattttcttaaccataagattttccctgtatccagaatacaatctcttcagctcaccaccgggtctactattacagagccatttcttgccaggtgcccaaagtgcagcctcattcgatcctcatcccttaaatattgggtggtttttgcaaattgtggctttccaacctactttaaattcagacacattggcttaaagaatcttgtcatgtagtctcaccctctgattcccagatcccagtctcttcaggaccatagcaccccactgctggcctggccctccacattcagtctactctgatgccttttctaatgcaactaattgcttttgggtctccagcaccatctaaaagaaaaaaaaaaaaaaaaaaaaaaaaccttgtcagtttctacttgcccataacctgtaagtacccctacagtgcaaggagtatgctaagaaaactagtttttcattttaattcttattctctacagctcccagcaacaggggatgtgaaatgacaggggaagtgttagaggcatctgtt

SEQ ID NO: 34686 - DNA, 1561 bp, Homo sapiens
gctgcagtgagccaagactgaccccaccttcccccgcactccagcctgagaaacagggcaagaccccatctcaaaaaaaaaagaggaagggagggaatgaggtgggaagatcggggagggtaactgaagccagtagcagagccagaattagaatttaaaccaagtttattggcacattcgccaaatcccccactttggggctacctgtgaaatctatccctattgaacaaggtccccaccactttgtggatttaacctaacttcctatgaagaggttagggcagaggagtgtacacaactcccccaccaacctggattttacatagaaaccaaggccagaaatagcaccaagtctcccagcctctaaaagataaagcaggggcgcagctgccgcctcgctgaggcagccttctgcgcggaccccaagctgtcacgcggcccctggcgtggatggcaccgcggaggcggtgtctccttggagcggacctaagcaccttcctatgcactgcagcgggtccatctcctttgactccagtaactgagaggtaaatcagggtgacccgtttgacgtgtaaagaacactgaggccagggaaggtgaaccccaggcggcgtctctctcaggtagagacagcaggtgttcccctccgctggctcctagaagggacaaatggccaagcgcgttaggactggaagaggaaggccagttcccagcgaagcagcgcgggccgcacctggcagccccgaccagcagggacggccagttccagagcagatcactcccagcccccgcttgggccccgcttgggccccgcctgggccccgccagcccccagggcagagggcggaggagtcatgtgccgcggcggccgctgccaggtggcggggagccaggccggcagggctgtcatgtcaggggaaggaagcggcccggcgggcggcgggccaggagcggctcccactcgggcctccagactgcagctcctttcctgtctcccactcatctcgagggtcccttccctacctcctcagaggaacgcagggccggccagcagcagctggaggcttcctccctcctcttcccacgcccccctgcccaccactatttcccaagggagcgcttccatagcagagtccaggcggggacacccgattgggtagagcgctggaaaaacaatttcagcctgcggttcaaaaggctgaactcatgaccacaactggggtctaaccagagattccagggggttaatcatttgtccatcttcagcaccaactgggtaaaaagtcagctagcctctcgggggatatgaccatcaaggtcctgcctcctcactgctaagtttatggtcaaaaggaacccaaagggcaaagaaagccacctcgccatatttgcaggggatgcctctactgagcaaggggtaagcaccttacacagaatgtgtccacaaccaaacgtggcaggcgaacttcccctcagctggcttggccaggcacaaacccagactgcccaacccaaaatgccagccacccaagtggcagactgctgcgtgagggtgaacatt

SEQ ID NO: 34687 - DNA, 4047 bp, Homo sapiens
tctcttaacccaggagcaaaaggaaaagcctcagtctgacatgtcctaggtgctttattttcacaattgcaatgaatcatcacaggtctatgagaaaggctccatcccattttctaaagaaaaggcaagataattaagattttttttatcctttcactccttctttgatttattcatgttttcaaatcaaacatcctttgggcacttgttagatattaacacctaaagcaggtgtcattgaaataatacaaattaccaaggggtaagattaattttgactgtaaagtttgggaagagttctgtaagggagctaatcagctgggccaggatatgtacaaaaataattagggacaggtacagggatgtccagcaagcatggggttcaaccggacagtcacggaggtagaagaatgtctgttgcatcttcaaggactggggagctatttgctcgaaggatgggtaggtaaattggggtggcacaggtccagtaaaggagaggggtaggtaggcactgaattgtgaagaattttaaatcccaaagtaaggagttacttttgttgattatattaactctacatagtgtgtggtactgagaaacctgttaaggggcaggtgaaagaaaagaaaaaagaagtagaatcttagatacaaagaaaagcccatatggtactgacataggttcaagctccagacctcttactgacactgtagctatttttttctttctacataagcagacaagctccttcttgccttagtttatcatccttacaaccaacctttaccctttctccttcccttcacaggacactagtaattaggcaaaaaatgtagattctgaggaaattcaaagagttttggtgggggagggagaggaaatgtgatgcaactccatgagccttagtcatgctgctgatgtgaggtcactatttaccacttcaatccagccgcatcaatccagccggttcttctgtctgactagcatccatttacccctctatcccagtagttctgaaaagccatctatgtgttcctttgtgtaatgtaaagggcagcctgacttcatatttatgatcttgttcaataggatgccatcttattctctgttgggcatggctgaacttttgacatcaactttcccttaacaacaacccccacttccaacacacacacacacacacacacacacacacacacacacacacggccaatatgttctaactagaaatcatctaaattcacagagcctcttcccttcacttcattatcctcatggcctcatcctaaacaactcggttttttttctcgattccattctttatctcagttcaaatgcctcatctctcccaaagaagctaaggaagaaatgttttgtttcacctcgaaagccatttatatcaggctcagggctctctccatgtcctacagcatcattctttcgaccatgagccttgcatactcctgcctggccatataagtggcattcttaaaggttcatttggttcctcaaacgtattccacattaaataatatccacatgttggcttgttgagagaagaaggtaaacagttgggggcatcaacaaaaaatcaggtgaggggagaaaggagagatagtgagtgtggccccttaggcatgctgagttcagttacaacagtcacacttggactgtattcaaagttgcccactcatccaccacagctactcaaagacatttaactcgctagccattatccaaccgcatttaccagacgctcagtcttgagggaggagggtaacgcagtaggggatgcggagtattggtgtcatcctacaggttaaggacaaacatgcccactacaaggacagggatacatcaccaacttcaattcagcccagggttcatgtagtaaggggtgggtgattcactcctgtgggggaggcagggcgggggcggttgggggaggcggttaggaaaaaggaaaatcgtggaaagtcccagaggaagtggtagtcagttcccgatgcatggccataatgtacattggccataaggtacactcagcgcctctgtgtcgctgctccccctcaaccttttactcacccactcctcccaacacgcgcctcacccgtgcctccatgcacaatcctgagcctcggcatccccgcgaggtgcaggttccagctttgcccaccaccccaccacctacctacatggacacgtgtggttggaatgcctcccggggctagacggccacccctcttgggctgcgagctgctgcccatctctccacccacccgtccttattgtgtcatttgcccggtctgatggcagccccaaagccgctcatttgagtgggctagaatggagaagagaggaaaagggaggcacacatttcattcactaggacccaagatgacctgccgcctctctcctgcccttctcggagccccccaccctcccttagccccagtggggctggaggcacgaacagacaaggcaaggggagcgcagtccgtcaaggtccacagctgcacacaaagcccttcaccttctccttgccttccaagctcctccctgggcttggtttctccgagggtctctgatgcccccttcggtggtcggcgggacggtcctattccctcttgcatcgctgtctcctccctcaagtctcagcctcctcctccccgcccctcgccacatacccctgagggagctcagtcctggctttgggggcgcgagagcaccccataagcccggggccctgcgccccaggggagcggacaacggtccactttacgaggcacaacttcgcccagccgttccgccaccgcactcgaacacacaccccatccccgcagcggtcgggtctggtcccgatcagccccatccccgggaggcggttgagcccagccacagccacgctcctacctgcgaggcggctggcgcggcgaggagctagggcaccgagcgccccggcccgagccccgcaccgcagcgcgtctgcccttgtgcggcggcggcggctgcagcggccgctgggtggcccgctggctggctggttggctggctggctggctggctggctggctggctcgctggctggctgcccggctgactcctcactggggcttcctgtagggctggacaaaggacatttcctgggaggagcgggagaatgttcccagcatgcctcgatttgtagttcccggggacttcctgccaccgcagcagcgggcgccctggaggtagctcgggccaggctaggactccgggacaggaggaaaggcgctcgctgcttctctaagcgctgtggggaagggagcggccggcgggtcttgccccacgccccgccccgcggcgctcaaggagcccgctgtcccggagcacgcgagatcccagcgctgcactccgagctcgcggcaccggttgcgggcagccggtgggacgctgccgctgagctgtcccatggttcgggagggctctgcggtgggagaggccttttctttaaaaactgggaagtttgtggtgggttcgctttttaaaaattaatctaaaaacacaaaatctatcttttaaaatagattttctttttgtcttttacgccgttgacatcctgctgggggccgattaaagaacttgattgctcaccaggaattcaggttccttaagatcttggcgcttcatctttaaaaccatacagagctgattgtttccagatcccgacccggtgacattcctccctcattgttgaccttgtcccaaacatcttttcaagaaaagcaattaaattgagattgaaaataaattacgtaaattaaatattagacgtgaaaacctgtgtgctgctgaattaggaaagtgctggactttctgcgtatctttccttcattaacctttaggattcagcttcttggtcccataaaacagatgtgctggccactgtatattgagtgtgtgtatttcgggagtggaagggtgaggagaagaggacattggctacaagagaggaactctacttccagcctagcaagagtctatgatgccctgcacatgtttttgtctat

SEQ ID NO: 34688 - DNA, 2250 bp, Homo sapiens
aatgatcatccatagaagataccaggttaaataaatcatgatacaatagactgaaggatgtaatcggtccagatgttctgaaatggaaagatgaccaaaatctattgttaagatacaacaacaacaacaaaaatgtaagttgaaaagccagttgcccgaacgtatgtgtaatatgaaaccatttggcaatgtctggatgcattattggttgtcacaactaggcggtggtggtggtggtggtgaggctactactggcctctagtgggcagaggccagggttgctgcttatcattctacaatccacagggcagctttccaaagaatttgctggccgcaaataccaacaggtctgagattaagaaaccctgttctagatgaatatacaccaaactttcaacagtggatatctccaagagttgaattatagaggaattatactttttctaaatttttaatctattcgcatttcttgtaacgagcttattatattcagaaaaaaatgtgaaaagctataaacagttggaagagcttgcacataaaaaaataaatatttctaatcaaattacacagaagatgagcagatagggagagagcagtgccacagaatctaggacaggagagacctcccttcccaaggacacccagttgggagggaactcaggtaagaatcagcccttcattcaaatggaggaatttcctcccgagagcacatctcaccaatagccagttctttcctagtctcacggggcggtgctctgtcttcggagattacgggtggtcgaaggggagggaggccgggtgtggaagcttgtgttcctccctgtctgaacatgatacccagaatccaggggtttggagaatgtaactgttaggtgcttaatagaacataaaagtacacgtgaaatagaagtcatagtgctatttattcttccacggggcaaatttccctttttaatttttctctagttgttttgttacactggaatctcttgagcgccatctggtggacagatttccatcacccaatcagatggtcagccttccccacaaacattttagtcacactatgcctctgtccggcaggatcatgtcttgtcttcaatgccccagcactttgtgcagttgacacattataggtaaccagagtctgtttgttgaagtagtaaacattggtccattagaagctgggagtgaatattgaagtcaggtatgaattggcattgggaagaaggagctgaaaagcaggaataagctgtcctgattgtgaagggtgagtgcaatgccggactgagaaataaaactaactccaggccaaagagcgttggagattcccaacaggctccccaaggacacacagggagcccagtagaattttcctggagcctactgaatttctgctaggagtggactcggccctctgcccaaatgaggtgccatgaggtacacaaaggctctaatatgtaatttgacacttccctgggtaaaacagaaagtacactggccagaccccaaagtaaacttacgtacttcctctttacccctttttttctgctttaaaaaatctcagcgattctttcctgcctttctttttttttttttttttgagacggggtctcgctctgtcactcaggctgcagtgcagtgatgcgatctcggctcactgcaagctccacctcccgagttcacaccattctcctgcctcagcctcccgagtagctgggactacaggcgcccgccaccacgcccggctaattttttatatttttagtagagacggggtttcactgtgttagctaggatggtcttgatctcctgaccttgtgatccgcccgcctcggcctcccagagtgctgggattacaggcgtgagccactgcgcccggcctctttcctgtctttcagctctgctcctctcaattccccaataacacaatccctagtctcctaagagtgggccccaggatagtctgcaaactcatcaccttctaagggggactgctgtcactgagtggtcccaagtgggcactagaggccagtgttgcaatgttttcagtcttttcaaaagaaatagaaatctttattatcttgtgaaatcccttagtttggagccaatattggctccaattacttttgaaacactccatgggccaaaaagcacttgtgtttatggccaacaattagtaacccatcaaagaggctctctggactgagtgtagtggctaatgcctgtaatcccagcaccttgggaggc

SEQ ID NO: 34689 - DNA, 2115 bp, Homo sapiens
gtttgagtatttccgtccaatcaaaaggagactgtaagaggaggaggaggaggagatgactggggagcgggagctggagaatactgcccagttactctagcgcgccaggccgaaccgcagcttcttggcttaggtacttctactcacagcggccgattccgaggccaactccagcaatggcttttgcaaatctgcggaaagtgctcatcagtgacagcctggacccttgctgccggaagatcttgcaagatggagggctgcaggtggtggaaaagcagaaccttagcaaagaggagctgatagcggagctgcaggtaaggcgagagagagaaaattgaggtctctagggcaacctccatggaaaaaggctggctgcgcccaggccagcgcgcccccctcgcatgcaccccgtatcaattagttccggggcctcctgagattggggggtagagaagaacgggggcgggaggaggcagaaagagggaagaacaaacggcggcgagatgcaaacttttcttttagtttgcaaccgcgtctttcacgttggcatgcctccgctagcattgcaaagtgcgggctgctccaactggtcctgcaggctgctcgcggatgccagcgcgggatgccagcgcggcgccccagcgccttagcgcgcaattgttctggcagcctcgcgccgcctctcccccaacccccaaccgcctccgcgcggggcgatcgggagaggggccccaaagtggcttctttgcggggaacccagggactggcgattcttcccaaccaagttctgggccgccccgccgattctagcctgccttggcggtggcggggttgggggggtcggggggcggggggaagctggcggagacccaaccagtctggtggctgctggggcagctggaggggaaggcagccctcgtaaggcagcaaacacgtacccgcccctcgtctgatgcaagactgctccgtgctttcgccgcccctctgcctcctgggagccttcggaggaaagggaggcgggcggggagcgctggggtccagatttagcctcctccccacctttggtttatcgctggttgggagtgaccagactcgactagaatccgatcccaaacgctcccagatgatttatagtcttagcaaatttttatctccttttgttgtgatatataattaatctacttcaaatctttatccaccgtgtttgaaaaggcctgctgggcctggtggccttgtccggaatatttattttgtgaactcttcactccagtgcctgcactttcgacctctgtagtcgacccagctgcccagtctctacctcacctgatccagtatattctcccccaccctccaaatcgcacaaccgccttctgcccgcctcagccctgtccaccaccttcagccgtctcctcctccgaggaccccttagaccgcagaggctgctgttgttgctttagttgtgccacaaccacgtggtcctggaaactgcctcgctcactttgtctgcctttgtatctgctggcgtggatcttgtcaccatggcatgacactatatccaagtatccagctctgccctgtactcagaagaatttggtccctgccttcaagaagtttgtaagctggttagggagcatggctaatacgcaggagacagttgagcagatgacacaagagcatagccccgaattagaccatccagctccctaacctttgcgtgttccccttctggaaaagccagagaaaggtccaatcatcatgcacagaattggtgggcaagggcttaggacttgagtaggattggacgggtggcaggctcctcacatctgtcacctcctttcttgtgtgaaattgtatcagtggctctggggaacaaccaggaaaggcagtggggtgtcctgcagaacagcctctgactctcacctccaccagagcaccaggttgggaagagggtggcaatcaagtgctttcacctctctaaaggaaattagaaacctgataccccagtgagggggtggggatagggagggatgagggcagaattgagaggaatgggaggcctcatccataatgaggggttgttccatgaagtcaggaatcagctgggtggatgctggg

SEQ ID NO: 34690 - DNA, 660 bp, Homo sapiens
ggatcttaatagattaacccttaattttacattgacatctagaatttgtaagcttatgcctaaggactcatagcaaatggacagtagcctagagcctggtgagcatcccattgtacacattgaatattatcctctccctcctgcctccactccccatcttatttatttaagtcagccagatatctttcctaagcctctgcactgagaagggccaggtgtattcttgatccctggactcctgagagaggcagatgtagcccagcaggatcattgatcatgtaaacaaaccacagccttgccctctgtgcagggatggtgggatgccataagccacaaagagcactccctcctccatcctcttttgtaagggatcaagggtcaaggtttagtccatggagaattttgatataaaaggcagaggtcaggagttaagtaaaactaagagcactcatagccaaataggtgagcatttcattgatgaagcagtaactgggagacaggctccagaccagtggccgttccaaggctcctgcccccttccccagggggtcctcttccccatgactccccttccccaggcttccttctccgtggcaccactacacatcaatattcctggcaatattcttcatcatggagacttcggcagcgacttcaacc

SEQ ID NO: 34691 - DNA, 1627 bp, Homo sapiens
ggcttgttgtaatcttacttaaattaatacttatcttacttttggaacactgcaaaaactttaggttgactttatttactctctgcatccttttgaaccattattgtcatatactttacttctacatgttataagcccttatagggcataattatacaatctttactcattttaaaagtgtacctctaattacatgtctttctcctttcttttttctacacaagaacatacccactgttttcctacttttaagtaagttttctgctagctgatttttctgatagggccttccaatgtttattgagcacacccaacacagttctagtccaaatacacagcagtgaataagacatgcattgtgcccataaagagagcacagcccagtgaaagaagcagacattttacagctaaatatgcagggaacacagacagcagaaagagcaattctaaacgagagcagaggaaaaaaggaaggggaaggagtcagcagaagaagggagagatgatctatttcttttctggaccaattcacttctctttaacccagattcttaatatccctggcgaaaatctgtgttcccttttgtatgggagcatactggaggtgaacttggtgatctctgtactgctcccatacaaaagtactttataccttctgttcactttagcaacattcttcattttatagttagtgaaaccaaggcacacactggtaaagtgatgcactcagggtaacttcatagtttctcacgtgttagaaatactctgtcccttcactgccctgggtgccaggcttataaatttagctccattctacgggagctggaactcagattgaatgtgtctatcaatcatctttgggattctgagcctctggtagaattctagagcctctcccagcagcaaggtcacttctaaggacagctgtgaggcaaaagtggatcatatgatcacaagatagtgaggcagaatgataaatacacattatatctgacaggagaggtttggagtttatttatcttccctatttatttgactccctccaaataactggagtttgtactctcaaatatttacggaggagcttccccagtacccgggagctaatggttaagccagcgcttgtcctgccagcttggctgcctttctctcagcctcattctcgctctgacttctctgggctggctccctccctttcttcccagttagaaatcaaagcttgcaagaagaagcttagaatgggtcagttggtaacttttgtagctgtcttggtggggagctatttctagaaatggattataaagccttgaagaaaattaacacggagaggcttccagaagcttcagcccaccgaagttaagagtatccttctcatcttgtgctttctctaaagaatgatcactttgtgtaattttaaatcatttttctcctggtgttgcccacttcaagaacatgcaccacacctttacttctgtattccatcttgcctccttcccttgtgtttcaaaattaattactacacttcaggcactgtgctgggaagggtttgtgagggttgaacaaaggggttggacaaagaaaagaagagggtgaggttcttgagacctccttgaccagtgtgaggaat

SEQ ID NO: 34692 - DNA, 627 bp, Homo sapiens
tagtgagttttccccaatagcagggaaaaactatcttttactagttacaaggtgcttctcagaaagtgactcacctttggtgggctactgggagcaggcgagcaggtgtgagggaggtttcctgcaccgctcttgtcagttgcagaatgcgcttcactggagtcaacagacgctgcatctccagaggagcaagcagaaacccagcagttcagaaacccagcagaaaccttgaaagagatgcccagtggtgcccggcaggactttataaagccccaagactcctgcctccctaagccccgcctctgctcaccgtggctcagtctgcttctaaaactgggtcaaagggctcactcagaacacgggcgagtcaaagacaaacagcatctctccaacatgtacatagctgccctgctcctgagcatgtgtgggaatggctgggcattgttcctcctactccatcaggctctgtggcagccttgattctgcccagctacctaagcaggaggttatgatgttccttgttgtatcacatcccaaggtaaccctatgtgtcttgttttagaccctggctccttatctgtattactctcactgggtgttccacactcctctctgtggtgttagttg

SEQ ID NO: 34693 - DNA, 779 bp, Homo sapiens
tctggtgctttatcagttttcagttgcttttgcatacggtcttttctcatgaaagttccatggagttaacctgaattattagccccatttggaagatatggacattgaggctttgagagattaagtgatctggcttgtggatatgtgattagtgacaatggctgggagggcatttgacggccttggctccaaatctagggctctttcattgcacctacttgtggagtctgctgtggaagaggaagagcaaatgttgtttgtgattttgttactggttagtacaacctcttatttgccaggtcttgccttttctgattgcctggggagacatttagaactttgatttcaaagcctgcagagtttggtgagggaggagtcctgaatcctgtgactagtatatataaattcctagctaattaggtgaaaggtccagaggaaagtaggggaaagggcatggagtctgatgagatctcccaaacaaaaccaatgagcactggtgttttgatgcttctcaagtttcaccattccaggagttccttagtgtatgttcagcttctagggagcaaacctgacaagctaattggagtctcaagtgggaattaagcatttgcatggggagacctagtgtgcagctgcccatagctctcaaggacctgaccccggcatcactacgtgtcaatccttcttagtgtctattgtcaagctttcatcttcacagacacttaaacagttaaaaaaaaaaaatctgttctcacagccactttatgtcaaacaaataa

SEQ ID NO: 34694 - DNA, 1495 bp, Homo sapiens
ctgaccctgagtcttggaaccttcttttttggaggagacaattccagaaaaatggttgttctggagctaaagactttaaaacctgttttgtttttgttttacattactttggcatctgctgagttaaacagtgactagaaagtcaagagaacatcagaggctgtgtgaagcaggcagaagggcatgaagtttaatggtggaaactgtagaaccccagagagctgatagctaaggagaagtaccttctacaaaaatttaacaaaaggcgttttctatgaaagatcagtagtactccagccctgacccccaggaggccttcgggggcctcatgagaggccagctatagctctaggtccaactcactgtttcacaaaaagagttttcagagatttgaacctagacaatttcagaacaggaacaaaccttagaacgaatctataagtcatccatcttatagattctgggaagatggtggtggcatagttttcaaatctctgaatccccacataaaaacagaagaaaacaaaaatttgcaaatcaatatttgcaataaagctaagtgatagtgtgtcttgttagtagaagccccgcaaaaaaagtggatgaggataaaccaacagtcatgagacctgcagcagcatctgagagggaggaagcagagggcagcaatgatgtgtctaaggaatgtgaatctctgaatacccagagaactcactggagagcaggcagaccgattcagcagcagtagctcaaatcagaagtagttttgcctaccccaatgctgatgagtttaagctccactccccaaccccagataagatctcaagggctggcacagcataaacagtgctgtgctgataacttgcacaacctgatttgtagtgtttgctgatttccatgatgtaaacactctcatcacggtcgattgcaggctaccgacatgaacatgacgctgggaagtgttatacacagttgactctgattggaggcagctgtgaactctgggaagagccagggctcttttccaggactggctggacctttgggagtgaaataaaaactgagcaggaataaggacaacagcaatgaagggaagagaaggttgatataaaaagtggggatggaacagagccagggcatttcagagagcaagcggccatgcttcagaacactacccaaaaaacaaagaatagggagctctccaaagttggatgagttgcctctaaccgccccaccttctagaagttcaggaaaggtaatgttacataaaaatgtaccgaggtaaaatcccgagcaaagttattataaagcatttaactccatggtttccagacttgtagcacacgataatcactggaagcaaaaacgaaaacagagaatactctttctgtgccatttattgtggatatgaggccacactcctgactacctacaataagttaaactgacctaaccaaagccatgacattgacagctgttgtcttcagcagcctcc

SEQ ID NO: 34695 - DNA, 858 bp, Homo sapiens
ggcccagcccactttgctctttggtttgttttgagaacagccaatattgccaccctttcttgttcctcctgaatgatttttactgaaagtaaattttaggatggcccaacaattctctgttgaatacgtatttcttcaataatgcttctccatcattgcttctgcagggcttgccaacacagcctgatttttccaacgtcaggaccaggtcaaggctcacaggaccttgttccatggctcatttcaaaagtctgtggggtaaagttctgtccttcctgaacatgagtgtcatatatttaacttatgaatttatgcaatcttctaaaatgctataaagccgaagctctctcttactctgctatgagaaatttaccagcattatttggcagctctgcctatttccaaacacagttttacaggcttccaagaacttccctgcagctgtggaggcattttctggagtgaaaccacattagcctcctcttgttcttcctttctgatatctgtactctttccagtcaagattcaaatatttcttcctagagagagtgatgggggaagcttcttctggcatctcagcatttcaatttggctaagtagagctgctccctggctgtcccacaccccagccctcatctctgttggctgttcccagcttgggcaataggcaggcttgcgtaacccaggccagggttgggcctccatatcagcaggctccacatctgcagattcaaccaaatgtgatagaaaatattgaatattagattattaataaaaataacaatatagcaataaaagttaatacaaacaaaaacaatacagcataacgattatttacattgtgttaggtattataag

SEQ ID NO: 34696 - DNA, 1068 bp, Homo sapiens
tatgaatttactatgacataatactctattctagaaccttaaaaaggtttaaagtcaaagtcattactcccaaatccaggattccacctgcagatttctttttgctccaccttgtccctaaaatttcctctccagctgtcttcatggggtccttgggctgcagggcagggccttgaggttgctcataaacttctactttcataacctgcttatatgtctgtactgtctgttccttggttccaagatagcctgaaatgactgtcctcaagtaggatacatatctgatccactattattgtgcatactcttttgtttcatattcacttacttttgtaaaagttctcagtgactttagagactgattcttgacttagggaagtacacgatccagatataaacagaacaagataatgctggagctggaagggattgtttattccagggttgtcaactggccccgtgggcaaaggtcaacagacctgctttgtttggctctcatatggttgaaagaaattgatttccgagctcatttcccagttcaaattgccctacaagagaccactccacttattcacatctaactaaaccctataagcgttgggatttagtttaaggcccccattttatagataaactgtggtttggaagagagacatatattcgcgatcacaaagatttaaaatggagacaataacatttgctaagcatttatggcaggccccattccaaatgcatcacatatcttaactaatttaatcctcaaatcccggagaaaagaaaacaaaggctctgacactgtaggctaaatgtcacccagccagtttgaggcagagacagccagttctagtgtggcttaactcttaaccctttgctcttcccaccataataaactgccatgagccgtggctggagtcatataaacgggcacatctcaggaaacaacatttacctgaattttctcttgcatcagatgcttctctagtctcagttgagactcctggttctaaattattgcagtaaggccttaggataaaatttcccaaagcgtggtccttggtcccctgggtt

SEQ ID NO: 34697 - DNA, 1290 bp, Homo sapiens
gtgatagactgagtctggtgttcttttgtcacatctgcagcacatttttcgttctcttctttccctagttgaagcttggatgcgattcctttcccttcctcttcaaatgactgatgaacttcatcctgagtcgaatagtggagcttctcagtatttcttcatttgaggtcgagggtaaattgcctatagtttcagtctgacagctactcacttaggacccattttaactaatgaacagtttctgttttactagtagttgataactgtcagaagttttttgaaagggtcgaaagaagaaccccagccagatgggcagcagtgtggaaaatatagattgaaatggcgttagaaagaggtcaaagaaggtgtattttgggggaatgtaaaaaaatgaagtctggtagaaggatttggggaagaactgacatgactatataatatggaggtgagtcttgtaatttttttctaatcttaaatcctaagaaacagcatgaactaatcattatatttaaaaagaaggaaaaaagtactgtgattttgtccctgcttccacagggtgcagagttttatggccttggactttgtcccttcatatttgacagcgatgttgaccatgatcactgatacaagcaaacccttaacatctcctgatattgaagcaaatcctatcagcaggagaaaggaaatgagtcactgtggaggtgtccattaacttttatagccagtttgaaaaaactcttgtcttgagagcagcaggattcatccccactcactcaccccacagtgggagacacgtggcatggaactaactctccttctccaccacttcatgaacaacctattatctattttcatgataagctctccagctagaaagcatcagttgatttgcccaagaggcacaatggaagttccactaccaagatgtaaaataaaaagctttcatctcttaaggttttcaactcaaacttaatttccttcatgattcctgtcctaaaccagccccctcctctataacatttcccacagtgtgtggaaattatttgcttatgggcctaatgtcctcaataaggtatcttttctcaagaacagagatgtgacttttcatatttgtctatatgtctgacacttcagttgtgtttaataagtgctcactagacaaatctcagtgtattgaaatccccaggatagcacttgacacataataggcccacaatacatgttagtttctttactctatattttcttctaaagattttcacagactaggttgagctttttatctcaata

SEQ ID NO: 34698 - DNA, 2251 bp, Homo sapiens
aacgggaaggaagatgtggaggcagagacacgggggtccttgaaaggcgttcctcactcctcctctgtgctacttaggagagtggcaaacatagggccaggtgtcattcagcacacacgcactcacaaaagctctgcctctgcaagcagacactgcaaacacaaaattttcttaacagccttgccccaggacactgccagggcctggcatcatcttgtcatcattgcactgtggtgcaatgcaagagttaggacagctcagcgtcattaacccacctgagatcaccccaaatactgaaaatgcttatagaatcattttctattcataaaatgtgttgtcggcatttattgatcagcatgggtgcaggtgcggatgttcacatggatcaagttgagggaggcagagggagaggcagacaattgctttgttccctgggattctgagaaacaagactataccttgaatagcatggtaattctaggaaactcactactttcagagctttagtgtatggaaaagccattagagcatgattctcagaatacccacaacttggtcacaaactgaggggcaagtgaacactcgagaagtagaatgcactggtttgtttccaaaacaagaatgctgtttatttgctgatcaaaacttgtgggaaaaattaaagtaaaaaaatattgggagaagaatggaaagcctttggataaatgattagctggttaaataaatgagcctgtgttactgaatgagtatggattgcccggttactttttttgtttcttgacactctttgctttgggtcgtttactttcaatgtttgctttagattcttcctgtccagtttttgctttagattcttcctgtccagtttttgcttcagattcttcctgtccagtttttgttttagattcttcctgtacagtttttgttttagattcttcctgttcagtttttgctttggatagtggcattttttcctgtttgggttttaagtggtttcctatcacttgccggaaaaacacaaaaaccactgaaaggattaataaaataaggcgaaacattatgatggacacaacccaaattgacgagggaatcgcccctctgagcagtcctggaggcccactgtcaatgcttcctccataccccacttcctcacagaatggaggtgcccacccatacatgcagtggcagttttttctgttgttgcaaacaccccgggtattgcatttctcaggcaaacagtcaaactgcaggactgagctattgacgcaattttttttaaaacatacccggccttctccacaggaggtgccatcatttatcatacctaggtcaggtattcccatgggtttcatggatagatgatagcctgtgccccagcacatgagattttctgcctgtaaatgagtagaaattatagtcgtatgctctggcaaatcagggatggtttcaacatttatacactgtagcctgccacatattgaatttgcactttcacactttttaaaatttcgaattcctgtaatctcacagttaccaaattgatcacctattaagttaactgcatcatagcactcactaggagcctccatggcatcaggtccaaaaatgctttggcactgcatatatctggatctgcaccccttcctgaaacaacggccttcatacttgcaaggggttccatcctgcttataaacgtcatttgggcaggaacttgaattcccgtcgcagtactctgcaaggtcacattcatttccttcctgcctacacacgtatccagatggacgaaaccgacaatcatgacagcaaagtccaatgctacagttggcacctggttgcaacttacaatttgattggcaacaccgatctttctgacactcctctgtggaaccacagtcacattcctcattgtcctccacaattttgtttccacatctcttaagcacataacctagtcctgggatattatttagacatgttgctcccgaagagatatgtttaaaaaaagagatataactgcaattgctaaacccagtgcgtcctgagcccatgatgcaattaagcctacccctacattggcagtattgttcatcatgtgacattcctacagcatgacccagctcatgagcagaccaggtagcaggggcaaggatatttgtatctagtaaagtactcactgatccagcatattctagagaacacacttttccaaacgaccatgcaagagcatcattatattttctttgaagatata

SEQ ID NO: 34699 - DNA, 1163 bp, Homo sapiens
cagaggatgtgggtagtaaacctttgcagcattcacatggtgctaaatctccaggcactcagaatgcaagaactgtgggaggatggccacctccacattgatttcaaaggataccgcagagattcttgaaatctaggctgagaactgccacaggggaaggaccaccacagacagctgccactagggcattgctcagtggaactgtgggagttgggtcaccacagagagtccccaatagggcaatgtcttatggagccatgggagcagggctgccccaaaaccccagaactgtggagcctccagtgtaaaacgccgcctgggagagccacaggcacctaattccaacccctgaaagctgctgtgtgggctgtgctcagcaaagccatgggggtgaggtcacctggagccttgaggttccaacctctgcaccagtatgtccagaaggcaggacatcaagtcaaagttgattgtcaagacttaagatttactgttgtttaccctgaggggttttggacttacttgagaccagttaactctttattccttcctatttttcctttttggaatagaaacatttattgtatgccttctcctccactgtattttggaagcatataagtttaatttcacagattcacaaccagagggcaatttgcctcaggatgaatcataacttgagtctcactcatacctgatttaaatgatgtttagacaagactctggactttagacttctgtgttgatgctgaaattaagagttttgaggttattgggatggaatgtgcatgtaagaacaaaataaattttgggacaccagaggcagaatgctacagtctgaatgtttatgtctctcctaagttgaaatgtgaaaacttaatccccaatgtggtggtattaagaggtgggcttttgggaggtgatcagcagggtcccatgagttatgaatgggattagtgcccttaaaaaggagcctgagggggcttctttgcccctactgtcatgtgaggacccaggaagaaagcgtcgtctttgaagcaaagaaagaaatagtcctcaccagacactaaatttgctgttgtctttatcttggatttcctagcctccagaactgtgagcaagatctgtcttcaatttatatattacccagcgtgaggtatcttgtc

SEQ ID NO: 34700 - DNA, 1085 bp, Homo sapiens
cctgaacagtatgcctgggcactgtgggaagaggcagagctgggccaggcaggcctgtcttcaacaaccactggcagtgtgtgcaggtgctagctgtggtagacaggggcagagtgatcctggatgtgatggttaacattgtcaacttgactggaatgaaggatgcaaagtattgtttctgggtgtgtctgtatgggtgttgccgaggagattaacatttgagtcagtggactgggagaggaagacccaccctcaatctaagtgggtaccatcccatcagctgccagcacagctagaaaaagcaggtgggagaaagtggaagaagctgacttgctgagtcttctggctttcatctctctctcctgcgctagatgcttcctgcccttgaacatcaggctccaggttcttcggcctttggactcttggacttataccagtggtttgctgcagactctcaggcctttgaccacagactgaaggctgcactgtcggcttccctacttttgagctttggacttggagtgagccactactggcttcctagctcctcagcttgaaaacagcctattgtgggatttcactttgtgatcgtgtgaatcaattctccttaataaactccctttcatatatgcatatatcctattagttctgtccctttggagaactctcaccaatacaccaggtccctggcagaatgcttgggtgagggtggcagcagatgccctgtgaccctgctgctagtgggcagggttgttttcagtggcagcaaccatgggcaggtggttggggagtgcatgctttggccctaagtggaagatgtgcatgaggtagcctgtccttaggttgcttataaatgtgtggtggccaactgctgggggtgggcagtgtcacagccaatggcttacactttgggcctggcagtagcagccaacagcagcaaccagcagcagcagctgtgggtggaggatatcaacgggggacccaggatgtggagatgcagaggcttttgagcctcatgacaggattcattctgctgagagatggactctcaaaatggaaccttgctgtagctgcttaggatttgc

SEQ ID NO: 34701 - DNA, 814 bp, Homo sapiens
ggatgtccagtgtagtgggaatgagcatgggctcaggggtcagattgcctgggatgtaattctggctgctgtgcactggtaacattacttaacatctctgtgttctgggtttcttattctgtaggtattctcaacgtcggtgacaattgacaatttagtgcctagctcaaaattagttcttcataaatgttacctattctctttgtattacccacttatcaacaatgtacctattatcctatctagcagggatttttgtgtattcactcgactgccacttgatcttggagtaacaagtttcaggatgcagaacatcaggctactacagcagcactgggcattgggtatgacagttttcatcagattttgcttctcagtgatctttcactgaacagggatcactgtgacccatttgggtgcaaactttcctttctaatgtccacaatcataccaaataggagaaattcttgtgaaatagagaacaaagtacattcttggcaaatgaatggtggacattcacttcactttgctctggctgctttctgcagactctatcaaaaactctgaagggtgtttctcacattcgagtacaaacaaccacatggaaattattaaagggtaacatgttagtggctgcttctgtgtgtcactgtccaggaagaacagaatgtacagtgtgtgccttctgatgatgccaagaagaaactcaggtgtgtcagtgaggggcctcaggtttctgcagtagtagcctctagcactttttgatcaggagggtaaaagataaaggtaatattgacaagtaaagagagagaag

SEQ ID NO: 34702 - DNA, 626 bp, Homo sapiens
tggtggttgaagatttacagaggaatacaggattaagtcttaaacatattaaaataactgcagtgtattctttggctggggttttagaagaagaaaaagtgggaggtcattgaggctttgacttcgagtatgaattcggaacttgatacaacaagtaaaggaggatgaggaaagacatgatcgatactgtgtttgaaggtaagttggccaatagaacatagaagggattaaaagcaaatgactttatgttagtagggaaagcaggagagagcactaagttataggctacctagcaaataaaagcctttggtgaaacaggagagctgtattgtttccatgtcctaccaagctactaaatcttcaatacaaacaagtgtcagcatgtatcatcacctgtgtcaacacacaaactttgctggtgaactcccaaaatgttgcacaaagctcagttaggcaagttttcaagagcaataattatccctctcagtaatttccacctgccagatattgcaggctactgtcatttttttaacatcaggactgaggcagtggactagttaggctcttatttcctatgggcaaaagagaaagaagataacttgtttttaaaaactaccctctctaat

SEQ ID NO: 34703 - DNA, 2143 bp, Homo sapiens
caaaaagggatagaagaaaaaaacaaatgtaggatgcgtatcataaaaataatgtcattaagagtacctgcctaacactttgcctagttatagaacatgacattaagatgggacagatctctgtccgtgaacaaataggctctgaactctggtagcctgtacaatttattttagcatttcaggaaatttttcctctttaatatttattaagcatctactatgttccaggtaatgtcctgcttttcccagataataagcttacagtagtgctcttctctcatatctgccacagcatctagcatggtgctgggttcagagttgctgcccaataatacctgtgaaaatatgtctttgagtgaacataggaaaatgtatgaggttagtacaataagcaatgatctagcatggagatcctgctcagttcacatactggttccagagcaggcctaagatatttgttactgatattttaaaaaaacagtctgcctctggttaccaatccatatcccattctggtggattctccacactgtacatacctgtccattgtgggggacagcggcagttgtaagtgttgaccccatccacacaaacccctccattctgacacctgtggttagggcagtcatcaatattcctctcacaggtgctcccttcaaaacctggtaaatgaagaacaaatgaaaatgatgaaatctcatacagaagaaacgacctgctctgttcccacagaacatggttattagaatagacccgcttcatgacttcagttcaacagctgctcacccaggactcaccatatgaaaaatccccaattctctgtcttctctggcctcaagcatagctagacagtgaaagtgactcattgtgccaatggcatgccttcatagttacctcacaagtatttcaaaatgttttcatgaaataaaatcccagggatgataaatgtctacttgggacagagatattcaagggttctaaaaaaacagggtattggattttccccagctccataccagactaatgggaagaacagataaaatattacctaattaaatttaagttccttttattttttttctttgaatgattgctaggcggcctccaagccaggtggggaagggagtgggggaggatataggaaaaatattgaacttaaagtatgaagatatggatcaagtcccaatctcaccacctgcaagctattcgtacatggtaagctaaagttctgcatcaacttcctcacctgtaaaaaatgaggctaattccacttgcctatcctgtctttctaattataagtgccacatcatgagtaaagtgctatacaaatgttaaaaggtatctgaaaattgggtggcattattactaactaagcttaccagcacttcaaattcatcaggctcttctctaaacttacagcattgcttccttcctcttgactttttcttttatgaaaaatgaaactagtacaccaaacttcactctaactgcccacagtgtggtcctttgtagtttatatgttgggcctcttactttctctttccttgctaccaaactcctgagctaattaaatagaagactaccagcttctattctaaacattctcctatttgaaatatagtatgattacatatttggcttcctcgaaatatcccttaaggttcctctctctcactcaaaatacttactgggacttacattaggcactggtgatacagcagtgagtccctgcttttgtggcatttacagccttgtgagtgggacacacatcaatcacactttgctttattccttaccataagttactgtggcattctacatctgctctgctacactggaacatggctgatttctctaaatacaatggcagtcatataaataagtataaactgagtgaccaaaaacattagccaaaaatcactccatggaagacagaaatcactgaaggctttattgaaggaaattatatttctccaagtatttggtactcagtccattcaagcagatgaatcactgaagaagcctgaaaaagactatgaaaatttactcaaatttcaaaaatgtatcatattactcatatttcatattattcatacagaaatatgagtcttacaaatagaccaatgagccagaaaatgatgag

SEQ ID NO: 34704 - DNA, 840 bp, Homo sapiens
aaaaagcccatgaattattcaatgatgtccaccataactcagggaaaagaagaaaatcctgacttcctcgagaggctacaggggaccctaagaaaatatactcccctgtcacctgactccttcaaggatcaattgatcctaaaagataagtttattacccaatcagccacagacatcgggagaaagcccaaaagcgagccctgagccctaaacaaaatctggaggcattattaaacctggcaaccttagtgttctataatcaggaccaagaggaacaggctgaaaaggaaaagtgaaatcagagaaaggccacagccttagtcatggccctcagaaaaacaaaccttggtggttcagacaggacagagaatggagcaggccaatcacccagtagggcttgttatcagtgtggtttgcaaggatattttaaaaaagattgtccaatgagaaacaagccgccccctcgcccatgtccattatgcctatgcaatcattgccccagaggacaaaggttctctgtgtcagaaatccccaaccagatgatgcaacaacaggattgagggtgcccagggcaagcgccagctcatgtcatcaccctcactgagccccgggtacatttaactattgagtgccacgaaattaacttcctcctggacactggtgcatctttctcagtgttaatctcctgtcccagacagctgtcctcaaggtccgttaccatctgaggaatcctgggacagccagtaaacaggtacttctcccacctcctcagttctaactgggagactttgctacagatggtaagtatgcttatctaatcctacatgcctatgctgcaat

SEQ ID NO: 34705 - DNA, 1299 bp, Homo sapiens
cagaagctgttaggcttaacaaacaaaaataaagtaaaatcagatacggtatggggccttgggacactgaaaccttcatccgtagaaaatcagttaagtcttcacaggctagaagagagggtgtgtgtgattagtaggcaaagcaaagaaagatcagtacaagttgtctggcagctggataaaaccttacacctgcgcaaaaataagcctccctcataagaaagcccaaagatgtccggggtcggggaggaggaaagtgtctctcatctgtcccatcaacgaaaattagtgaaatctgcctcagatgaagtgcaaaggccagtctgcagggatagtttcaacctctccccacgcgatgggctacacatcacctgcccaagctctctcccgacctgctagagcctagagggcggaggccggagaggctgcagccgggagtagcaccgcacatccgggaacgccagcagcgggctgagggctgcataactgatggaaggccgggcgcggtaagagcgtctcggggagtagggcaaggcggccgggcccctcccattccgccttttcttcagcgtcctgcccgcggcactggctgcgggtgccgggccacctgcgagtgtgcggagggattccggacacccgcggcggcgagctgagggagcagtctccacgagaactgaggcggaccctctggcgccatgcgcgccctccccggcctgctgggggcgagggcgcctacgccccggctgcttctcctcctccagtgccttctcgccgccgcgcgcccaagctcggcggacggcagtgccccaggtgtgatgggtacaggggccagggtagggagggcggagggcgcgcgaggctcgggtccccgcgggcagagggcatcgctggcgctccgggcagggttggcggggagaggcgcggggatgctggtgagggcgggtggcgagagtcggcggcagcctcccattggctacgtttgtgtcacctgagctgaaccctggaactggtgccgctcgcgctcccgcgctctttgggggcgagtcttaaacaaacagcgccccgcgagtcgggcgcgtaggtatcagggcagagtctggtgtttcctaggaagacggcagtggggtgtgtgggtggatgcagggaccagatagcgatttggcttgtgcaaatgtggcatgaattttgaaagccacatttccccaaggcctactcccttttcttgattcgagagtgaggctcgagtatcagctccttccctccttttgtcaggtgggttggctttgaggaatttttttt

SEQ ID NO: 34706 - DNA, 823 bp, Homo sapiens
tggtataagttctgtccttttagctccacttaagctaaaattgtggaacaatgtacaagacaaaagttatgaagttagcatcgaatttaagccagaattaaaaattgtcaggcactctcagcttgttttctagattcggtattgatctctgcaaaattcagttttctctttgcaaaaggatattgtgaggtttactggatattttttacctagatgtatagacctacacacttggacataggttttctgttaacctaagactttgagtcaaattttaataataagaatagttataaatgtatagccctacgagttagcattttttttagttccagctgaaaaaaaatagaattgtccaggacatttttctccgttctgggtatccccaattcttctatccctgattcacctttcaaaattcatctcagagtattgcagttctgagaacctctgcactcctggggaattctcactcttttgctcaggctggagggcagaggcacattcacagctcactgcagccttgaccttctgggctcaagatgaagaaatcggggcttagtttaataattgcccaagtacacatacttagttaagcagcagagcgggaaatttggcattggtccatccagtacctgtttgcttaaacacagtgcttaaacacaatatccagttgtctctctgagttaattggaaatgtctgtgaaagttcagaactactgacagcatagcctacgcatttaaatgtctgatttgcactgaatgacatgctgacacggtttgagtcctggaataaaattaggtacagggactcttctaaggt

SEQ ID NO: 34707 - DNA, 1459 bp, Homo sapiens
  modified_base (1290)..(1459): a, c, t, g, unknown or other
aaacactctttttctggaatttgcaagtggagatttcagccgctttgtggtaaatggtagaaaaggaaatatcttcgtataaaaactagatagaatgattctcagaaactcctttatgatgtgtgctttcaactcactgagtttaacatttcttttcatagagcagttaggaaacactctgtttgtaaagtctgcaagtggatattcagacccccttgaggccttcgttggaaaccgtattttttcatattatgctagacagaagaattctcagtaatttccttgtgttgtgtgtattcaactgacagagttgaactttcatttagagagagcagatttgaaacactgtttttgtggtatttgcaagtggagatttcaagcgctttggggccaaaggcagaaaaggaaatatcttcgtataaaaactagacagaatcattctcagtaactgctctgtgatgtgtgcgttcaactctcagagtttaacttttcttttcattcagcagtttggaaacactctgtttgtaaagtctgcacgtagatattttgaccacttagaggccttctttggaaacggttttttctcatgtaaggctagacagaagaattcccagtaacttccttgtgttgtgtgcattcaactcacagagttgaacgttcccttagacagagcagatttgaaacactctatttgtgcaatttgcaagtgtagatttcaagcgctttaaggtcaatggcagaaaaggaaatatcttcgtttcaaaactagacagaatcattcccacaaactgcgttgtgatgtgtttgttcaactcacagagtttaacctttctgttcatagagcagttaggaaacgctctgtttgtaaagtctgtaagtggatattctgacatcttgtggccttcgttggaaacgggatttcttcctattctgctagacagatgaattctcagtaacttccttgtgttgtgtgtattcaactcacagagttgaacgatcctttacacagagcagacttgaaacactctttttgtggaatttgcaagtggagatttcagccgctttgaggtcaatggtagaaaaggaaatatcttcgtatagaaacaagacagaatgattctcagaaactcctttgtgatgtgtgcgttcaactcacagagtttaacctttcttttcatagagcagttaggaaacactctgtttgtaaagtctgcaagtggatattcagacctccttgaggccttcgttggaaacgggatttcttcatattctgctagacagaagaattcnnnnnnnnnnnnnnnnnnnnnnnnnnnnnnnnnnnnnnnnnnnnnnnnnnnnnnnnnnnnnnnnnnnnnnnnnnnnnnnnnnnnnnnnnnnnnnnnnnnnnnnnnnnnnnnnnnnnnnnnnnnnnnnnnnnnnnnnnnnnnnnnnnnnnnnnnnnnnnnnnnnnnnnnnn

SEQ ID NO: 34708 - DNA, 1920 bp, Homo sapiens
gccatgcctctttagacagagcttagacctgtcttttcctcctttgtcaccatcacctagcacagtgcctccatacaggaaaggctcagtaagatttgctgaataaatgggctctactgggcgctcaggggaggctgtttggatgtatatatcactccaggtgactcatggcgaccttagtactttggctttgtgaatagccagggaattcttttgtacccctaagatatagctgcttctagaaagtgagagcttgacttctttccatgtatttctagggaaggaactggcaaggaccccaccatctccatagctcccaagtattctcatccaactgtaaaccagatgtgtaaagtcttcttgagttggtatcgtgaagcatggtgtaagtggtatgagtggtgtgagtctttgagtgtgtacacatgatgtgcacatgcatgatcgcctaagcacatgagggaactgtgaggagttcctctatgtttttaaattgcctctttcttctttctgcccttttgtttgttgataggccaggattcagaggggccttcagcctgggcacatggcccaggagtgctggtattcagtggcccattgtttcctgccccttgtgtgcatgaacggggactggggccagcatagctgccttcttggggaccattgtttgtctttgtaggagcagcagcagcagcgcctaaggcagcacatttttccctggatagaacaactgttctgtcttggagctgtacgcctaagagtgagagtagttagaatttcccttaatgcctgtatggattctttgaagatggtaacaagggaggcatcttcttctttctgcttcctttcttctttttccttcttcattctctttcttctttctttttctcctccttttccttctccttctccacctcctgttcttccttccttttccttcttcctcttcctcttcttctttttggccagttgtgagggaggggagatgctcatggtgtcatatcacaaataaaccacactagcaggtggtatctattaacagagcctcttttttttcctggatcaggggtggggatattgctttcttactgtctctgtcctctgggcttcctggtagacctcagggtgtactcacaggacaagaaaagcacttccccctaagctgtcctgtagagtagatctaggaagtggggaagggatccagtgtggttgtggacagattgaaacagagctagctggtgagtcggtgggcaagtccaaacttgtcttaggggcctgaatcaaccctcagctggaaagtggaaaaggcgatgttccaggagttaagagtcatggtcactgtgatttacacagagatactttcagagactccaaactggtgttctatttctcttgtttttgtttctctgacctactattaacctctttgacaagtcagacaaaccttaatttagctccagctcctgttgcataattgttgaccctttggtaaattacttaaagagtcttacttcagttttctccttagtgtaatcaggataattgtggataccttacagactacctgtgagaattaaatgagatgatacatagaaaggcctataaaatgtattcaataaacacatgctcccatcccttcagggttccagagggagtacctgtgatgcagcatatactctgctgccctcattgaggcacctgcaaaatcaggctggaattccttgctggctggatgtgcttgggggtttcttatattaaatcacatatctcagaggcctcctattaagtacttgttccttggacaggctaactctggagtggcctacttctggaacttcatgggactttgccttgtcctctctttttttggcagagggtgggtgtcatccaactaactattcctttgtattcccctggtga

SEQ ID NO: 34709 - DNA, 1054 bp, Homo sapiens
cggtttctctctgatattgaacgacttccaaatgtcaagcgaaatgctacatcacaaggataaccgtatgtgaaaagaaccgtttttctttgtaatcctaaactttctagtctgagctttaaaagccattatttgaagaaaagcgcacaggctccagctggccgccaaaggggtcctttgcatcacaggctaaggacctacttctttggcagagaccagggacggggatgggagggaaaggaggtagagtcaggtgtcacttcctccgcccgctcccgcagctggttggtcggccgagtggcagagggtggggcggaagagcagatggggacgggaaaggcgctgtcggtgacatcacagatagggcgattcctatgcagaggaggcagctcaggggctgctgcttcgccaggaaagatttctcgtgctgtgggagctagtccaggacttccggttggacgtgatagtcccagctgtgtgtcagggctaggaggacttgaggcggcatgggggcggggtgggggaatgcgcggggcaagtgaccgtgcgtgtaaggggtgaggcgtatggagctgtggcagggcggaggtgcgttcattcatacttatgtaacaggagaaaatacggccatgaagttggtgttttccgggggcggtttttccattgtactcagtatgtgctgactgactcctgttacttccacatgtggggaaactggactgtaatttgtggtggtggggaattgcgttcgcgctttcttctggaggttgtagtgtaaaaagcagtttgtctaccaagtgatactttcagcttttacaaatgctgaacaatatccgtggtgtgttttcatgtcacctcctctcccttctttgttagaaaaaaatggaagagcacgtggatgttttgagatgagaagaggtgcgttcaccaccttcacctccgtgtaggcttgttattaagggaaagggaacaaaggagtctcacttatgtaagatgaccttacatgagaagaagaaattcgagttggtgaaaagaaagaaattcaatttcagcc

SEQ ID NO: 34710 - DNA, 735 bp, Homo sapiens
cccagctactctggaggctgaagtgggagaatggcatgaatacaggaggcggaggttgcagtgagcggagatcgcgccactgcactccaaccttggcgacagagcgagactctgtctcaaaaaagaaaagttacgtgaatgtggtctctcttaaaatatcttaatgttttttgtctgtggttgaccccagataactgaaaccatggaaagtgaaactgtggataaagagggactactgtaactagcatatggtacaagggcagcaagtgttgaactgaaatacttagattatgcaactgactcaagggttcaacacaaactgtcctgctaaaaagttatgatcagggcaaagtcagcatttagggcaataaaatagttaatgatttacctggttatgtttccaagaagcctctttctgctgttcactctcgtgtgctgcagcctctacaaattgcacacattgtttggcatcagccagttggcgctctttctgtcgtaccaccctctggagcttctgtatttcaagttggctgcagaataaagcactctgaagatcaagcagagctacctgttgctgagctggagaagtaccctctgagctctgaaaagagagtagaaatcacaatcacaaggagggcaagcactgagctcccacaaagactaaaaataaaatcaagactgcaaccaaaatggcacatccccaactgaagtctctcctgtcctacgtgaccctca

SEQ ID NO: 34711 - DNA, 3176 bp, Homo sapiens
aaaagttctagtgccagaaatgagattaaatgtcttctttttataggaaaaaagtgaagtaggaatctttacctttttgttttaaaaggtatacaattttgataatgggaaagtcaacagattttacaaaaaggattgtgaaaatcaaattatctgagtgcaaatcacgtttactaaatgagacagagcaaaaggtgcagcaaaaatggggtcatgactaattttctcaagtccagaatatttctaacctccacctagaccgaaatcacgtgaagccagaggccagctagctataatcagaaaggcactatgtagccgttttgtatacctggacccggagcggcaaataatcttcacagagatcatcccacagctcctgcaggtctgaaagctccaagggataactcacaggtgtcttgtaaaggggtttcaaagacctgttaaggaaaccggaactaactccatctgtcatgctagggccaggcttggctccaggtaggctggatttcactggaatcggaagcctgctccctcgggggctctggatgggcttataatcaagacctttaatcatgctaagagctaattccagcttgtgattacacccatgctgcggagcctgatcatctgaacaacagtcacactttccaagttcctttgcacttctctcagtctcctcatctttctgttgtggagggctagcctggacgcttgcatccaaagattccacagaggaaccaggcgtctcttcctccatgctttctccatctgggggtacctttgtgcttgctaagtcgggtggcccaacctcagacaacgctggttcttcagtgcaaatgctggtcgaccacctgctagaagggccgcaggagatacttctggccacctttcgaggtaccttacaaatggcttcatagtcagaatcagcaacccgcaaagcggcacaaccacggcatctcctgggtcggtttccagggccttctgaaccatggcagctgtgtggctcctggatctgatcctcattctccacccagcactcaaaccctgaataggcgaagtcctcctggagcagtgcagagtatctcgcatcgggtaagacggacatgtcaaccgtcccattccccgccttgatctccgcgccagagtcatcgttattcttccgatacatactggcaatgcagaacttgaggcgatccttctccagtagcagcttttgcaagcgctcaatagaaagcgcttcaatccgggcaataactgtgtcgaatcgatagattcgatcaagcatgaaagcacacttgctgcaagcgaactcggctttgccatcgcgggggacatccttgcccaagacgtgcgaaagcagaacctggagattgagcttggacgccgtgtggaagatccagcgccgctggtttccacacagctctcgggcacagatcctgcaaatctccttcatcttccctcctagcgggtggcaagcttcccgaggcggcggcggcggcggctactgggtgaccactcaatggctcttcgccgcgctctgtctcccgcctcggtggtctccggtcagcatggcacagcccagtggggtccccactctgcaggggcgcgcccctgccccgcgcgccgactccgggtaccagagccgtcagccccgcccctcgggcagggggcgggcgtggaaacgcctaagaggatgctgagtgacagaggcgcaggccgcgctccgaccctgccatgtctctccccagctgtctctcccgccagccgccgcgtcctcaacgtcctccccttttagcagactgggctcccggagcagcagcggccggccgcgcagacgcaaagcctcggggatggaggatcagatttcaagatggcgccagcggcttcgcgtctgcggcctccacaaggctcttctgggagctgtagtccggtcagcgggcttccggctctgcgcatgcgaggtagccagcgcgaccctcgccccaaatccggttgcacacctggctcacggcgagtgcggagcagaaagcactactggcgcgggccacagccagccgctttcatctgctaagacctcacctgaaagtcgcaccagtgccctcaaggatcctcccgcctctgcaggatgtcgaggctcctcctcgcggggaggagaaagacgaatcccctccctgcattctcggacagtgccacgtcctccggctgccagcggggcagcgccgctaggtaccgctgcgcgccgcccccgcttcccgccagcagcctcacctttcccggccccgccccgcctgggttctaagggcctgaggctgcgaggcaggcgagggaaggcttggtaacggaggggcggggccgtgcaacccttacctcgactctgaacaggaatgtccagaaaagagtagaggagtgtttctcccttgatgtgggtgggggagggttagtacccgtgggtgacttgcccttctttagataaaaaagcacagagcagtcacctgagaaagagtccggcacatacaatgtgaatctggttaaccaagatcttgaagatagtagaagagaaatgggcttttttaaggatgcagccagccgcgagtagattaccaccattgaagtccctttccctcaggtagagggcagtcattattttaggacaggggacggtagacaaacactagcgcaaaagacagtgcttctttccgtaagagctggagtgtctgggaatgcagctcgcgccagaaaggactgggaacttcactgacttcggtgaaaaccatgtcttactcagcattgtacagtgataggtcctccacccttgggtccaaaacttagattgcacacaaagaggagggaagctggagccctgactaggtagaatgctggtacctccggccatttttaataaggaattatcttcctggcttgagaggcattcagacacgtaacaagaggaacaacctcagcaatcacttgcagtcccctagagcaggacatttcccagttctaatcatgctaaatttttactaacttgaccttgtaagctaaggccagcaacatctaagtttttctgaacctcatccccaggacagagtccatactcctaagcctgaagacatccaaatgccatctctgagagttcataataagcccccaaacttcttattgaagactaaatgaga

SEQ ID NO: 34712 - DNA, 2667 bp, Homo sapiens
ttcatactaggcttccagagaaccatttaaaaatagtttggctaatgtaatcttgtctgtctcttatgttcctcctttcccatcatacacatttcttaaagttcgtgtaagtaaaacataggagaaaaaaacatagccactaattaaataaggcatccaagtgtaaaagaagagcaaactctgctacatataagaagacaagcattaattctggcaacagcagccacacagccactttagacaataacctgagcaggtgcatgctttctagtatgtgtctccagctatgcaggatagaaatcacaatcctttctatttatctaacgtctaatacactaaaacatgtttacccatgggggagaagagcacgacaggaattgatgactctaatttaggaaactaaggttcacagaagttaagtgacttggccaagatcatgtagctagaaaaggcaggttaagaattcaggtttccttagagttcaaaacttttatcacaacatttttgataaccccccaagatactcatccttctctaatagccttcctttggttcaagtccagcttcctaaatcctaccgcctgatggagttcctgagcttccttgtaagtctgcaggtatattgttcctcatcatgttgcccaaagcctaaagaaatcaggctaggaccaaagaaaatcagtcaatgagccaaaaagaaatttaatcaacccagcctttcttatttattttctttgaatgaacatttgtatctgagaatgccaaggtaaatttgatgcaatagggacacttggattatattatgttatttacacacaagcaaacaaaaattgagaattgagacaaataggacaaatggtcccaagtccactattgaggaaaaagaaactgatttggaataaaaaatagtccagcatgaatgtgtcagtaattaagacttatctggataagtttgccgtctctcaatttgtcacaataatggcaaatatttattgagagcttactatgtgataggcattatgctgagttcagctaattgactcatttcatcctcctctagaccctataagataggtgttattactgcccttgctttagctcagagaaattatggtatttttcccaacacaaatagtaagtagaaaaatcaagatttcaccccaggtctcgccaatttatagctcttagccgttatgcccagcaataacagaatagtaaaaacaaggacaatttggtaggcaagtaaaatcagtaggctgtttaccatagctatagaagtatgctatgcataaacctcaaagattgcgcaggaaaagtatcatccaatctcaaagatgagaaaaccaaagaagtttcaatctcagagaagtcaggcagcttaagggtcataaaacaacgcaacacaactctctcaactcatatctaagggctaagtccactttaaccttccaatatcattacatcatatttaaacattgactctatctggtcaaggacgacaacattttatttctcctgacccttttgctatcagatctggccttgtcagtttttcaatttcattcttagaatggaaacttaattcacacaagttgaacaagtagtcatcagggggcaaaacccagtggatgatggttttgtgtgctgtttggagactgggtgtttaccacacagcagtggatttcataaattccagggtcagacaagattccagtagcgacacacttgactaatatgagaaaatgcaggattaggcaatcaacaatgaggaagtcagccaagttgccacccaaaaattacttaccacagcagctgcagtccagaaatgctaacaagccagtctccctaggagtgggccatactcagctgtggaccactcacaacattttctcactttattttgcttcagagtcagtgtactgcaatgatttctcctttgcttgctttatatgtttaaaattgtcttccctaaaagctgaacttaaaattaatgtttgctaccaaaagggggtagcagtgcctagtcatgtaggcatatgtcccactctgtcggtacagagggtaagcagcctcttcctttttaaaaaatttattacgatgatttacaaaaattgaagcttacaggataaacactcaacaaaaaagtagccagtctcaagaaaccaatttttatgtatgaattaatattattttattaatccatggccaggatgattcttaagattatttcttaattctctgaacagcttaaaagagagaaactccttcttttttatttacttgctttgaggttgatactcttaggtttttaacataactctctagctttgacaactcctcttataatttaaaatccttatagcttccatttacaagtaaggattatatctattttagtctcctcaatcagctacctaggagaagacttgccacttggaaagagaaagatagcacccactctccagttctcttctcccaaagttgcccgtatttcccttccctgaagccaatcaaatactttattgtttctcgctaagagtaatttttcactcttaagtacaaacagctcaacaaaaattcccggtagcataaatatgcacatcaataaaataattactactcacaatagactttccattacatatgtttcacaagcattggttttct

SEQ ID NO: 34713 - DNA, 1147 bp, Homo sapiens
agtgtggtgccctgatctctttccttctccattcctcccccaagtgggctccaactggaggttgtggagatgagtgctgctgggctctgctcactcagtccctttgcctttgtgtgagtagtgacagatgaggctgagaaggaaaacgtggcagggtgagaataaacctgatattgttcaaagcatctgacatcaaacatatctctcaagaagacctactggaatccctctagccacacgaacaaggaaacgacagagaaccatttctacagaaagttccaggcggcctccctgggtatttttaacatcaggactcggtggaggggagagtcattaagcaagggaaaccccgtaaaacagaacatgtgaaaatgaccaagagaggtgggctgggaaccaggcagggcgaggctacagaaaagggaagctgtcacgggaccctggtggtgaggggcgacctctctctccctaagggcgctgggggaggggagggaggaggaccaccaagtctggagcgcggcgagaaggaaacagcccacctacctcgtccaggtctgctccattttccaggctctttccttagtctcaggacgctcctcacccgggaggggaagcagcctgggaaaatgagaagccttgcccacgaatctccagcgcaaaaggcagcagctttttcctccccagctcctttctgcgtcggcggcgaagagagagctctgctccctgcttttttagaaaatggatttgacgtggccgaacctgcggctagccgtgcgacccgcacaagggagggactgttctcagtaggaggctggactcagagcggcgcggcgcccggggctgtttcgtgagctggagccagcggctgcccgggcggcggtgcgcgcactctccaggctgagacacgactggctggcacgagttgctcggcaccagctgagctgtcaaccgcgagcggaggcggggctcccgacaaccagtgtgctggggcagaatcggcccaggttacacgccccctgaaccaccctcgcgtctccccgacccctctctcgctggctcagatgaatgatgacggcagagggcagagagcttagaggacgcggtaccaagccccgtccctcgcccatcccaacgaaggtcttagaat

SEQ ID NO: 34714 - DNA, 642 bp, Homo sapiens
ttcctgggataaaaggactttctaattttattatcttagcctcaaaagcactagaaattctccttttattttttttcttatttaatttgtaaataattggatagttatattttagttctatatctagctagtatacaaataatgtaacaccatctcattttgctttacgtttcttagaatactagctagtaaggtcttatttcatatcctttcttggaaaccacatgtgtagtagccagtctcatgaaatccttgtgttgagtcactgtattagtcatctttttgctgaaacaatgctgctcaacaaagaactccccaatctcagtattatacaacacacatccatttctccctcaaggatctatagtttaggtatggattggtttaagtctgtcattttcatggcagagtgcaggagtgcaagagagttggcagagactcatgatgactggtctctgctcagaactggcacagtctcgcttctgccattttccgttcaccaaagtaagtaacatggccaagtccaaagtcattggtgcagaaaagtacagtctgcccacagagtgcaggaggggagagtaatatttgtggaacaataatgcaatccaccagtcactgtatgtgctgctttcttgctttttg

SEQ ID NO: 34715 - DNA, 1439 bp, Homo sapiens
atagaatatatgacatagaaaacagaaaaaaataaatatgaaaatagcctaattttcagggttttcctttttttacatacccttcatggttaacggttagtggttaatggggattacccattaactcccaccctccttcccagctctctcccaagacttagtttcaggaactagaaaattctgattcagcttgggtgcaatggccgctcaaagggcgaggcttattcgaagcctcaaattcagaaaacccagccagaccttggaagttaagaaggtggaaggcagatcgcggaaccagtgttctgatagttgtggttctctgagggaagccaattctggggaccggtagtggaaagctcttgcgctgtttccggccacctcagcgggaagcggagacgcaagcagctggatctccggtaactgagacatagggtataactgttgtcgcggcggaggaagtgaggacggcgccaagggccttccgggccagtgttggatccctgtagtttgtgaagatggtgttgctaacaatgatcgcccgagtggcggacgggctcccgctggccgcctcgatgcaggaggacgaacaggtgagctgcttactcacgacccgcgaccccaagtctctgtcagcgcgctttgccctcagcatcggattccttcctaggaccgggagacctttgtgacttcccgggcactcccgacctctctgaagtgcgcttttatcttttggtgtaggagagactaccggcgaagaggaaatctttcctgaaggaggagttaagttttttgtgttagctgtttctctttagaaaaacgctctggagaagtggtagctttggttgattgtgatcacccagtgttctttgactctttagggactttgttaaaattcaggatttctaattttctgctgctaataggactgctgatggataaatcctgggaaaaaatcagccaagttcttcaagtctataacgtggcacctgatccttgacctagcttgctgacatcttttgaaagtgggtgaggtaatattgccacataaaagcacctgttaaatttcagtacatcacattctttcaggattatccccagttcccaccttctccaatacgccgtaccacattcctgcaatacattgtaacttatttttttctttgtctttcaataacttgagtttcctagcgggcaaacgacgggtcttaatcatctctttgttatccataccttttacaatagctgctttatgctagtaggtgctcaaaagtatactgaattgattaaaaacagcactaactccagatgtcttaaaagaaagatgttttgtgttttagaaacacagtggaaatttctgaagtaagacaagtttctggagcaagcttgggaggttctgaagacaaagctgagaatggaatttatataatttgtttaaagtg

SEQ ID NO: 34716 - DNA, 2201 bp, Homo sapiens
ttaaatatatatttaatatatattaaatatatttccatataacataagtatatgtttcatatatttatattaaagtaggcaaacatatttggataattaaatatttttatataatttcatatatttttttgagacagagtcttgttctgttgcccaggctggagtgcaatggcacgatcttggctcactgcaacctccatctcctgggttcaagcgatcttcccaccttatcctcctgagtagctggggctacaggcatgtgccaccacgcctggctaatttttgtattttcttagtagagatggggttttgccatgttgttccggctggtcacaaactccagggctcaagcaatccactcacttcagcttcccaaagtgctgggattacaggcatgagccacaacacccagccctttatataattttaaaagtgtaggtaattaggtaaaattaggttaaaagtatatgtatatttacctgatatttaaatattacctaagtgtttaatgtggacatgtaagctctttaaagatagtgcttatgtattttatatctgtttcacatactccttatatatcccccacagaaatggtcacaaataggttccttaataagtatttttgaattcagccatgctatatattcattagtaagtgagttttcttttattatgaactacaaactttaacctttttttgagtagtgagcagttattcatttaccttcacactctttaaataccaaattttgagtgagtgagtgtgtaaggttttgtcatacagacttgcaattcctatatgggataaagtagactagcacaggaatttttcttgtatcactcatgcaagactctaaattccttaaaggcagggatcatgtatattttgatcactgttgtatcctcagcacttcacatggtgcctgtcacataaatatttgttaaatgacttctccaagcaatagctttgtctttatgttatcctgtatttcaaaacgttcatatataaattctctcaactatgacttgtttcatagggtctaataattgttcctctgctgagttattctcagcagatttagattcatttagcaaatgtttattgagcactaactatataccaggccctgttctgggcattcaggatatagcagcaaacacaataatttaaaatccctgtccagtgaagtgtatattcttgtaggctctgtaaaaagatgccctgtgcattgtcatggttatttctcagtccctgactcttcttccgtcactagatgtttttcttactcatgtgatcagttgctaattcagacgtggctgtcatgcctgtgttattaagtaacgccatgtttcccaatcaaaaccagtctctattaagcaactccaaatattccaaaagcattctttaaggaagaaacagccggattgcaaaatagttttttctgaaatttcaagaagtgaaaagtttgatcagaatttattatgtcaaatggagagtttgtgtttattattaaaatatgccctatattttaatatggtctagcttgtgtctatctggctatttctctaagtgtttagttaactgttataagaagataacaacattacaaatgtccttgggggtgaaaaaacttgccagaaaatactaaaaagcttaatttacttgcgtttttttttgtagtacttattgtattttagttacaactttcctatgtctattgaaatataaatcctgatagctttaacttcatagtagtctctactatgtggagaatcttagaaatgttagcagtcatcattgaagtatagcttaagactgtgtttggttaattgaattttctggttatctgagtttgttttacatggattatcattatcgtttttcaaaatataagagaatatgattcagaccattagaagattatgaagataataattattaacatgtaataattattataatttatcatgtgcaggcattgttgctcactttacaggcaatctcatgtacatacaactttatgacatagttactgttattatccccaattatagatgaagaaactaggttttaaataggttacatgacttgaccaatgtcacataacttgtacaggtgatatctgaaccaaagagtctgaggccagaacctgcacttctaaccaccttactatatagcctcaaaaattcagacataatct

SEQ ID NO: 34717 - DNA, 1420 bp, Homo sapiens
tgtcttttaggatagttggatacatatatatatatatatatatatatatatatatatgcggaatgctacatcacaagaataagaatgtgaaaagaaccagtttcttttgtaatcctaaacgttctagtctgagaattaaaagccattgttcgaagaagggtgcccagggtccagctggtcgccgaaagcttgctccgcaatacaggctaaggaccagcttctttggaagagaacagatgagggaagcaggagagaaaaaaggaagaggcagacgtcacttccccttgccggctccggcagcgggttggtcggctgagcggcagaaaggcagacggggactgggaaaggcactgtcggtgacatcacggatagggcgacttctatgtagatgagccagcgcaggggctgctgcttcgccacatgctgcttcgccacgaaggagttcccgtgccgtgggagcgggttcaggaccgctggtcggacctgagtgtcccagctgtgtgtcagggctaggagggctggggggagggggggtgtgcgcggggcaagtgaccgtgcgtgtaaagggtgaagcgtgtgaggctgccggcggggcggagagtgcaataactcatacttacctggcaggagagataccctggtcacgaaggtggtttttccagagcgagtcttatccattgcactccggatctgctgacccctgcagtttccccaaatgtgggaaacttgactgtataatttgtggcagtggtagactgcattcgcgctttcccctgtatttttgtcgttttaaaaataggttttgtttgctgcagaaacgcatactgggcgtcagcgtaagctgagaatcaggtctttgttcccatctgtaacttcactgaaactaaaaatttgggacatcgtggttctcacgtttgtaatcccagcaatctatgaggtacgtcgataggttatgtttatgttaatatcgctcgacctcaggcgtgtgtgggcaaatatagtgaacccgtctctactaatctcttatctttttttgttgttgttctatagaaataaaactaagcttttcttttccctatgggattaacagcaaacagtccgctggagtgtatggcgcgatctcgccttactgcaacctctgcctcctgcgttcaagctattctccttcctcaaccagagaatactcagcctcccgagtaactggcattacaggctcaggcaaccaaaaaattaggtccggctaattttttgaatttttagtagagacatggtttcaccgggccgggcgcactggctcgcgcctgtaatcccagcactttgggaggcggaagcgggtggatcatgaggtcaggaggtcaagaccatcctggctaacacagtgaaaccccatctctaataaaaatacaaaaaaaaaaaaatt

SEQ ID NO: 34718 - DNA, 1203 bp, Homo sapiens
ggttgaaagaatgggcagaagtgaaaatcgtggtcagacaaccgggcgccacatttcgggccttgttgttaaaattcaacccctgacctcaccacttgcgctgtctataaattccagacattgtataaaaacgcattatgaaactcccttttctgttctgtttcgttctgattaccggtgcatgcagcccccagtcacgtacccctcgcttgctcaatcgatcatgacctctccctccacccacagcccctttagagttgtgagcctttaaaagggacaggaattacttattcggggagctccgtttctaggacgtgagtcggccgacgctcccaactgaataaagctcttaccttccacaatccggtgtctgagggattttgtctacgacctctcctgctacagtttcaaactcctgacctcaagtgatccgcctccctcggctttgcaaagtgctgggattacaggcgtgaaccaccgcgcccggcccttgttgtttactgtttccctatagtctttttttttttttttttttttttttgagacggagtctcgctctgttgcccaggctggagtgcagtggcacaatctcggttcactgcaacctctgcctcctaggttcaagcgattcttctgccttagcctcccaagtagctgggactacaggcatacaccactatggccagctaatttttgtatttttagtagagacggggtttcaccatattggccaggctggtctcgaactcctgacctcgtgatccgcccgcctcgggctccgaaagtgcagggattacaggagtgagccactgcgcccggcctactgttttccatagtcgtttctgagaaagaaaaagtaacccttttctgctctcagctagagctggtctgataaacacctaggccatgatgttctccggttcaaactaaaaatttcacaacaccaatatcagacaaagctaccctctcaccaagatgaaagaaagactatttcacaatcatatttgagcacaaacagaacactgttcaaaccataatatgatcaaacattcccctttcccagctactaatagtgactgttaattcttttattttttatttttttgagacggagtcttgctctgtcgccaggctggagtgcagtggcgtgatctcggctcactgcagcctctgcctcccgggttcaagcgattctcctgtctc

SEQ ID NO: 34719 - DNA, 1728 bp, Homo sapiens
gaggcaggagaattgcttgaacccgggaggcgggggttgcagtgagccgagatcgcgccactgcactccagcctgggcgacagagcaagactctgtctcaaaaaaaaaaaaaaaaaaaaaaattctgacattgtggggaggcgtctcaagctggtcgcgaactcctgggctccagggattctcccgcctccgagacttcccaaagctgctgggattacgtaatggcgcgagccaccacgtcggcctggagctattgttattcaccgaatctgtggactgcacttccgcggggatgccttaagcgaaggcagaattacaagcatgtgtcactcttttaaaagtgttaattaaaaaaaaaaaaaaccgccaccccagcaagttagaaccacctgccgtgactcggattcgaaccgaggttgctgcggccacaacgcagagtactaaccactatacgatcacggcgagccactaaccaggcggcgcgctacagctggatttaatgcctcttgaaataggaatggctatttcgtgctacttttatttggccagtccctgacgtccgcatcaatcaattccaaactttttcactctgcaaccttgaagctccgacacctgaatcagtttcttagactctaaatccctcgatgccagcgatagcaccacccgctccgctgggcggcggcgggccaaggtcctgactagagggcagaaagcgtcagctgcaacccgggaccacgccgcctctcgcctctctcctctcacctctctgcctccatttccctcttccccctccaaggaatcaagctgcttcgcccagggatgagaggggcagcctcgaaggatttttcaaattacatctgcagcctgtaccacggaattgaggtttctcttcccagaatggtggaaccggaagaaaaacggagctagtgagctggggaggggatgagagccccgtcttaatttcttgcttccctcacaggtacaagaagcgctgtgtactctctggcattgtgggagcttgtgctgacttcctcatcttgactcataaatatatcagagccacctctgccgattcagaaaaacaaatccaaccagcctctatttcagacacttccttagacccctaggagagttattgttaacttccctagacccctaggagagttattgtttggacgccagcggccgaacccatcagacgggctaggcgcgcacgtgcagttaccaaaatacagatgtttactgtgggagggacagaccatactggtgcagacctaggacacaaaagtggtcaaaactcttttcctgtgttccctactttgctcggtttccaggcctactcagtctaaaaagctgaagagaaaaactgacactgcgttggccgggaatcgaacccgggtcaactgcttggaaggcagctatgctcaccactataccaccaacgcatctgaaatacacttgattcctttagagtatcagaactaaataatcaggtttgtcttcccgtttatttctaggctaagcaatttagactgcaggaaaaacctacaagaggaaaattaaaaggaagctctctggaatttctcctattaaaaattctgtagtagtatcttgtttcacagctttaagaaaagtcaattctagtttcctggacatttattccacacatgcgcaaaattacatatgtacaagaccgtatatgacagcatttttttttccaaagagcaa

SEQ ID NO: 34720 - DNA, 3054 bp, Homo sapiens
gcttttttcgtccttctgaaatactctgcaaagataggagaggggctatgaactacctctgctatggatcttattcaaagtcagctacctcctagatactatctgtagaacctaaatgtaatattcagcatagcagggatgaacatggtaaatgaaaggtatccaattgcccactgtaatttttaaaggccaggagctcaacattattgaaaatgctggagggctgcctggagtaggcagtgaccacagagtcacacaagctggaattggatatccaacttgtctgtcatatttctctcctccctccctgacttggcactcaatactccatattctttctaatcctctaaccctccccactcccccaactcccacaccctacccccaccaacgttcctggaattttggacttagctatttttaaaaccgtcaactcagtagccacctccctccctgctcagctgtccagtactctggccagccatatactcccccttccccccataccaaaccttctctggttccctgacctcagtgagacagcagccggcctggggacctgggggagacacggaggaccccctggctggagctgacccacagagtagggaatcatggctggagaattggatagcagagtaatgtttgacctctggaaacagtaagtcaaaatgaaattgcaattcctttaataagcttttatattgaagttagacttttataaaattacaaacacctacttggatgtctctcgtccaaatgctgggatctctccctaccaaggtgccccaatctccatttctctttctgtcttatttctttctggcctctggcctctagctttttgaagtttaattctctgtctctcctctggcagtcttagccctctctttaccttattacctcaagactcctgatgaagttttagaaggagttccctacgtcctctattctgtagttttcttaccaaggccaaatatgacctcagatgatgagtcactgatacccttctatcctgcccccacttagcaatgcccttcacattgagattccaagcatgggggctgctccctgtaaatgatttctccccacaactctagtccctccattctattctccctcttgcaggactcttcccccaatcatatccttacccataagataggggagttaggcaggagggatttagcccctctccaactcctgtcatcataaaagactgagaacttcagaatttgaaaagaagagattaatggaaggagtgatatttgggaaaatacaagaactgttgacttagaaaaaacaaatattgatttgcatgtttggtttgcatcccattattccatgagagagggagattaaaattgcagctctctagagctgatgaaaagagattggtttccttttcatttgaatactgatattctagacgggatgggtatgccacccttaatccttcttgtgttctgacacaaaggaggaaaagaaatgtatgactcctagagggcatctcctcctaatggagagggacaaataagaagtatgtttctgaaatattttcaggtcctaattttactagggtacccactaggattactggtatctgatctagccccatgattcctccatctttgacatacctgctgtttggtagctcagaatggagcaatacagtggactctgcccccttgagttcactcaaccttccctccacccccacctaggggtattgcacaagggccctaaaagtggccacaggaacagggcaaagaggcttaactgccacacttatagtttgaggaactccaatctccccaaattccagtctgttcatccttttcttgatctccccagattcactccacattatccttaccaatcttcaattcttctctctctccatgtccagccaaatttcttttttcagtcacttacagggcttccggtcaaaattcactaggtaggagggtcatcagctgggaagaaccggcgcctgggaaacctggctggataggtatgggggagccaggccagtcccctagtcccaggtcctcccatggcagtcccccaactctaagcactctcactctcctgctgctcctctgtggacatggtaaggaagggccagggaagggtttggggaaatctagagggtaggctgctatgtaggggtgggcatgtgagcctgaatgagtgaggagagataggcgctgagagtcccgatcactcgccctgctctcaaatactaatattttatttcccgttcagtctggggaaggccactggggaagcccttggtcgacaggcagaagagatgtggcaggcttacacacttttagtaagacagccgagagaactagggactagggggttgggggctggggaaggcccttagttaggttttaggaaggctggaaacccctgatgagatttggaagagttatgagcaaactacactccgatagagcagaggtctgaggaccgtctcacaatcctctcccttctgtctttagctcattctcaatgcaagatcctccgctgcaatgctgagtacgtatcgtccactctgagccttagaggtgggggttcatcaggagcacttcgaggaggaggaggaggaggccggggtggaggggtgggctctggcggcctctgtcgagccctccgctcctatgcgctctgcactcggcgcaccgcccgcacctgccgcggggacctcgccttccattcggcggtacatggcatcgaagacctgatgatccagcacaactgctcccgccagggccctacagcccctcccccgccccggggccccgcccttccaggcgcgggctccggcctccctgccccggacccttgtgactatgaaggccggttttcccggctgcatggtcgtcccccggggttcttgcattgcgcttccttcggggacccccatgtgcgcagcttccaccatcactttcacacatgccgtgtccaaggagcttggcctctactggataatgacttcctctttgtccaagccaccagctcccccatggcgttgggggccaa

SEQ ID NO: 34721 - DNA, 738 bp, Homo sapiens
ggaaaatgggtaagggtaaaagggaagtttacagagtagaggtgagagaagtgattaaaaggaccaagaaagggctttgttctgcattaagaactatgagtcttcatgttctaaatgtttgtcaggccagaggttaaagaaaagagaaatgcaatcagtgtcttgtctctgactggcaacaaagtgctgagggcacttccctccctgaaactgctggctttattctgtcacctgcagtaaagcaaacaaacaacaatcaccacttggtttcctgttggcactgggactgaagagggtagagaaggggcagataaagatgatccaacttgcaaaactctttgactgtgccctactttgctgttcctccttggcccaccccttttcccaaacctcacaagtgtttttataccctgattttaggacaagagtttacaaaatttctttcttcttagacccaagaactgggaaaggagaatcggggcaggtttttatcagaataccaggttacaaggtgaaaggtcgtaaacaaccgtgtccaggaggactccacttcagaacatgccttggctacaggcctggtaggcagcagctgctgccaaagctaaataattttttggcatttaaaggaacccaggcataacacagagcaacgtagtctgtagtgagctctgcaaatgggaagatacaaggaaaccagagcccagaagagaaacttagaacgagagaattgtcatagga

SEQ ID NO: 34722 - DNA, 2042 bp, Homo sapiens
agatttatggatgtacatttgatttagtgagttggaagaggggatggagacaagaaagagtgaacataactggaaaaaagtgaaaagagtgaagcatcctttttttcccgcttttccttttcctccagaagcaggtaggaagtgggagataatgagcgcctggacacacctcactaaagaggtaatgaggtaaatggggaacacagacaaagtgttccccaactttgcaggtagaaattgaagagatgacaggataagcaacaggatgtaaacacgcccctcctatttccgttccacagaacagagagaacagaagagagggtacaagctgggggtgggtgacgaacagcacaggcacgcagcccccagccctagccccaagggattggaacgggaaggagaagacatcggtcctacacacacaatgaggcctgaaagttctcctttccctcagagacggtggtgttttttatacttaatagggatgcggggcaagagaaggacaaagggctgttcctgaacagtaacaccaagcattctgcgctccacagccccaaacctgaaagtattcttggagctatgggattttcacacacttgctatttatgagccaggaataacgacaggctctaaagtaactgcactggctaagactaggcatgaaattccctcataagcacattttccttttacctcaaaacaccgctctcagaccagaaacgtccacacccgccctccgatggcctgtcgccctggctaggttttagggtcagtgggatcctccttccactggacccgggagaagacgctcaacagccccctccttcccctccttcctctccttcctctccttcccccctccctgcgccgctccagagcgcaacaaccattttcccagccaggagcacaccgtgtccacgcgccacagcgatctcactgattggtcgggctcctggtaaacaaggaccgggcagccaatgggagggatgtgcacgagggcagcacgagcctccgggccagcgctcgcgtggctcttctggcccgggctactatatagagacgtttccgcctcctgcttgaaactaacccctctttttctccaaaggagtgcttgtggagatcggatcttttctccagcaattgggggaaagaaggctttttctctgacttcgcttagtgtaaccagcggcgtatattttttaggcgccttttcgaaaacctagtagttaatattcatttgtttaaatcttattttatttttaagctcaaactgcttaagaataccttaattccttaaagtgaaataattttttgcaaaggggtttcctcgatttggagctttttttttcttccaccgtcatttctaactcttaaaaccaactcagttccatcatggtgatgttcaagaagatcaagtcttttgaggtggtctttaacgaccctgaaaaggtgtacggcagtggcgagaaggtggctggccgggtgatagtggaggtgtgtgaagttactcgtgtcaaagccgttaggatcctggcttgcggagtggctaaagtgctttggatgcagggatcccagcagtgcaaacagacttcggagtacctgcgctatgaagacacgcttcttctggaagaccagccaacaggtaagcggcccaattcattgttggagggtgaaagctgattagagaagagaattgaatacacaaaacctgtacgaaatgttttaagttgctcagtttgagtggtttgaattacgtgttgttgcttccttttttctgttttaatttgcagacattctcctccccccccaaaaaaaagggtgatttgtacaattttttatggtgctgtgtcctaaaggggatcctgaggggcgttgcctcgggtagttaaagtcttatgtgtgcataagttgcttattctttgtctacttcctatttgagatgttagtagagaactgtcctgggtgaatctttcagtattgcagggcttggcaacttgctgcccgacaaaatacatcagaatttctctttaagaacaatatgg

SEQ ID NO: 34723 - DNA, 823 bp, Homo sapiens
cacacttccagtgtgcttcacaagcctgtggattaaaccctgtaaccttctaaaaattatttgaactttcttaacttttcagtacacaactccaaagaaaagcttcccaccatttggagtgataaactgaggaacagagagtgctggatatacaatgtgatgccacaggtcttccagactttttctttcaaggtattgcattccatttgatttttctgtggggtggactagactgaggagcacaaaggtcaatggaggtgagtccacggatgaggcccagtttagcctatttaggctattcttgttctgtcccgacctttccctttgcttgacccttccctactctctgctgggcctgttatgtaaggagaaaagaatgaacagactttgactatcaattgattggtcatctccaggcaacagagtgatgggagaaagaagacagggaaaacaaaggtacaggattgtgaattccatgtgccctgagtcctgagatgttaggcaacgtccattctcagtccttgttgggctatgaagttgctgacaatcaaagttaatcaaatggtcagtaaacaggttcttggaaatgtctggctaggttcccagcttggatatttttaacctcctggacagatggatagaacaaggatttcagctgctgagaggggaggaggtattcaggggcataagaactgtgcttcctttttttttttttttttttttttttttttttttaagagatgagtcgcactctgtcaccaggctggagtgcaatggcgcaatctcggctcactgcacctctgcctcccgggttcaagtgatt

SEQ ID NO: 34724 - DNA, 517 bp, Homo sapiens
gctcattgctataatcccagcactttgagaggctggagcgggcagatcactcgagccctaggagtttgagaccagtctggacaacagggcaaaacctcgtctttacaaaaaatacaaaaattagccaggcatggtggcatgcacccgtggtcactgggtgatccttccctactgggaaggattgcttgagccggggaggttgatgctgcaatgttatgattgcaccacttgcactccaacctgggtggcagagtaaagactctgtctcaaacaaacgaaaaacaaacaaaaaggagaaaaaacgaaaaaaataaacatattgatgaggctatgtcaaagggacataagagccaactgaaaaagttcccaatggccaaagctgaaacaatttgaggaacaaaataaataaagcagtattagattataaccccaaagtataagataaatatctgtgagtccatagtgatataaataaatgactgaatttatttatatgggggaaaaaagacaaatctct

SEQ ID NO: 34725 - DNA, 1549 bp, Homo sapiens
agaaacgttaaagagagacagtgcactaagtgtcctaataaaggtatatacaaaacgctatcgtagacgggggaacaattcattttgcaagaaaggcggcccaggaaaactacaggtagcatttcagctagtcttcatagataacaggagtttgtcaggctcttgggataatattaatagattagggggaagttgatgctatagcaaagacagatacaagaggctgtctcgttttctgctttaatgtctctccccatgcgcgatagaaaactgccattctctagtatacaatcaatacagaaatggaagcccaggggagaaacggtagggagccagaagggggctgatccaacaacctgacggaaagcgttgtctatttcgcagcctggccggggtgaacaagtttggcaagtgtcggaccgaaccaggtcaagccttacctgctgcccctccccaaagcggagcccaagccgcgaccaacttgaaatgtactgggcttcctcaagtcggtggcgttctaagcccgcctcccggagctccctattggtgagttttctcggccaatgcaggagaagccgaggagggaagtccgccctcttgaagcctaggaagagaaggagggagggagcgagtacgcccggaaccgaagcttgcgaagcgggtcgcagagagagatgggcgttgcagaatcagctggggtcacttatttccggtctcactccagatgaaggagccactagccggcgagagttcaccgagggaacgtgacactcatatctcatcgagggaccgtgttgagggagcccctacagagaggccaaaggaggagagggcctacggagaaatgaacctctgtaaaagctgctctttagggatcagtctttttgtgactctagcttcatagcttggtctctccattactccagccttcctttcaatcatacactgcctctctccagcaccaccaatggatacttcttttctaaaaatgtttttctgtgggttgctgccgtgtctgtgagaaggtgggcagagggttcaagaaaggaaggatttgggatcagcgtaccagggttggggagacagggcaggagcccagctttttctgcattttccactactttccacttcctgcgagctccttgggaaagccagcagagtggaaggaggagtcctattttcacagaaagcagaaacaagggagaaaggttcagaatggagatgaaatctaggagttagtcaagaagaacatcccagatgtcagagaaaatggcctgtagactgggaggctgtaggtgtagtggcaagcgcccagtctttgccataggacagaaacatagctgtgaagctttggagagcttgcttaaccttattaagtctgtttcctcatctgtaacaagaagatgatagttcctatcttataaagttgtgaggattgaaaatagtgtatgtaaagcacatggcacatagttgacacgtgtccaagaaataactagtaaaaatgggtagcttcctgcaaatatttctctctctctcccatccccgggaa

SEQ ID NO: 34726 - DNA, 930 bp, Homo sapiens
cgagacccttgccacactgctggacgcctgcaaggccaagggtacggaggtcatcatcatcaccaccgatacctcgccctcaggcaccaagaagacccggcagtatctcaattctccaccatccccaggggtggaggaccctgctcccgcctctcctagcccggggttctgcacgtcgccttcggaaatccaactgcagaccgctggaggaggagggcgtgggatgttatcccctcgcgcccaggaagaagaggagaagcgggacgtatttgaattccctcttcctaagccccccgatgacccatccccttccgagccgctccccaaaccaccacgccatcccccaaaaccactcaaaaggctcaactccgagccctggggcctagtggcccctcctcaaccagtcccacccactgaagggagaccggggatcgagcgcttgactgccgaattcaatggcctgaccctgaccggtcgaccccgtctttcccgacgtcacagcaccgaaggccctgaggacccgcccccatgggcggagaaagtgactagcgggggtcctctctctcgccgaaacacagcaccagaagctcaggagtctggtcccccttcagggctgaggcagaaactgagccgcatggagccagtggagctggacacccctggacacctttgccctgactcgcctgagtccagccgcctgtccctggagcgccgccgatacagcgcctccccgttgaccctccctccagccggctcggctccctctccgcgccagtcccaggagagtctgccaggggcagtatctccgctaagcggaaggaggcggagtccggggctgctggagcggaggggctcggggacgttgctcctggaccacatctcgcaaacgcggccgggtttcctaccccctctcaacgtcagtccccaccc

SEQ ID NO: 34727 - DNA, 1508 bp, Homo sapiens
ccacaggactcccaaagacgcgccgaagctctgcgtctgcctttcagaggatacgctttttctctttgcaattggttctgagaatccccaccctcctcaataatttgcctatggcggagcaggagccctccagctcccgccccatcactggtgattggcatgggacctagctcgtccccgcccccacttgactgaaggttcggccctggcaccgccctgagtccccaggcgctagctgactggggtggttgggaccgttagctcggcaggctggcaggctccggggcgctactccattggcggccgggatggagactatgcgagcgcagcggctgcagcctggtgtgggcaccagcgggaggggcactctccgagcgctgcggcccggagtgactggggccgcggctgccaccgccacaccccctgcgggccccccgcctgccccgccgcctcccgcaccgcccccgccgccgctgctcctgtctggggccccaggactacccctgccccccggcgccgccggcagcccggcagtgctgcgagaggccgtggaggccgtggtgaggagcttcgccaagcacacgcagggctatggccgaggtgagtctgcgggtctggcctcctgcgcgacaccctctgtaagggagccttgctcccacagtcctccggatcgcttttcctggcgtggagccctcacatgcatttccttttggggagtttccttctgggctacgcacacgcacagacgcacacactcatacacacgtttaagcctcctacctcctcccctttactgagttattaatatattctccagggactctttttcagatacaatcctcttttcttcctaagcttttctcctttagaaatggaattcctcctccagcttaataccttaacatctctctgcctttgagaaccagtcctcattgtgtgggatcctgtcttttatttcagatccaatttctcatccataccctctcagtctttcctctgtgatctctgcaattcctggactcacctgttaatttgctccagccccttaaccttgactgttaaattctttacttacttaccttcactctgaaatttcagtgcaacttcagatttactggggaactaggtagtgccttcacaagtcactcatagtaattgtgtatttaaatccggacctgtaccactgaactcacagcagcttcctgtggctcagtaccttactttggtatcttttttagtatggagactcacaactccagcctttctgtctggctgtgttttcctggcccttgcccaggaactgaggataaatcccaggccttggctctttcaatgttaaattctgtggaaatgtgccaggttagaaactctatttcagttagaaaacttcgttaatttctggaaagagggatgtgagggttttctttgttgttttcgtttaactagggtagtttcctgtctgagtttgagttccagatttatagtgtaagtaataaggaatatatagt

SEQ ID NO: 34728 - DNA, 1975 bp, Homo sapiens
gtaaccaactgatttttaaaatgatcacagtacctactgtggagaatgaattagtgtctcctaatcgctttttaaattttatttttcgttttactcttattcactttttttttttttttttgagacagagtctcgctcttgtcccccagactggagtgcagtggcaagatctcggctcgctgcaacctccgtctcccgggttcaactgattctcctgcctcagcctcctaggtagctgggattacaggtgcactccaccacgcccagctaatcagcttccgtttctcgggttcaagcgattctcctgcctcagcctccctagtagctgggattacaggcagggagttttatatttaaaaaaaaaattgatatctgtctcaccaaccgtattgcaaccaagtctgttagtttcctgaagagaaatttggtgctgcaggttccagaagcagctctttatgccctcactgctgatcaaactattttttaaaaacgctcctatcatacaccacgctgcctaaagacaaggtacaggcctgggatttttgaaagaaaagggtttcttcaattaccatttcccagtttgggatgaagagacgtaaagaagccctctaataaggaaattacgccgggcctcactgttaatagtacagtatttatcagcagctgccgcggttaagaggaagccacggccccctgtagtctgtacctcctaagatggatgatttagcttgcgatctgttcaagatggccacagaaacacttccggtatctttccgcactaggcccgccccaatttgcgtgtttttaccgtgcagagggagggatttagagttagcctttgattggtcagcttgactggcgacctttcccctctgcgacagtttcccgaggtacctagtgtctgagcggcacagacgagatctcgatcgaaggcgagatggcggacgtgctagatcttcacgaggctgggggcgaagatttcgccatggatgaggatggggacggtgaggacagtggagacggctggtgggaagcggggaaggtgcgagagaaggctataataggaaaatttactcttttttcctcggtcgtaaggatgggaatcgaggaaccgggtcttgggtggattagagattccgcccccttcaggagaagggagggcgtgaccgggaaggcactaagactggaggcggtgtgggtcggcttgctggtagtgtattgggaaagagacgattgttacaaatgactgtcatagttacttattcttttatcttctggggttccagagagcattcacaaactgaaagaaaaagcgaagaaacggaagggtcgcggctttggctccggtgagtgtggggaaaatggggtagagtggcctagtagggcaggagctacgggttttggagtccccacccacctcataggaacaatgggagaaaggaggagttttcggtgatctcgtgtatgtcccttatagaagaggggtcccgagcgcggatgcgtgaggattatgacagcgtggagcaggatggcgatgaacccggaccacaacgctgtgagtaataatggaacctgtgaggtatccgtgtctgtggtagtagttagaaaccaataaaatagttaaacgcagtaggaatgggttcagagatagcttaaacaatctgagtccgcactcactctattcctgtgagcctgcttaaagtgtctctcatgtactcatacaacttccccccgtcccccaacagctgttgaaggctggattctctttgtaactggagtccatgaggaagccaccgaagaagacatacacgacaaattcgcagaatatggggaaattaaaaacattcatctcaacctcgacaggcgaacaggatatctgaaggtatcctaagtgacactttattgcctcctttctttcataagccttaggtagcattcgtagttctgtgtttgctgtggttggccaagagcaaag

SEQ ID NO: 34729 - DNA, 2300 bp, Homo sapiens
gaggcttactccctgagaattaatggctaatggcccccaagcgcaccctttaactcatgctatggacccaaatccctgtcctgcccggtcctgagtcctaggtcactcacctgggggaaggcaagcaggaaactaagtccccaggctgcccccagaagtttccttacacctgaacgggatccaagcgggttgagtactgctgcctggcggtccaatccaatgaccacaggcaggaaagctgcagaatacgtggccattagtttcaggaacatcagtgtccgacatgcgatgtccacagccagccattgaacagtgatattccaggtggcatctaggggcataaccacaaaagtgactagtaagtcggcggctgctaaatggatgaagagtctcctgaccggagaggggcggagctggctgggttcccgccgtgtcactgaccacaggactgccaggttccctccagccgaagaaacaaacagcacaatggtcactcccactcggaccttggctgctgccgagaaggtgggcagctctgagccctccacctccactcctgatccagcccagacctcctcccccgctgctgaccccaaggggtgccgttgcctgcagacatggtggcctggagagaaactgaggaggatgaagtgtgggtatgaagcggttagctttggccactgattcttcgccctccttttcaggatctggagctgattattgcgaatttcgttcactaaagcctctgcttctggagactctccatctgttctggaggaggtcacttgttcaactgtcaaggttctgcagggaacgaagatctggtaccaatcacgctcctttttccttggacagaccagcctgggcttcaggcctctactgacctagacctctttagcccctacagccctggattcagtcggggcctgcgtgcatgtgtatttgtgaggttctgccaggcgcacacctatgccggcggcctccaagacgtggagatcactgcggcgctttctcgccccgccccggcccctgcaggccccgcccttggtcatgaatatttaaagaagaaggtgccgctggaggcgtgctagggagtaggggtcgtctgataaggggaagctgtgacgcagacacgcacagtaatacacagatggaggctcaaaagacacgagtttcgcgtcctgaaattccgcttccagggccaagctttcttttctgatactgtttgtccctcgcgaggcaccgttgggtcgcgcagtaggcgtgactaggggcgggaagtggggcgggagcagggccgcggagcctgggctgcggctgtcatggacgcctgggtccgcttcagtgctcagagccaagcccgggagcggctgtgtaggtgcggcccgaataggaatgggggtggggcgggggagggatggacagaggaagactctagtgaggcgaagtcagtttaggctacaggggggtcaagaagggtcaactccggctacgggggcccgaacggaccgtgaggcgcagatttgagccgctgttgagatgattcctttccgttcgcggaagagatggggaaactgaggcatgagtgggccagcggggaggccgctcagggttgctgtgtccacataagaccgacagtgtcctcactgggcggtgatggaatgaggagcattcgccccacggtggatagccccagactctgcccccagagctgaggaggcactcccagtttccgtgtccccacaccgtgctgccattcgggaactcccctgcctccgccctggcgtttggtctccattcagctagagggccttgaaatctctcagttcacctattctgaggaataaaatgccctccaactgtctgcctccccctcatcgatcacgtacatgctcacgctgatgtgcttgtgatggacccctgcggcctgcactggccccttcaggcctcatcattgtcaaatctctaatttgctcaacattcagtagtgctccccacccctttctagactcttttttctccttatgcctttcccttcctctggcctggagaaatggtgagatatgggcatggaggaggaaggggagtgttctcaaactgggaaagggggaagtctgtctgtgccttttggaagatagttttgagcggaaggttagggaggtctccaccttaccttgcctgccctctcctctagggccgcccagtatgcttgctctcttcttggccatgcgctgcagaggcatggagccagtcctgagttacagaaacagattcgacaactggagagccacctgagcctt

SEQ ID NO: 34730 - DNA, 2035 bp, Homo sapiens
tctccttgtcttctgcctgtggaaggtaagcactgctttagtggggagtgtggagcatgatgcccatgagttgagggatccttgattatagcagagagaacaggatttgtgctgggcagctaaccaggctgtggatgtcatgcccagatctccttcactgtaccccacaaatgttggttaaattattctaagccaaataaaataaatttgaattccatttttggaaacagaacaaaagtgaagacctcagataagtctgagagctactggcaaggttcccagtctaggcatttggcagtgacgcttatcttttcttctacagcttggcttctttgcccataagaaaatccctgaggaagaaaaaagagaagagaagttggagcaatgaatgtagaataagggtctagaaagtcctccctggcagcttcttcaagagacttgcataaaagcagaggtttgggggctcagatgggacaagaagccgcctctggactatctccccagaccagcagcctgacttgacttttgagtcctagggatgctgctggctagagatgaggctttacctcagacaagaagagctggcaccaaaactagccatgctcccaccctctgcttccctcctcctcgtgatcctggttccatagccaacactggggcttttgtttggggtccttttatccccaggaatcaataatttttttgcctaggtgcctgactcctttcagattccctctttatcttccctcacagtttggaaaggatgagggttatcttcctcgattcttccaccctctcactttcctgcctgttccccactccacaggagggagctgacgttggcttgaaaggagtaaagtcaacatctgctgctttcctgtggactctggtgattcatagagccggatggggagagtcaacaggaaaaaaggagggaggaggaaaagccacaagagacattctgtacaattccaaggaacagagaagcctttagacaggcaactgccatcccccctgaaacctgagacctgtagtgcactcgaccgccctcaggtgttggtgaaacagagctgcccccaggctcgctgggcataggcttcctgattccaagccttttctgggagcaaagccagggcctggtgcctgattttctgaagccaggagccctcaggtggctggagctggaatagcagggaggactgggtgtacctaggcagtattttctctacttctctcaagtcttatactcactcttgagccctccttggggcctgcttagaaagcagacaggagagagagtactgctacttgatgatgggaaatgctttcactttaccagctttgggaagcagcagccccatgggatctaaaagtgtggagtctgcattaagaaacctacatgggtggcatggggctctggggagcaagcccttacttgctcagcactggttatgtagcacaaatagctcctaggaaaatgtttctggggcaaccctagaaccctggtcatattttgcagggtttctctggtggaatcagtttgccagcccttgcttgatgcttactggaaatctccaggttaatttctatctctgatccctccccaacccactccatatttgggtcatggacagtaaaggcagttggattctcatagacaactgggtaacttatatttctttgtaatcaagacttgagatatcgaagtcagttattggtctccagagtgcagctctgggagccttttgaagaatcagcactcattaagagctgagaagagagaagacctgattgggtggttgactagcagtcacagaacctgtcctcccaggctgttcctgaggcctgaccacagtatttattttggcatgtctctggccttctgcagaggcccaccctcatgggcattgtctctgtttcccagtggggtggacagtatatcagatggtcagaacaaataaagttcagtgtcaaatgacttttggctctatatgtattccctaggatatagactgctcagtaatagtgagaggta

SEQ ID NO: 34731 - DNA, 1573 bp, Homo sapiens
ccactcacaccaggagttaatctctccaacgtcgagctctgagtccctccctctctcgcccgagctccgccccccttccctcttggcggtcctggcgggcttcccctggagggggcggccccagcccgagcgctaggcggggcggagctccggcccgggcggagccgcggccgccgcgtccggctgctggaccgaacttctgccgtgcggacagcaggagcagcgccgagccccattcccccacctctccagctcgccctctgagcctcccgagccctctctccatttcccacaattgtgctggtaagtcccgctccccgcaccaaacttttttttgctgccgagtttgagtcctacgatcggaccacgagctgcactgtagttggtgtatgggggaggaggagagggtgaattactgaatgccgactccacggcttccctaagacggatcagcgctcgcccatttcccgagttggaagacctctcgattttagttgattaaacttatgcagagatggagatgagggtttgcgctccaacttcgctaccccctcccccatttctctgagctctagcagttcccgatactttccctccatctttcaagtatctttggctccctaaaagcttgtcccctcccaactctgccgtggcaaagcccccctccaccaggcacttcgggcccgcctcctccccgttgccctagggaccccgcgatcttgggggccatacactccctccggggctacgcgtcctgccaaccggccgcagacgtgtagctgctgggtcggctgtggagggaggggctcaggctggggcttgtccgaagccaggcgggcggggccgggaaggggaggtatagggggccggactgggcggagcaggcggcatttgcggccggcgccagggtggagagttgtgcgccggtccctgggcctgagctccggctccggctggggcgcctgcgatgtctcaagatggcggagctgggcgaattaaaggtaccggccccctccccccatccccatctggactcagcccggcggtacgccgtgtccgggaagcgaccgagactgggtgccggggctcgggtgggcgccgacgacgtggcaggcacgagctgctgaggatgggagagaagtagctgagagcgaggaaggggctgcggcggggctccgggggcggggctgcggggcagatgtaggggtggggccgaggggaattgcagctgttgggggctgaggcgcagggggcggggacgaggggtagaagtcggatttagtagtaggggcggttgttggggtagggccagggggaaaaggtgctgtagaggcactgggggcgagtcgatcaaggccaagagatgcaacagtagggggcacatgcagggatgggaccgcggggcagacgtaggggaggctccgggggaaaggcagctgagaggatagggtctttggggtactctcgggatccgagctttgggaaataccagtaggctgctgagatgcagggggcggggctgtgcgggccgatacctcgaggggtggggcagaagcatcctggaggctcagag

SEQ ID NO: 34732 - DNA, 1401 bp, Homo sapiens
aaagttctcgaagccctccgtccagcagctgggagtcagagaagacacatcagaggggccagtgcctgactcttccaagtccttttgcttgcccctccctcagcccacacccaagatggtcccaggcatgggtctcttggctcaggttggatcagctgactggttacctcctcctcaagttccacgtgcccacctgcaacaacagtggggccagtaggtgaatggtggtggtcttggccagggagcccccactcactgttgacactcctctcccctccagtggacacagagggagttgcagtcccttgtgactatgaacatgccacattttggggcccactttatccttctgagactgggaaaaacattgttgcggggaaagggcaaatttcttctctgtacttggggccttgtccccagaatactcacccgggggtacccagaggttgggggaaacgctcagggtgcgtgcccttcgggttagcaagacagtcttgtcgctggactgcagaatgacggccacacccaggtccacacctcgatctgtgggcagctcagccccagggaccctgggccgctcctccagggccgcaaaagggcagaaagggggtcgctggcagaaggaagccagctgggttaaggcttcagaagggcggcactgggtgggcgtgacttccaaaaatggggctacaccgcgcgttgggggcggggtcctcgccgccagttcccacccgatttcagtccccatctttggcccttcactgcccccgctctggggcccccttctgccgacctggagcggaagcctagcggaggcgcctgggaagggcctgctcgagaggacaagccgtcctcgcttcaagctgcagtgaatgggccacgtcccgagccctggtccggctcccaggaggccacacacactccgtgcgaagctcaccgactccggacgccgggacaggagcagctgcacccgcacctcggccataacgcgactctggagtcgctgcggcccgcctggcgccctctggtggcctagagaagcttccccacggaacgttccgcggggtcgtagcggggtttccgaaagtccccggggaaataagggcacatcttttgaggatgacccatgggtataatattaaaccacaaagaagaatacctctaaatgctcagctcctattccttcctatcttctctgtttaggacaatgacccccagaccgactgacttcaggacccacatgttacttccaaccagccctaagctgaactgtaagcatcctctacagcactatgcacacctgttacagcaggcatcacttcgaattaattatctccaagcgaaacacaccaaataacattttcgataccacttctcctttcacttcactcaaatggcaac

SEQ ID NO: 34733 - DNA, 1659 bp, Homo sapiens
ctccaaaacaaaaaaaaccaaaaaaaattactcataatatattaagtgacagaagcaagctgaaaaaatataaaaattcaattattgtaaaaaaaaaggaaaaatgtatgcataggaaaagactatgcatcaaatttatctctatgggattatgcgtgattctgattttccttaaagattgggagatgattttgcggtctgtcacagaccttagtttctacacttccctgcttggaagaattaaggtcactgttcacagctcggtgggagtgaacaggcagtgttattctcagtccataaaggaaatgataatttcgaaaaagaaatttaggaggtaaaggactgcttctcaacagggtgtgtcaaacaggagatgaggttacgttgtttgcaggacagtattcaattcttaaacttctactccttgacaaagttgacacaatcagaaacggacgtagttaattttatgattacttccttattacaaattgctaccaaacattgtttacttatttcttccaattcctaagaagccaagtctttgcctccccgtccccaccccgcctcagtatcaccagagacctatttcgtccatccacatatctttggagaagcattcccagatcctttgccatcctcggaaagggcttccaaggcgcttggctcctagctctacacttcctttacacaggttcccgtttcggacgtggtctcttggtccagtcagtgccgccacgttcagacagcattttccactaacctcagggtcagcgcaatccgggggctccaactccaattcggctgagcttcccgcgacggcttcctacggctcccgctggccttctaggccgaggtggagcccaccgccctttctaggacgcggatcgccaccgaagaagacgcggaaaagcaaaaagcgcgtgccactctaccccagagtttcggcggcttccggggacgctctttctttcttctcgctggaagactggaggaccagcgaggggctgtttgtggagccggcgggcgggccgtttgtctctccttcctgcgcctctttggtgctgggaggcgggccgcagggtagctgttggcgccgccgcgtttctgggcctggccaactcacgtgaccgacgcgggctctgaagcggtgggccgcaccgaggcggcggcggcggcgacgactgcagctcgggaggtagcggcctggcgagggacgggccggctgccctctcggacggccgcggcggagggcaaaaatggcggaggcttcggcggccggggcggactcgggcgccgctgtagccgcccaccggtttttctgccacttttgcaagggcgaggtcagccccaaactaccggtaagagcgctgtgttctctatacttgggaacctcatagattcctggccccgatttcccggaactgggtctggagctttctgcacatcattgactcgcccgacatcggtctgccgaatacctgctgcccacttctaagccgccggccctaaaccctgggcatcacggcctcggccccgtacctcctgcccacctcttaattcatcctgggctgctccacctgacctcacctctttacctcccgtgtccttaatttttttttttcttagcaagtttccctctgataactctcccctcaattt

SEQ ID NO: 34734 - DNA, 4950 bp, Homo sapiens
ggatacatagccactcaatgtagttttttatggtatgtggtagttcaattagctgtttatttagcatagatgtacaagtacttttgggcttgttatacatttggagtgatttttacaaaagcgtttttctgaaattaatgcaggtattaaatggtttcttatcagggaataaggcttgagaatggttgcataaagagtggcattagctttgctttttcacttttggtttcagactaactagggtgtgtttgtttcctcagtgagctcagcacaatgcctggattggtattgtaatcctacaaatgaaaactatttgtagtagtttgtgaacttaccattggggtgagtgtttgtatgtttgtgtgcttaagtgtgtctcttgaagtaaaagtggtatccagcagttcctgtgattctttccatcccctcttcccggatgtgttaacttgttttctttgttctttgcaaatttcatggggacaatgggatttaatatttctctccactcttcagggtctttgggaatagatagttattttatcattttcacatgtgattaattcaacaacttttgagtgtcaatataggatattgacattgcaggattttaaaaggtgatagtactgtgtaatgtctgacacttaaacactctacatgtatttgaggcattaataaattgcagtctttgccttctgaatttatattaatgaaggagggaaatgggttgaaatggatgtggcaaatcctagatatttataatacaaggtaggttttagaatcaaagtgagagtgcagaagggtgtggaagagtcttatttggttggtgagttcagaagggcttgatggaggaggtagcatttgagatgggtcctgaaaggtgggtagggggagaaatatttattgaatccttttataatgttttaaatacagtaccaggccccttacattactacatttaatcattcctaagaaatattaactattgtagcctcaaatgttgtgttcatctggtggttgaatggttttttagtgaaacattttgttttgttagcgttcttgaggataaatatttgtcttttgataggtcaaatccgaattgcattgctgcctgtgggtcctccttccttctctatggtggcttctccaatttttcactggatttagccttgaaaaccacttgattttgtggtttatgatacttttcatagattaattcacatgccagttattcataatttcctttaataggtgttgtgttgggatgagttatttttccttattgggctttgttctcattatgccattctatatttagcttctgggaggggagcttgttcctgggaatagaatcaccactcattccttttctctttagttttttaggtggtggcggcagtcggatagacaataccacaacaacacattttgcagaggtaagttttcctttagctgtaggaattctttaagaagtggttaggtgttaaaatcatggcagatactaactttccagtgtggcacaacatcagagtttaactgaatgtataagaaaaaatgtgggccgtagtaacccttgggaagatttgtgttttcagtagctggggcttgggcgtgttacctttgataaacccttgattaggagaaagtaatagcctcaaactgtattcttttaaactggtagtgtttttaattcttgttttctactttgttattgtatatacagtgtgagaataagaagcttttgctgtttttgaaataacagtgttgcagactctgctttagtggtgtgacaaccaggtaaagtgcaggccaggataagttgtcgaagtcacaatgaaatagtcttcaaccttgtacagaggtactgatttccagggcttacctctagtcaacacagtagtttggtgtagattaaggatgtttacttgcctttcagatcccaagatggggtctgtaaataatttctatatcttcttataatgtggcgtccatattttttgggaaaaacaaatcttaactgtgatttgaaaacagggcattagtcttcattcttgaataccattttatattgaatccagagtaattttcttttttcacttcgtccattggcctaaagtctctttagttgtgttttttttttttaaaaaaagaaaccattgtaactgttcttaagtgtataattcagtggcattaatactctttgtttttaatcatttagagactacaacccagaaggtaccagtcagcctataaaaaacactgacgtttttcttttgcttgtttgtatgtgtaccctatattgccgtacaacttgttcagctctagaaagctgacagatgctaaaaggaagaaataagttaaatcccataatcaggatttctttatgttttaggatcacattagccttttccagagatagccgaagtgcctagagagatagcaaaatatttcactgttttgtatgtaaattgaaattgtactagtagtatatttgaaaagtgatatttaataagaagcctgtaaaaccctaagcttctctcccttattatttgaaaattattttaagacctgtagcccccacattttgatgttgttagatttatcaacattgtctgggtaatggtcctgttctatttagggtggtttttctgcttatggtctgtgctacttcttaatatacagtattaagagttttggttaactctgaactgcccgggttgattagagtgattccagacagatcgtgttttgaacttgcatttttattttcccattttaatggattgaaaaacattatttaatatgtgttctgggccaggcacagtggctcacgcctgtaatcgcaacactttgggaggccgaggtgagcagatcacctgaggtctggagttcgagaccagcctagccaacatggtgaaaccccatctctactaaaaatacaataaattagctgggcatggtggcatgagcctgtaatcctagctacatggtaggctgagacacgagaatcgcttgaacccgggaggcagaggttgaagtgagtcgagatcgcactactgcactccagcctgggtgacagagcgagactccatctcaaaaaagtaaaatacaataaaatgtattctgtttgccagtcctggaagcctttatgatttcagtattctttcctcttgtgtgtgctatttgtgataacacagattgtcacttactgattaggcatatgcagaagaagaaatttcatttgatttttctttagtgttctcttttaggtaatggaaatagatcggtctgccaattttgtaggtatgactcaccagaaagagatgcattgagtaagaagaaaaacaaatatatgtagtcagtttcctaactttagtaatgctaaatccaacactgatggcatgagttatccttcaggtgttaaagtatttttgctgattcatagcttgtaacttcgtgttctttagatgttgccagggatttttaataaattagctaagaagtgtgtgtgtgtgtgtttttaagagatggggccttattgcccaggctggactcgaacttctgagcttaagtgatcctcccacctcaggttccctagtagctgggattacaggcaggtgtcactgtgcctggctgaaagtatatactgaatgtttcatacatagcactctcctagaaataggggcaggaagtaaatgtcatggttgccttgcctgaaaggaacttaattttgttgtggagcaagtgcaaacacttaagaaaacaaggaaggctgggcgtggtggcttacgcttgtaatcccagcactttgggaggccgaggcaggtggatcacgggaggttgggagttcaagaccagcctggccaacatggtgaaaccccatctctactaaaaaatacaaaaaattagccaggcatggtggtgggcgcctgtaattccagctacttgggaggctgaggcaggagaattgcttgaacccagaaggcggaggttgcagtgagcggagattgcaccactggactccagcctgggcaataagagtgaaactcttatctccaaaaaaaaaaaaaaaaaggaaaagtgtacagagtataataaatttattctggggtatatgtaacaagtatagtagaaggaagagttaaggtgggccagggtcttgaggagaggtcatataacagtgattaagaacacagcctctggaaccagattgcctgagctcaaatcctgtgtctgccacttattggctgtgtaatctgggcaaagttacttagaatctctcagtgcctctcttgtccttgtctgtaaattgggaaataatcatccttccctcatagggatgttacgaggattaaatgagttaatacatgctaggtgtgtagaccgcaatgtgcctaccatctagtgagtgcttgatacattttagccattattaagacttcatagtgaagttagaacttgcactggagccttgaagagtaggtggaatttagataagcaaagatgtgaaaattatctcaaaatagtattcataagctataaggttttatgctcatgtccctgaagaaaaaacttagaaataaaattatatatagaaactaaagttgtttttcttttccctgctttagttggtaatttcggcaaagacttatgctcagttttgctctatttttctttagctggagctgcttgtacaatgaagtggttattttctataagtaacatttactgatagctgaattcttaaaatactgtctatattagaagaggcttattccaagaaaatttctgtcaaaatcagtattgacttttttttaaaaaaatgagactggggtaggagataagagactaatgggatagagagaaggtaggggagggttgccagttacatgggagcagtgtttgaataatgtgtgagggccggtggagagtgaatctgaaaatattgctagc

SEQ ID NO: 34735 - DNA, 849 bp, Homo sapiens
tctgcctaggaaaaccagagacctttgttcacttatctgctgaccttccctccactattgtcctatgaccctgccaaatctccctctgcgagaaacacccaagaatgatcaattaaaaaaaaaaaaaagaaaaagagtactttgtatttgtatttaagaaatcagatgtcagagattagcctttgtgggattattagtgtgttcctcacaccaacttaataagtttccctgaaatgaggtccattttctttgactttttcattggcatgagtaaaacttttttactaacacagagacagggaactctcacattgttcattcattctgcaaatatttattcagtgtccctaaagtatgtgctttatcctctaatctgcagcttttgaatgatagttaattaggtcttgaatagactagctcatcttatctgactttaagtgcatctgacctgtgccagcagattaatttataaatttataactgagggtattctgtttcagtgactataaaactcatttgtttgttagcatactcttgtctttgaatttctcaagtatcaagaaatcaaaagcaatcagatggttgtttagtacatatagaatcagcaaggaaattgcatgatctttaagagaaattccatccagattgtgataaatgctaaggaattactcatatttcacttcaaataatttttttttaattttttttttttttattgatcattcttgggtgtttctcgcagagggggatttggcagggtcataggacaatagtggagggaaggtcagcagataagcaagtgaacaaaggtctctggttttcctaggcagagggccctgcggccttcca

SEQ ID NO: 34736 - DNA, 1218 bp, Homo sapiens
tggtggcattaggagtatttgagcactcacctgtgaatagaatggagaaaaaatggccctgaaggcggatacctgacttctggcttctggcacaacactggtaggtcccactgtgcaacggtgtgacttggcttatggtgaacatcaactgagatgatatttcaccaacaccatctatcccaggatcccttttaagtctcagctgttttaaactggtctcaggagaacagtctccagacctgtccttgcacaaaaacactacaaacccctcagcctcttctttcttatgccatacagtacagattaagtttagtcgcgttccttcctgggaagctgagctggtgatgttaatgcatcctggaatggaaagggaagaattacccagaggtcaggtagcattctgtgaatttcaccgtaactgctccttatcactagaagtcttcaaggaaggactgaagcagaacctggcagtagtgctggcagacaggaaatacaaattccagctctatcgatggctgtgtgactgtaagcaagttacctaactccttgggcagtagtttattcatctggaaaatgaaaattaagggactaaataatatgctcaaagcatccattaattcataggtttatttgttcctccacttaacaaatatgtttaggtattcactctgccaagccctgctggggctgtgaggactaggacgtgagccctactgtcagaacttttttttcccctaaccattagatgaccggggatttttaatttaaaaaatttttttttaaaacaaggtcttgctgtgtcacccaggctggagggcagtggcacaatcgtaactcactgcacctttgaactcctgggctcaagcaatcctcctgcttccgccttccgaatagctaacactacaggtatgcaccactatgcctggctaattttttattttgtagagacagattctcactatgttgtccaggctagtcttgaactctaggcatcaagcaaccctcctgcctctgcctcccaaactgctgggattacaggcatgaaccactgtgcctggccactctcagagtttaaagcctaatgtaaaaacaaattagcaaaaagttacaatttaattccacagttattataattgaggaatcttagagattcctgagtctgaagcatcagggaaacttcacagtgaagttagtgctggagctgacttgaaggatgag

SEQ ID NO: 34737 - DNA, 1465 bp, Homo sapiens
ctcacagccgctcatccattcacgaacagctgttaacacaagaacgactgtactaagtaataaggtcataaagtgtcaaggggcagcacaggagaaattctggatgagggatgtggaaaggctgcaagatggcaatgaagttaggccttcatagttgtttgtgggctctggggagctggtgactaaagaatacggtgggtgaattaaggtggggaatgggctgaggagatctggcttccagtcctggctccgcactaggtagctgtggaatgttgacaaggtcgtgtcccttctctaggcgtgtttcctaagggactggtgcagcgggatgggaggggcgcagggtagggaccgcttccaaggagagagaggacaggcgggaggggctgatgcagctggtcactccgctggagtggccagacttcgcggtgcctagggccgagttgaagaagagcatgtaagtctgttgtgggcccctcaccagcgctggggggcagcgaggtcactgggcaaggatgctctgggaagtgaccttggtgcccgggaggggagcaccctgttgtgatgcaggcggggcagcgcggagccggcggcgctgatttcgcactctggccgctagagggcgctgcctttcagccaaagccgagtgaccccctacctgccccgcgttggcccgcgtcactccagccatgggccatccagcgagcatgggggctagccagggaaagtctaaactaggaggggagatgagggggtgcaaagttgggcctggtgggtcctggggacgcagcatgtactagagcggcacctggccctcaacagaggggagagcgggtggtcgtgagaagtctgggaattttccgggcccactacacgccaggggcgggtctcccctcttaaaacgttgtgagccccagcgcgggcaggggggagggtgcccgtggagttggcatcctcatctttgatggtccccggggctcctgagctgcgctggtggccccagggctcggtgcctctctcaggcgacagctcacagacggcgggaaactcttccctcccgcaccttcggaggcggtcctggagtcttgtggactcctgggttcaaatccaagctttgtgtgaccagcacattgctggacctcactcagcctcacattcctcttgtgtttaaaactacctcataggaatgtggtgacggttagatgacacataaagctttgccagaggttttctggggagggtggggacaagagggcaaggaagagtctccatttcctctgccaccggagcccggatctaacctctcagaggagctggaaggtcagctctgagctccacaaatacctctgtatacagatctcccacgacactgaaaaagatgcccagaaagatctcatttgcagctgtgaaggggcttctttttcaatctccacaaccccaactgccttaaagtagaaccagactt

SEQ ID NO: 34738 - DNA, 1031 bp, Homo sapiens
gattacaggcgtgagccaccgcgcctggccagcattacctagttttcctttctactcaggagtctatcaactctctgaagaaagttaatcattctaaagtttctcctttctgggctaaatatccccagctcctgcaattatttcttacaattattttagtgctttcacggttccaatattttgtttgtcctttctcctcttctctgaacagagtccagtttgtcagtctcccttgttagatacatggctcagacctgctacctgcctcggcttagtccaagtctcgtgtgttcactgcagccaaaggtcactttagctttgtagctatttctacatttcactggactgtgttagacttccaggccacgaaggtgccagaggctacacccgcatgtaaagagtagagctcattctcctgtcacatttccccttgttgcttagcatgtgtgagtttggggagtgtgggtgagggagagtaactctgaccttggcccagttcagggcctactgtgatggttggtgagcagccccagtggctgtgagggagcacatttgaggctccaggggctggtgcgaggcccagcttctcccctggagaagggtgaactgacacctagcacagccaacagttttctggaaggaaaccaagcctcagagccagaggcacatacagcaaagctgtgcaggcatctcagcccctgtcccagccactgtcactgctggcctttagcccagggtcgttggtaatagaataatgataaaatatggagagggagtcagggctgggtttttttggttttgctttttttttttttttttttgagacagagtctcgctttgtcacccaggctggagtgcagtggcacaatctcagctcactgcaacctctgcctcccgggttcaagcgattctcctgcctctgcctcctgagtagctgggacaacaggcgcgtgccaccatgcctggctaatttttgtatttttagcagagacggggttttgccatgttagccagtcttgtcttaaactcct

SEQ ID NO: 34739 - DNA, 1170 bp, Homo sapiens
ggccaggctgatcttgaactcccgacctcaggtgatccgcccaccacggcctcccaaagtgctgggattacaggcgtgagccaccgtgcccggccgagggatgtcttttaaatcaagctacagacttgggccactaggctgttcatggttcctgattctttctcactgaccctttacctctgcatgggatggtccccagagggatgaggtcaggctgaggctgtagccttgatatacctgacactttccttgctcttctcctgttccccattctggacctttgggggcccttgagggtctggctttttaaggcagaatccaaactgcccaagaaccactgattgtttctgtatctctcagaaaggggcaaccaaatacccttttaaccaacactccaagagtgccaagaccagaccttggtacatgcaggaacccagaacatggcatgttcttgttctgtgcctttttcttatggtggaaaaggattgtgtattctgacccctcatctgggaaaaggaagaacgagtgaattactactcggatatccttggcagccagcttgcaagtgttaataattcatagctctccaaggatcctcaggcctcccctgtcctgacacttggttactgaaaagaactagaaagttccagtcagcagtcatgtggggccacagtgtgtgctgcagccaagtggcattgccccgtctccagcctgtcacccacactgctatagaacatttatctcagtcttgcatctggactctggcctaataaattcctccaaaggtatgcagagtacacagtcgcctcttaaggtgggatgaggccagagtaacagagagagtggaaagggagactgtcataaatattgactctagacagggagagaaaaccactggagcttaaaattccaggctcagagtaagttaatgagctactaaaaagacaaggtagtaggacatgcatactaggacaatcagacctgaagttggaggaaaaatgtgaggatacccactgagccaggcagactggtatagtagaaagggcattggccacaaaagcaaaagcacagagtttttagccatgtttctgcctgagggggctttggctaagtcacttcacctctctgagtctttgttttataataaagaaaaattgagatgatacaatt

SEQ ID NO: 34740 - DNA, 3233 bp, Homo sapiens
aggtgttctgatcctaaatccagattttcccattctaccttctgctttgaaagatatagaggaggccaggagggcttagccccgaggtggaggaagataagctggtatgaggaagctgctcaatgtcattttaaaccgtttatccatgggctcaggtcatgtctttgttgggggccaagccaaggcccagcaaagacaaatggctcttccagtgtgggtggaagaggggtgaggtcacccagtcctcagcctgtggtttgctttgcctcagtgccgggagcaatctcttgccctgatttgcattgtgggctgaggattcaggtcagtgagaaggccagtgatagaattgtctgtgtgggtgctgctgatagggatcagctgctgatcatggctagggctagcggctgagcacacgggcaccagcctactgctcgggcagcaaggcagcaggatggaggggtttgtaaaaatgccttccacctaccctgctgggcttgcccgagaggctctgagtgtgtgaaggggaagacaattatcgctaggctggagaatagaaagagcaccatcaggtgagaaagagaagaaaaaaagagaggggagagagtggataagaagaaggaagcctgggacacaagaacaagggctttgcttgctctagggctttgcttgctaaactcctagggagcacacaagtgagaatccagggcagagggaagcaggatgggtgccctgagtgcttggccccatttcctggggcttactggcctcgtgggtgggagttttataggctactgctccttggggaggcctcagtgattgaggatactcctgtatgagcctcggccctgaccccaggatgggggactggaggatcctaacaggattgggggttggttgggtgtaaccaaggtatctgccaaagggagagtaccaaggaaagcggaggcacctcctccctggctgtccttcaccccctctcccctccttgttctctgggagtggctggcgagcagcggcctccccgcagggccaggcaggtgggccagagcttttggtttgctgaggtttgtcagattttccagctcagggcccagccagctggcaggaagcaggacagaggtcacttgaattcagaccacatgtccctgttaaatacattagcttttaaatcaatctttgttcaaagtccagtgagttgcaagcctaatgctcacctgcagagacagaattcctgagtgaacgaacagagcagctcctcttccatctccaggtaagaactgctcgtgtcctccttgagggtgctggccaccggggcctgaactaccttctttcttttccttttccctttttctttttccaagccagtagctggctgtctagggcagagaagagtcccatggggaggcagccaggcccctttggcggtggttgggggtgagagatgatccacgctctgagattctttctgctggagatgcccctcacctttgtaggctagggtctgcttcacaaagaaattggtaaaccgacctcagaaaaagccttcccggggttgtgtgggggtttgatgtgcagccaaagggagtgagacaactgacttcacaggtaaccaggcggatatgcccgggaccttcctactgatacaggggccttgggtagcagagaagactcttctggaagcagcctttaaaggatgcagcctaacttagcttgcccactagataataaaagcaggcatctttcctctctgtatcacactgcagcactaagacatgagaaaaaccagtggatttccaggctggctgaattttaaaacatacattccccaggctctcacctttggcatttctaagtctccaggccttgtgtgaattgaaagatctttatttgaaaactctcccagaatcattctgatcagtgcaggtaggtttgggaaccactagtagtttatttcttaagcagaagactcatgagacttaagtatgacacttacctaagggttcactcgctatgaagactcctggtctgggttgggtccagctatgaagatttgggcgttggctctgagaaacacattcttctttatttactaaaatctctgcaatgtgtcaccagggcagctttcagtcttgtatctagaaggcaagagggggtagcagggactgcctcaggccatgattgtccagtcatctgaagtctgcagcaaattactcagggtctttgaatttctgtgttatgatagtaacttgtgcttatctttgacttttgtatgttctctgcaccatagggtgtgaagttgctggtaatgatgtcttatattcatagaccactggctaggcagctacttctcccccaggggaaagaacataggactggaatacaaatcatcagagttttgattcagttgctagtgacaggccattagacaaactacttagccaactggagcctcaatttcattattgatcaagtgaaggtctgtcatcttttccccaagagtgtactgaaaataaaattataagtacaaatgtgtggtcctgcatggtggctcatgcctgtaatcccagcactttgggatgcccaagcgggaggatcacttgaggccaggagttcgagaccagcctgggcaatgaagtgagacccccgtctctacaaaaaataataataaattaatcctgcatggtggcatgtgtctgtggtgtcagctacttgggaggctgaaatggaagggttgcttgagcccagggggtcgaggctacagtgagccgtgattgcatcactgcactccagcctgggtgacagactgagatcctgtctaaaaaacaaaaaaccatgaatatgttaaaaacacgatgtaagatgcctagatttcaaatgtgtatatcgaaagtctctgtagaatagtaagaagaaacaaattgcagtcacttgggaaaccttgtcctagtcttttaatctcattgagcctctgtttgctcacttacaaataagaagttgagaccagatcatcattaatgtctttttcagttggccaagtataaggtagatcctggagccttgaagggtagctccttgtcattggggtatgaattaaaatgtcacctcccaggaaggactttctaaatcagcctcccacctccatgccaccagtatctctatcattcacagcgtgtaccatcagaaatcatctcatttgggctgggtgcagtggctcacatctgtaatcccagcac

SEQ ID NO: 34741 - DNA, 3455 bp, Homo sapiens
cccaaagtgctggaattacaggcgtgagccactgcgcccagtccagaattctttttctttctttcttcttcttcttttttttttttttgagacggaatctcactgttgtcgagctggagtgcactggcacgattttggctcactgcaacctctgccccccaggtccaagcgattccccttccccagcctcccgagtagttgggattacaggtgtgcaccaccatacttggctaatttttgtatttttagtagagacggggtttcaccatgtttgccaggctggtctctaactcctgacctcaggtgatccacccaccttggcatcccaaagtgctgggattacaggcgtgagccaccatgccaggcccagaattccttttcaaaataacacctggaagctcataggagttacacaaagagcactcaggaacagctcccagctcagacttccagctttctgtgcagaggagttggtgagggtggtgctgaggatctcatatatcaatcctgttgatggccgtctggggcctgagagtccttggcctgccttgggctgggaagaagtcccctaggtcccaccagctatttctttcctatggaaaatagaccagtggctttagttctttctactttgccagatccagaggtcataccaccctccttttcattaccaagccttcctaacttctaaagggtatttaatgtttcttcttgaccacggccacattattctctttcctggcagcaataatctaatcattttggaaaaaagcaaaatttaatggtataattagctttttcatcaataaaattggtgaaaaaaaaaatctcattggctctcacccccgagcggttcctgtctgccagccaacactttgttctctttcccacagataaacaactttgttgtcaactattgatttttcccccccgagctcaggaatggttatagctttctttcatctccagtttttttttctttttttgaaacagggtctcattctgttgcccaggctggagtgcagtggtgcgatctcggctcacagcaacctctctgcctccaggttcaagccatcctcccaactaagcctcccgagtagctgggactaaagatgtgtaccaccatgtattttggctgtttgaactggggaacaaagcctgctggatttaatggactccaacttcaaatgattgctgctaatgatattctagaaatccataggccttcatttcttctgtgtctatccaccagaggggtctgatctctagattttttcaggaggcagaagatgaggtggggttaaagaagtaggaaagagtatccttaaatacaaagatccttcctaattaggccctgtgttccagagtcccaggcatccttgtcatggagcaatgacagagtcttgcgaaagagacataccccagctctgaattaggggacagagtaacaccaggatgtggactagacagaacaaggcctggaggtggaccagagcccagctcccttggctcctagatgaatcatctttctgcaagatggcaaaggaaacaaatagttttaggttcccatgtaagaccaggcttttgaggtttaggtctgctttccccattggtgcagctgggggcgttaaatatttaatcagtttggcctgggtacatgcagatcgatggccatagcattaatccattaatggctgtgtggtggggagtacacagtggcagaaggcagttgggggcttgcagcagtagctgtttccccaccagtatggtagcatttcactattggtataaagtggctctaattttctggcttcaaccagacaaaaaagaaactgaccttgaatgcttgagccttcaaagccatagatgcagatctgagcgattaccatctggctgtttgaaaacttcaaacaaaaaagtcaacttgagattctgccaagaaacagtgatttgtgtttctttgtatgtcaggctcacaggtctccagtgagacataggaaaacctttgcctcttcccctctctccaaacacagggctggttctcctagtgaggaggtttcactttctatccttggcctacaaacaaagagattaagagtttgtggttgacactgcagggcgtgagattgttgagtcttgggtgtgagtgccttagaaatgagcattcatatgctgatcacaaacagcctcatctcttgatgaaaacatagtatctgttggccttattctgattataaggacatattttaaattttgtaggatttgaatgaggttctccaataattactcccaactttaagagggctttgcatgttttgtttgacattgttttattttcttcacagcaaatatcattatctgaaatgatcctattcatttatgtaattactgtctgatcctcccagtaaagtacattgagacctcgtctttcttttctgattttttttcttttggggtcttttggccctatgaaatggaaaggtgtagggatctacaggtgagcttggacatagatgtgaactcaagctgaaactgaactgatgctcgcaggttgggatcagcagaaagaggagtgaaaggtgagggagctggaatgggccacaaacaggtgcctggatgtgactcaactctggtgatgccatattttctcctttcatcccagagtggtgttttcctggcagctggtcatggcttttgataaggcagagctgcctagctctcccaaggtgctggtgttgaccactggtgagtggctttgctgttttcttgcctcaatgctcgatggggagtctatttgtttgcttctttcttcgctacttagtcactcgtgccactggtggcgtggggcttcagactttgcggagactgcaggagaggcctggtattgggcagctgggggctctctgtctgatttgtactgtacgtctctgtgggcatgaaggtcagggatggctatcttcaatcaccatgccatggcttctagggtgcctggagcactttgtggcctattcttcaccctcccccatatcctgtgtggtcatccgttcttgtccctccaggagggaagggataggtggtttattctgatttgtaggtagggaactgtgatgagaggaacttgagggcttgccttgcaggtggtgtgaagagcagactccagtgctctgttgtgagccttctgccttctgtatcagcctcttgctgttctggcccctgttcttattctcctataaaagaaaaagctttcagccagcaggtgtcggggcactggcagaagtcttacccttaataataactgtgtgccggagccctagctgtcggttttacacttgtcctgtcttcctcctatggctcaggaccttgcccctgcaatggggcaacaggaggggcaggatgaatggaaatagaagctgcttcaggccaggcatgggggctcattctgtaattccagcact

SEQ ID NO: 34742 - DNA, 1827 bp, Homo sapiens
gtcagactgcggttccgacctgcgggcctcggtgaatatgcgcaagggcacctgggcgcgggcagagccgttcccatccacaaaataagcatgttatgtctacaaccgaagggggtcacagagccccaaaggccctgctttcatcgcaaagaactgagcccgtcggcatacagtttctacctggctctatgaggtgagaacacattccccgccagcacagaaatcctataaactcctgtggggcagcggttagaagcagaggctgttaaaggtaactctagaggctgcggaaaaacacgaagattttcacagagcgtgagaacccaggagactggagaccacgggccaatctctgctaaaagcagccccacgtagaaaggaaagcgctctggggccatcgcgctagttagcttatgttaaacaatctcacctcggctgaccttataatttctccggcggcaaggacaacaaccaacgcgttactttctatttcatagcctcctaactacaaggaaaaacacttcggatgccgtccaggatataacacgatagactgcatgcagtctatctttccacactgcaaaaaaaaaaaaaacgggggaaaagagcgaacgcagtctcccactaccacaaattatgcagtcgagcttcccacatttggggaagttgcacgaattagcttcgccctgcgaaaaccaccttcgtaaacacgatttttcttctgctaggtaaatgtgagtctgcacgcttccgccccggcacagcctcatacgcctcaccctttacacgcacggtcacttgccccgcgcaccctcgaggcctcctagccctgatacacagctaggactctcaggtccgaccagcggtcctggactccctcccacagcacgggaactccttcgtggcgaagccgccggtgacgaagcagcagcccctgcgctgcctcatctacatagaagtcgccctatccctgatgtcactgacagcgccttccccgtcccagtcagcttttccatcccaccctccgccactcagccgaacaacatgctgccacagcctgcgggagaagtgacgtttgcctctccttctttttcctcccttccgcgccgctggtctcccccaaggaagagggttttgatttttgttttgttttgttttttgttttgaaccggagtctcgccctgtcgcccaggctggagtgcagtagcacgatctccgctcactacaacctcccttcccgggttgagacggtttttctgcctcaggcttccgagtagctgagattacagcccggctaatttttgtatttttagtagagacggggtttcaccactttggccaagctgatctcgaactcctgacctcaggtgatccgcccgccccggcctccgcaagtgctgggattacaggcgtgagccaccacgcccggccagaaacgggttcttagcctgtgttgctgaggacctctttggcgggcagctggagcctgtgcacccttcttcaaataatggcttttaatacactgactagaacgtttgggattacaaaagaaaccagttcttttcacatcgttattcttgtgatgtagcattctacttgaaattggaagccgttcaatatcagagagaaaccatatctatgaaactagagaggttgctcagatgactgcaaaccagccatccttagttgttttaccactagtagtgttataaagatggttgtccaatttcgtgaatcttgtagggtttttgcaaatacagcaatgtacaaaaatatgctgcctcagcagagcacactggacactcaggcatcatgctggagtttgtc

SEQ ID NO: 34743 - DNA, 621 bp, Homo sapiens
aatgagcataaaactggatccaagaaccagattcaaaacactctgaatttacagggcctggctgcagagatgatccatctcacctgcacaagttacaggaaacagaacatatagaggccacctaggagaatagtagagctttgtgaccttcaggctggagtactcacaggctacatcgagagcaaagcaggtgagctgatcctccaatgagtacaacgtgctgttgtaaggttgctggcagtcagacaggtcatgggggagtgaaggagtcaagtaaacttcatccagggagtcctgtgggacgtcctgttcctccacctctggcagatccgggctcagcctggtgggtgaagaacacagaagataaacattagagggaacagaaactacagtgcccaattgattctacagagagtctgacaggagaagccagaggaagcaaaaaacagtcccctcaggcagagaatgatccttctctgtctccagcaggagacagagcagcaggtgctcagtgctctgggtaggcagtgagctggaaaggaaggagatggaatgatccctctaccaaagagctatgacacggcacatgcagcagacccttgtgtcttcatagactgatag

SEQ ID NO: 34744 - DNA, 723 bp, Homo sapiens
cttggtcttcttcttcttcttgatttttttcaatgtctgcaacaaagtcagacagggacagacacattaagtctattcccctattcatgcaacaatccactgtccaatcctaaaacaggaacatctgtctcctgagcatgagaagaggacactgtgagagatatattccaggaggcctgagggtcagacatgatacagattccttggtttttgtctctgaacctaagggtgaaatgtcccctgttctggtagatcattatcccagtatcatctgtcctgagtttgtgcaacagttatgcaatattttccctatcaattcaaagcaaacacccaaaataatttctggaaaaaaagactgcagtattcagtcctgtctcatcaaatacccagcttgttcacaaaggcgaggattttagacactgaaattacaatgagggagaaaattaacaaaccctagagtcaaaaataactctttggttctttaaaaaaaacattggttattcatggcatcaaaaacgtgacagggctcagtcttgcttccaaaaccaaaacaaaaggtaacagacagatcagctaaaacaagcagacattgaagatacaaagaatgaggttaggttaattaaaaccagggtaacacctttgcatgagctgtacacaaagatgacgttgaccttgagcaggtattgaagctcagagacatgcctgcaaaatgaaatccctgag

SEQ ID NO: 34745 - DNA, 7636 bp, Homo sapiens
cctccccccaaccccctgctctctctctccctctatatgtatatacacacataaacaacttttaggaaggaactacaagaaagacacagcaagagagagtaaataatacaaaattacctctacaagatgtctcagaactttccatagaatctaactttaaagcatcgaacacctcaaaatcagatttcttgacatggatcaaattgttaattgtgccaagctgactggtaaccacaggctgaaacagtgaatagaaaaaattattgaatctctctttcaaatccatctcttccatccaaccttcctcttttactaaaatttacacgattgttctcagcacctccacgttttatcaagagagaaatcctccagtgtaggggagcagctgcccatcagtcttgacagaaatgacagctaaaatgagactgctaagtcaatggttacccttggagatcaaggccttacctctgatggatcatgaacccactgtccatccacaaagaacttgtattggtgctctccctcagggaggtccaggatggcaacaaagtcattatggctacagaagaaaaaagaaaggcaaacaggccaagttccttttagaagactgaatctaaaaaacaagtggcaatcatagtatcatatgaataatttcccagattcctaagccattgtatcccctggtgtaaaaaacaacgtataaacccattctccttttctgtatcatcttggacatgtatttaccagctcctcccaacaacgttagttcttaaccaatatctggaaaagaataataaaaacattaatcccctcaaatggttcaccttagtataacttactttgcttcagtagaacaagttcctcaccagtgcaaataagataggtaggtttaggatacagaagtgcctcaaggtactctttccctgttttggtgaaccttttctagagaatgaactaccatacaaagggccattctgacaaccagttaaatcactcattattgctttggaagcaacaaataacatgactacctaaaaattcaaaatgtgttttgctttagtgcagaagtcagagcaacaagactcagacagttacaaaagacttcccacaagcatagacaggacttgtatgacatagtcctaaagaatgtagccataaagctattatgaatccctctgaggcaatgaaattctaaagggtaaaacatctctgactcactatgaggttaaaaaaaaatcccacagatatactaagtggccgcagaaaagggcatgttctagagacagtccttagtaggtggagaaaagtccagctgggtctctcttctgagaaaagaaatcaggtctctattcctggacccttagattcaaccaagacacttgtcacctcttaatcagtggaatcttggtgctccaattgttgaaggacccagagatgaagacctccttgcctccttcagaccagcggataacagtgggccgggcctgctgtgtgggctttacggagtcctccaaatcctgctgccatgatacaaactctttgtccccagggagctgtaagaaggagtaggtcatccctagaataaactgtgacccaagaattctaaaaaggtcactctcctccctaggatagagaagggtgctaggctttggctaaggatataaaccccaaaattagcaactaaatcagagtttgaacaaattatagaaaaagaactcatctaggaccaaaaatggtcaaatggcctatgctcaagcactgcctaaatcatagcctaacttttgagtctacctgtgtcacttacccttccagagccttagactctcccttaaaaaaaaaagaaaaaaataactccctaccactagtttaactcataggcaggcaattatgatatgcttctgagtctttcttcagaggaaaaaaaaatgaaaacaaagtatggttctgtaaaagataattaagtcagccatatatttttataggcaaatatgaatagctctcaattaccagttgtaatggaagtcagagatatcaaaattcataagtaattcataaactgtatttcagctaagaagtaaaaagaagaaacattaaaaattcaaaaactagatcactgatttcttaaaacttgagaagtggctatgaaatcttacttattcccctatcccaggcttatactaattatttcaggagtaggaataaaaattctagaacctcaagaagcaagagatcaaaaatacaatttcctttatcaaaagtagctctcttatcaaatgaggtttatgggattgtaaaaacagtaactcctgtttcttttcattactatcctttggaccaagagttggcagacagccagtaagccagatgcttttatcaagtgttatttgaaaacagctctgcccatttgtttacctattattttactgattgattgattgagaaaggaccttgctctgtcacccaggctggaatgcagtgagtggtgtaatcatagctcactgcagcctcgaactcctgggctcaagccatcttcccacctcagcttccagagaagctgagactagaggtgtgaaccaacatacctgccttgcttacctatattgtctatagctgcttacaggctacagtggcagaattgcgtagctataacagagactgtatggtctacaaagtctaaactatttactatctggccctttacagaaagattgctgacccctattttagactggtttaagtgactttggtaaataagactgtatagtattaagcctaaatattactaaattgaataatgtgggtttttttttaaaaaaaggactagcttattcatttgggctttcttttcaaaatggttgacatagcttccctccatacattctcttgatattcctcaaaactacagtatagcatatcagtagcaggataatccaaagtaaatagagaaagagaattgaaaggactttcacataaggaattgacttaagagaaaactacatattctcagaacaatgcactcttgactaactggctgcgttagaattacaagaatttgacatatgcctaagaataaccctcagattcggatgtaagatctgggaacctatttttaaaaagctttctagataacactgtgattatgttaaaataaaggaaaaaaagcttcccagatataccgtgattatgttaaaataacaaagaaaaaaccctcatctttagaggtacatcctaaaatgttacagataaaataatacttgatataatatctgggaatttgcttcaaaataactagtgggagaatagtggactggggtatagatgttatatgttcattcaagatatgatcattgttcaaactgggtggcatgtatatagatgtcattatactgtttccccctactttgaaagtgtttcaaattttccaaaaactatttaaagaaatctgaggtgattctaatgtgcaaacaggattgagaaccactgaactagtccactgaaaaaggcaggcattcaaagcaaagtaggcccccctgccactgtttctgtcagttacttttatgacaggattttcagtttagaatttgaaagctacaaactattaatatgcctagctttggaggaaagcccttccacttatgacatgacatttctgtagtaggaatgaatgcaactgactagcagaaagattgtttactccaagttactcagcaaaactaccaggaaaagaggcaaaacgacaatcagaactacagtttgatgtttaagtaaaatgttgagtttagaagtaaagaggctacattgagaactataaaattttagacttaaatgagaccttaggaattatctgattttcagacaatctgaaaattatatgaataattttcttaattcacaaatgccaagactgaggtgagagataagaataatacaaaataggccccaattcagacagagcaacctggcttttaatcaggacaccaattactgcagtcacagttcgacaaatacactgtatttaaatcctgagtcatcaacataggaaaagggtaaaaatataatgaggcggatcacctttcgaaagctttgaagaagtaaattcagatggcttgtagatagcccaaataagaatggagaattggagaataaaccccaataagtgctccttttaatcactctcacttctctgtgattatggttggtttttttgtttttttgtttttttgttttgagagtctgtcacccaggctggagtgcagtggtttgatctaaactcactgcaaccaccgcctcccgggttcaagcgattctcctgcctcagcctcccgagtagctgggactacaggcatgcaccagcatgcccggctactttttctgtatttttagtagagacggggtttcaccatgttggtcaggctggtctcgaacacctgacctcaaatgatccaaccgcctcggcctcccaaagtgctgggattacaggcgtgagcctctgcgccaggctgtgatgatgttatcaattgagatccaaagaaataaatcatggaatccaaattccatgtgctaccaatatggcaaacaatactctattcactctctaaagccccagttccctgggaagtgatgaaatgataggaaacatcaaacacacccgaatctcctcaagccctccatttttctatctcatccagtcagtctacctggaggaattacttgtatttcatgctgacagctctgaaagccattagaaacattagaatggtaatcgctgctatcagctccatctgtcctttcttacagagtgaaaacaagttgttctcttcctgaaagtccttggaattgagagcaaggtcttcagggcagctgtgggttgtcgtttttttagccacgcaacattttgaagtactactgaggagtaaacaagtcgtggaatcattggctcttccacctacggagcagcagcggggcgtgaaagaggcacagcctcagccaccacaactataaagtatgggacaaaaattaagcagtcaactaaatgatgtccttaattgatccccaagactaggagaaagtattcaataagcaagtagttgctgcttacagccgtgccaaaagggaagaggatcacaactgtagagctgctagaagagcaaaaatgatactgatacatagaaattttcagaaaaagaatttcatttagccacctcagggcaaaggtgagaaactaccacctatggtcagcaactcgtgcaacctaccctctgaagttgtccaccagggattacaaactacaaattcagcaacgctatggaagagagccattcgtgctcggaggatcggggatggggggatgtctattgtccccatcctaaaaatgtggccaacagattagtcagaacaccaggaaagcaagaactccgcctctttatcctattttgaggcggcacttcaagaggaattatcatccaacacctctgtccccgataaatccctttaattcaaaaaaccatagcccggttcggcgcggtagaaaagaaccaagaaagggaagaggagcccagaaatcaacccgctgcagtactgacaccaactgcgggcatgggacgcttaccttggagtcagggaggctgaacacgctggggtcgtccgtactccccaccatgatcttgtgctccttccccggggcatggccgcctgcgccctcggagcgtgcagccttggcgccgtggcgctccccggacacccggtcgctggtggtgtttcccatggctgcagctcgtcggggaccacctaccgcggggaacgacaccgggctgggaacacctcagccgccgcgtcaggggcgccccccggccccgcccctgcgcctcgggacagggcaagggattccccgccccagggaagccgagccctggagccctctccctcctggcctgcgggaacgcctgcaaataccccggtgccctcactggccctagctcaggaaacccgctatcgggacctcccccgcgtccccgcgctcactgccaggggcgcccccactccagtcacctcgggcgatgcgctccctcctccaagggccactgatgtgatggctgttctgcagatcaggccaccaataaagttattgaaattgaagccgcacccctcgctggcgaccagcgattcctcctaaaatggctacaaggccggcggcgcggagtccgcccagtgcgcgttccctgcggcctgcagcctcggcgcccgggacccgccggcctctctagccgccgccgccgccgcctcgatggtgggcagtcgcacgcagcctccagcgccaggagggggcgccaggcagggcctgtcccgcctggggagactgcgcccgggataataggagcgcttggcctctgagactacccggcagaagggacgtccccaaatgacactcggaggccgcctccctgggctccggtgctcggtgccgggaggagcggcacggctttctaccccgcctcaggtgcgccagcacgttttctgggcagcatctgtgtgttaggcgaccggagaggtgggttccttatagggaataagaaaactgaaactgacttccaactgcaggcagaaggaagcagtggtcattgctggaggttaaaactgttctgaccgggcgcagtggctcacgcctgtattcccagcactttgggaggctgaggcgagcagatcacgaagtcaggagatcaagaccatcctggccaacaaggtgaaaccccggctctactaaaaatacaaaaattagctgggcgtggtggcgcgcgccggaagtcccagctacttgggaggatgaggcagaagaatcgcttgaacccgggaggcggaggttgcggtgagccgagatcgcgccattgcactccagcctggcgactcagcgatactccgtccccctctccccgccccaagaaaaatctgttcagtggggagcgacaaggaaggagctttcagcccgactggggtcgcagggaagaattcaagatggcgtgtttaggagctctagctccttgacaaattagtaaaatgttagtcttaggagaagaacgaaaaggctctcctaggctaagaaacagcatacacagtgagaaacctcagaagaaataaaattcaaggaagatagcaacaacgaaaacatcagaaggaacactaaaggtataaaaagggcaaagacagccctagggttgggagggatccaggttttttatgaaaattagtggaatccctaagatacttacctttgtattataagtatttgcatgtctccttctagaaacgtttatcactctgtgttacacagaccagcagtgttggcgtcaactgggagcctgttagaaatgcagaatcaggccccatccccagggttctgaatctgcattttaacaagatcacattaaagtgtgtgagaagcaatgctttgacagctggcagagagcagatccagatttgataccttttcatattctgcatgtaccttatacagagtaggcttttgcatttgcggaatgaaggatacaggaatactgtttactgtaatccatttctaaccagatatgccacttaggcttaaacacggccaatgatggggaaccccaagttacataggccaccc

SEQ ID NO: 34746 - DNA, 1134 bp, Homo sapiens
ccgcccgcctcggcctcccaaagtgctaggattacaggcgtgtgccaaccgcgcccggccacctgacactgttaagataaactgtcgtatgcacctagttgcagggagggtttcaagtattaagggactaggagatgtatgtacctggaacctccagagccctccgatgtcatcagtcctttcaaagcagacaggttccaagccttcttctacgcagcacttgatggaagagagcccgctcactcctcccccaatcacagcaattcttttcttagtcatggtctcccgagatcttcacctgttagtgtcgcctgtcctaaagaaaggatgacaaaagacaaaaagcacacatcggttaacatttttcaaggaagaccttggccgtggcattcgaataaattctgtacaagaggtgtcttgaggaggacagattcgacggtcctcttcaccagaggaaatctttctgctggcatgggggagccctgcgcctgcaagacccagagctgagagtgctctgctgcggtaccggatctcaccgcctttcctgaagcgctcaacagatccttcagctgcgatctggaggagactcaacaggcggctgttgtcaaattagtataaaccaacaacggacaaacagcgagagccaacggggaggggctgtagcactccacctcctttcagggaccactcccccgcccactcagcggcacccattctccctccctcgatgggaataaaacgtgggctgaagctgctttgggcgaaaaagttaatcctacaacttctctatatttcagctgctgttgccagcactctcaattactttctctgaaacccctagccccgtctgtgctcgcttctgcatccacttttaacttcctggtttttgccttaaagtgacaaacacttcctagtgaagggaaaactgtcaacaaccccaaagccagttctactccaaatgcttaaatgaacacctacctttcaggtgatctgttcaaacagattgtagcaggatgagccacagacaaaactcctcagacaccgaattaaaaaaggaagaggtttttattcggccgggagcgtcggcagactcgcgtcttaagagccgagctccccgaaaaagaaattcttggc

SEQ ID NO: 34747 - DNA, 1654 bp, Homo sapiens
agcacccagcctcagctccaaccttgctctgggaatggagtgggtgctgggagcagaaagaggccaggcaatgggaggagacacttcttagcctgcaggaatggggtgggaggtcttacagggcccccaagagtgcagagatgcccaggtctgcagctgtggtttgagcagctatagctgcacccaggagggtggggctcctgcctgctccaggaacccaagagcacagggaggccgagttggtggacatgactcaggcagctgcagctgtgcctgagagggtagggctcctgcctgcttttagccccaaagagcacagggatgcccaggtctgcagctgcagctgggcagccacagctgtacctggggagcaggaagctcctgccctgccaactcagaaggaggcagggcctccacctgttcctggttcccccagctccatggagctggcagccctggtgtgccacccccattgcaagtggcatcatgacagcagctgctctagataggccgtcactgccatcaatatgtcacaaaagttaaatttccagtttggcaaactcaaaagccttcagggactagctgggcagattgcataaacgttacactgctggttggagaacataaagaatgaaattctgggtgaccaatgtgatggcatggcatgacagtcaaaaggcatccagttaaaaaggaaaacactgtcctttcaagcaaaaagaccgtgggcaaattttgatgcctacaatttctaaactatgttctcaaagattaacttgataatattactattttacaaccttacctttgatagtaaaagggagtggcaattctctgaggtgactgggcaagagtcctgtgaaaccaacttactttttttctatacttctatactgtggtatattttccctggctttctgggttctaaatttattacatgttatttcatgacaaagaggtatactggcatcaaaagtcaaaatacagtttttcatttcttgcaagaaagaaaacccaagttaagtgtttttcatcccagcacaaaaatcttccacccatgggcacggacctaattctaacctaagctcaaagttccaagttcatttactcaagaggtctgaataaatgtttactttggtcacagcttttatccaatttccgtatctgactcactaggtgcttctaactggtgccctgatgttacctaacagagcaaggatacaacaaacagcaaacataatttgtttcttaatctgtgcttaatccatgcttgttttggtaatgtctgcacatgctaagtcccactgacagtgttagttggttagcattaatcttatggagttgctgttgccaaaggacacatcctttctgtggaggaataaaacaattaacaaaaacagcatgattgtataacctgaacaatgaatgaaaaatgagttgaggctaaattttattctgggagttaatcacgactcacagaaaacactggaccagcttcctaaactttctgtgccttggtttgcccatctgtgaaatgcactctctgtacttcaaagttataacaatcatatgccctagattttaaaattgttccacaggcacctcattcaaacattcaacaatatttattgagggcatactattgtaatgccta

SEQ ID NO: 34748 - DNA, 2286 bp, Homo sapiens
tgactcttttcggactcagcccacctgcacccaggtgaaataaacagctttattgctcacacaaagcctgtttggtggtctcttcacacggacgcgcatgaaagtcagtatttatgaatgactcaagacacaaaaatagcttcataaaacagtgctttgcttgagtttttatgaataaaccaatctgaagtcatcccttttctagctcagaacaaatttctcccttttattttagaggaagatgagaatggagggtacaaatttaacatgagtttactgaagaaggaagcaccaagattaacctaaatgagaatactattctaatgacattagccagagaataatatcgttcctgttccagtactgccaattaccattacaagtcccaatatcttcatttacaatgtggggacaattataacacctaattattggttattgtgaaggttaaataagaaaatatacttaaagcccttaggacaccacccagaacttcatcaataaatgcagctattttgttattatcatatttatattagtggtatactacatcataaatccactcaaagctgatgctgagtcacggtgacccctaactgaacacattgcctcaatctgctccccataatgcacttgagatacccactgccacaatgacgtctttggtgattttaatttactactattcagaggttcccaattttggcctacaggtcacaggcagtaagaaagggatttcagggactaaatcaatttatcactaggtaaaccgaacaagaacagtttgatcttatcgtgaatcactggagggcacggaacaagtcttacttctagaacccccagggcccagcggagtgtctgacacatgatagtcgatgttgattaaataataaatgaatgatgaacacatgccacctccttgacgggcagttcaggcaatcagacgtcctgtgcgtgatcagacgcctagcgcttcagaagcacgactggtgagaactgggcagcccttccacgctccgcactgcaagaactgcctgtccggaagggtgactgcaccagctccgctccggatatcttggcaggacgcgccctctggcggcgcctcgctcataggtgggccccagcgcgcagtcgcccgcccccgcgcgttgggaagttgggagggaggtgcgcgcttggccgcgcggggcggggcctctaccggcccgatggagcgcgcgggcgctactagccgcgggggccaagcgcctggcttcttactgcggcttcatactgagggccgagccgaggcggcgcgggtgcaggagcaggacttacggcagtgggggctgacaggtgagcgggctccgggcggacttcggccaggcgggccaacctattgggactgcctcttgcgggccgggggcgcagcgggtgggccgcccggtgggcagtttacccgcccgcgccagggccttccttcgctcctgccgtgggcggagagaaactgcgcccgggcttggtggccacggcccccgcctgcgcggcgcgcggggccggcggacgccagatgaatgaggtcgcgggcccggtagccaggcctggcccctggcctgtggaggggaaacgtggtgagatcagcgccacctgcaggcctccgctgaagagttggacggcctggtgcaccaaggatgtaggtttccagttgctgttccggtgggtttgggtcccggcctggggagtttattggttgcttctgtaaaacgatcaactcatctcccagcttcagcttctccgtttactgtgcgcgcgcagttattggagaattcgccacggattaattctccggatcgagttacgtgcggtagtgagcggacaaactcaagcaaagcactgtttatgaagctatttttgtgtcttgagtcattcataaatactgactgaaccacgtactatatgccaacttagcttgtccgctcaccaccgcacgtaactcgatttattgacactagcccttacggagagtctgcaaagcgcgaaccttgcatgccccccagccctgccgctgcatggctgaccatacttcctgcagctccgagaccccgctctcctcctgggtctgcgctgactcgccgctgaaccgccccagcctcgttttccttacttataagttgggaacgtagtgtgtgctttgactgtattgacagaatcatgcatcagtaataatacagtcgtttattcattacttattgaatgctactgggagcgtattcttaggcattggctacaaagatgagcaaaacaaat

SEQ ID NO: 34749 - DNA, 857 bp, Homo sapiens
gtcctctattaaagacagattgacatttttctaaaaagagagttcagtcttatttagaaagctttctaaatgcctgctgctataagggtatatgaaagaagtgttagatataatttttgattataaggagattatttcacctgtgtttgttttatctccctaataaaattaataacataagattcatttggcctcactcttccaagatcatagactgcacatggagtctcagccattttctcatgtgatcagttgcctcagggttagtctcaggagaaactgaaagaatcaggcagtgcatcatcactgccgggaaaacagttttatttatgctttaatgatttcatcatcctcatattcagagagcagcattatgtttgaaatgtctaaaattaggaaaaaagagatctctgcttttcagttaatctccttggaggactcagagtagatctgggagctgaagcagtcctggacattagtcttctccaaacactgttgtgtttgctgtcacagttttgttgtagttttgcagtattttcatttatttaacaggtttccttccaaatttcaaatatttctgtgatgagtcatgttgccaccagatggcagtgatagctcatgaatatgttcctattcatggatgtgggtgtggcttatttataaaaatctcacccctcggtgaagagctgcacttagacaacatgaattcaagaagataattttatggaacacattttaaaatgaaataagcacctgaaaagtattatagtatagtggataaaagcacgggctctggaccaagactgcaagggaatgaatcctggctctttcaccttctaggcttgcaacttcagaga

SEQ ID NO: 34750 - DNA, 2684 bp, Homo sapiens
taaagaatcaagaaacaaagggcaagatttggtaagtaaaacccatctcttctcagaactacaagtggactcacatcaacttctcttgaagtgtcccctgccccaattggcctctctgctagtgtattagtttgttagggctgccataacaaaaagacacagactaggtagcttaaacaacagaaatgtatttccttatagttctggaggctgaaagtccaagatcaaggtatcagcaggtttggtttctcccgaggattctctccttggcttgcagatggcggtcatcttgctgtgcatgcacaaccctggtgtctgtgtgtccaggtttcctttcttgtaaggatagcactcagaatggatcaggccccaccctaaacccttgttttaacttcattgcccctttaaagactctgtctctaaatacagtaaacatgaggtacggggggttggggcttcaatatatgaatttggggggacacagttcagcctataacaagcagattgggccatagtctccactgtacttcccctgtccccaggcttccatccatctgtccccggagcaccgtccagatagcagatcccatcttaagtacgaggatttctatttgtctttttatcctcagtaccctacatagtactagctcataagaaatgctccataaacatttactgcatgagtaagaaagcatgactcagaactctgacggtttcatttcttaccatgtgaaaatttctatgaaagattgtgttttctagtcagccataataaagcaggagagaggaactaacacatatgtcctctgcccacatcagaatccttttgcatcttaggcatcttgggatgcctgcagtgagtttgattaaccccacctacctggctttctccaaggcctgggttcatgttcagattttaagccagaattaagaaatttcaaaatcaggccaaaagagaggttcatccttttgaggttgctgtctatgtgactgtgttaggctgtttttgcactgtgataaaagaattccctgagactgggtaatttacaaagaaaagagatttatttgctcatggttctgcatgctgtacaggaagcctgatactgacatctgctcctgctgggggcttcaggaagctcacagtcatggtggaaggcaaaggggaagctagtttatcacacatggcaagagcaggaacaagagagagtgggggaaggtgccacactgctttaaataacgagatgtcatgtgaactaccagagcaagaactcatcaccaagggtatggcattaagccatccatgagggatccaccccatgatccaatacctcccactaggccccacctccaacactggggattacatcctaacatgagatttggagggggacacacatccaaactacacagtgactaacagcaaagtggtttctgttgagtcattccttcagtaatttctaaaatgctaaaaaaggagaaaagtaaagtgtctgtgcatgagaaactcagaatccagtgattcaggaaaactgtttacagggagtagagcaccatgtctatgatatgactgtggtgatgtcatcccggaagctcccttgacactctccagctctgcccacttaggttaggatggttgagagatacttggcattttgtcctcatgggaattgttcgaacagagatggaatgactgcttgtcctgggggttgtggagctgactcaggcatcaaagggctgggatacaggagcctctaagatcttttccatgcctacaattcagaaaaattctcttttttttttttaacccttgagagcttttggaaagtatatgttttggactcattctctggttttaaagtattttaaaaagaagaagaaaaccctgtataaagtgaccacaaagtaagaattatgacgggatgtgaagtcatacatatagtaggacattgctgttcaggcatagcatccgaaagagacagagccaagcccaagtgacccatcaagggctgtgccgcctccatgggcggtcacttggttgagtgtggctgtttcatgttgggttggtcatctaatggtggttctttccagttggccttgattgtggctcagcatcgtgatcgttccaatgtcctgtctggcattaagatggcagccctagaagagggcctgaagaagatatttttagcagcaaaaaagaagaaaggtaagctcttccacctgtgctcaagagtagatgaatttgtttctaggcatgtgatacgacttttgaagggaggtaagaaatgtcaagatcccacttaatatgcacggtaaaggcaaaccacagaagtgatcaccccaccgtcttgtagtcatatagccccttgtcctttccaaaacacttttaataccggttatctctgtaggccgtctccatcccccgggtatttttatcgtgattttacagatgaggtggcagaggactagacatgaagcaacttggtcatatgtagttggtaaatgctgtttatttaatctcctcttggagagtcacagttcccaataacagacagttcttcgacaaaaattgagtttagttttgtttcgaaacctagtgtgtctcagagcttattgaattgattggcttgttagagaatctttgcttattttaattttgcctccaccaatcataatctatttccaat

SEQ ID NO: 34751 - DNA, 1180 bp, Homo sapiens
cactgagaagaaatgtttggactcttacggtattataaataatatcatatttatattacataagtgtctgagcatgacaataaaaactcatgattggtaggagctgttaagagtgatctcactggatgtagcagtccagttcagtcatgaggagctcattactccctaaaagctataaaatgcttgttcaattaataaaacaaggaattgaaaagcaaaaacaaatatactaacaacaacaaagacaaattttaaaaaccaagcctctatgacaacacatacttgcctcaattaaacacgagaatgagattattacaattcactaccaacttaccagcttctccaaatgctaatcacacattctctgggaaaacttgtggatttacaagtaaagaaagtaagttccgagttgaaacctgaacatcctgacatttaatatggggagaaagtttaaacttctaaggttactcaacagatatttcatatgttgtcaaagcaaattattgacaggcatactcattgtgcttcactttactgcacttcacagagattgcattttttacaaaatgaaagtttcaagcaagtctattggcaaagtatcaagcaattctatcggctccattccagcagcatgtgctcacttcatgtctctgtcatattttcataattctcataatagttcaaatttttccattattattttgtctgctatgttaatctgtgattattgatctttggtgtgactattttaattgtttgaggtgcaaaaaccacactcttataagatggcaaacctaatcgattaatgttgtgtgtgttctgactgttctaccaactcaccattcccctgttcatctctccccctctccaaaggcctccttatttcctaagacacaccaatattgaaattaggccaataataactctccaatggcctctaagtgttcaagtaaaaggaagtgtcacatgtctctcatcttaaatcaaaagctagaaatgattaagctaagtaactagtaaatgattaagcatgtcaaaagctgagataagccaaaatctatgcctcttgcaccaaatagttagccaggtagtgaatgcaaaggaaaagttctcaaaggaaattaaaagcactactccagtgaacatgtgaataagaagaaaatgtcataacctcattgtt

SEQ ID NO: 34752 - DNA, 1371 bp, Homo sapiens
catttcaaaattcttaattgaatcacacctaaaaagtcccttttgcattcacaggtttgggaatgcttattatgtctaccatagtgaacaaggtggcagtctttttagggtaaaagccttcccttatttctgttactaagagtgttaaagatatctaggtttaccagttactatcgtcagctcactttctgctttttcaccctgacatctccaatactgacccctttgagaaaggtgattttttaataggtggaagatgatgcagtgttttgtcatatttctctctgctgtgactaaaccttgctctgactatgcacggtctcactggtaggaccatataccttccccaggtgaatcctagtctctcctcggcttatttagtacaaaagctaacctggataaaatttaatacctgatttggtaggtgggcccagtgtgctagacacgtgtaagagcagaaagtagattggtgcagttgcaacagagtgagcaaaaggtagaatggtttaaaatgaggtcaaagagcagccatgaatatctgaggacttggactttactctgcttgatgtggaaagctactaaatggtttttagccaagaactcccctttccaatctatgggaagcatggggatagaacaaaggtgaagtaatagaaaacagcagactattgccagtaggtgaaagattttttttctacaggtgatgagaatgtattgaaaaactgagcacaggtatgaaataaaaatatttacatctataaagaaacaccctggctgctatgagaagaaaagactaatagaggtaaggatagagggtaggagatcagtggagaggctattggatagtccaggggaaagaagatggtagattggactagggtgttagcagcagagctggtgagaaaacaggtggaaagcactcagaagagagtgctttctgatgagactattgtattttaaaagctttttacatggactgatatgtaatctaatttaatccttctaaaacacatatgagttagatactatgatctttatcattcagatgaataaactgatactcagggacgacagtttctagaacacacagagacaaagccaggactgaaatctacctggcaccaaagcccaccctttccatcatagttacactgactccaattctagaacagatacactgcaaaataacccagcatgggttcaaagtttaagttaataaactagtagaaaattggtggtagtattgactgctctgttaggaaagagaaaatatttaacagaggatgtctggggttagtaacagtttatatcaatgagaaaatattccagaagaaattggcacaaaattaattggctgattaaaatttctaa

SEQ ID NO: 34753 - DNA, 1258 bp, Homo sapiens
caaatacatatgcacatacacacttgtatatttttgcatgtatataaaacagaaaaaggaacctgggatgcccatgttttattgtaaaagatacttctgcttttctaacagttgtaaggaaaatgtctgcacatatttggaaaactatgtgttgtccatcacacacccttctgctatcttttatctgatttggattctatgggagctatttcacaactttgtaaactgtagctagctgatagcattgcaaaataattattctctgtaaacattcaagttttgtcccttctggtagaggttcaattgattcccgctccctctgtggaagaagtcagttttgccctttttttgtgcattcaatattcttgatctatacatgttctttgtattctcttttgatccagttataatatctgcctagttctctcatagattgagttaaataaaatctctaacacatgttcatgttcaatctgtatgagtcatgattctatgttttgttttttttttaaattaccttttaacgtaggtcacagtagagctttcatgcatcaggtggcagtgtttgttcaaacttaggtcaactgtaatgaaatgggatacctcaacaggaaggcaaacctggatccctagcaaggcagagggacttcctggtttaactttgtgctgttgcctagaggaatcaaaaggaaggggagaattttattgtgaaagaccacatgccagcaatgattttaactgctgctctgtaagatccctcccacgccttgttctcatgatgtttgaaatacacatctcttttactacagttcagaaaaatctgaagatacaaatgaatatggactaggcaaattagaagtacgaggtctcagacatagcaagaaagaacaccagcctgagaacaaaaaatttaggttctaggcccaacttgatccctaatgagctgtatgatttgattttaagcatgtgacttagcttctctgggcctcttattctttatctgtacattaatttacttaagttggtagttttcaattctttttcaggcataacaactttttttttcaaaacaaagcttgtacacagttttaatgtgcaaaacaagacaacaactctggtttagtagggtgtctgcttggtttcaactcctccactatggtggcctctaattataggggcccctcagaactgtgaggattccaagatagcacggtctgagaagcatggaatccaagagcactaacattcttcctaatgc

SEQ ID NO: 34754 - DNA, 1174 bp, Homo sapiens
tccatgcttagctttcataagtcttgtaaaataaacttagaaatgctcatgcattgaccttgttcacttatccacttggaatttcttttttctctttggagttggcaggtggaagccatcagtgctggaggcaagatagtctgacctggtgttcttaccaacatgttctggcctggaggcctggcattctctgtcctctgccaagtggaggaattggaaaattaaaggttgtttgggggcctgggcacatgctttctttttctttaactacttataggagatatcatgagatttaaaaatgcatgtgaaagtgttaggatcatgattgcctctttcttctttctctcattgagcatttgtattttcactctaacaattggaacaagtctttttgctgccttagcagtacagcatagtggtggggatcctggtctctagaaaggcagaccacctggggccatatctcagccactacttcctggctggattaccttaacacgctccttcacttctgtgcctcagctccttcatctagaaaatagacacactgatagtttacactgtatggggttgtttaatatatggaaattcttaataaatgttagttgctgtcatcaccattatcatcaatatctatgggcctttttagtttgcttttttatttaaaaaatttttttatacttaagaaagggaagcttttctggtcttagctgcctttctctattgcctagcaatctgaaaatagtgcagtcattgaaggttaagtcgaccctttatgcaattcttgcctgggaggcctcattgtgtatagtgagtcaccaccacttagaagtggacagtgagtcagtagcctattaaggggaggtcagaagttcccctggctcaaaatgaaaggatccaaacccaaccctggggtacagaaaaaacagtgtacttatatggctgactggacttgaagtgccatggagtacctggactactccagtgagaaggcataatatggcgggtaaacgctggggctttagaatcacacaggcctcagttggatttcagctctacctctgccttgctgtgtgacctcagacaagttgcttaacctctctgtgcctcgtttttctatcatctgtaaatggaaatgatcataacaaaaattacttcatgatacaaatgagtg

SEQ ID NO: 34755 - DNA, 2052 bp, Homo sapiens
ctgtcattcttcttcctgatctcaattggccctcctgatttcatgccatctgcaaatttgcacatcctttgtgctcctttttgctcacattttatgccttcttttaccatctcatttactctgcatgtttcaatctttctgggcttccatttttcttctttttttaatgcagtgttgtttctctctctctctctctctctctctctctctctctctctccactcctttacagcccccacctcctccctccacaccaatcaaattcctgcttgtttcttgccatattcattatcctacctcattcccctcttattcctagaaaacagcacactcaccctcccctcctccaactctcaggcccaccctccataaattccagcagcctggcaatcagtaactttagcatcacacttcacagctctcctagtttacactacttgttactactctccttgctactgctctctagggtttctgctaaaataaaaaataaaaaaaaataaaaaaagcttcactttaaaaatatcttgggtacaagttgaacctacagttaagtttactcacacatttacacatttcatgattttattttaactagtagctcaagtccatgctcaattatgcagtgaaagaaggctagatccttaggaaacaaatttttctctattgtaaagaagaaaaatcacctaaccactcaacagaaaccccagtcctggggccactcaccctcttatctccctactcccccaatctccagctaatgggactttgctttttcctttgtcgggtcatttatttcacttttcctggcgctgagatggcctgagtctgtgtatgtgtgcacacgtgtgtggccactgcttttcttccaaaggactcacctctcttctgccattttactaggacacaggaggcggctctctgctctcgctctccctctctttttctccctgcccccaactcagcctgggctttttcctgtctcttaactccaccagtgcagcagcaactagctgagctgcttgagagagagagagagagagacagagagagagagagagagagagagagagagagtgtgtgtgtgtgtgtgtgtgtgtgtgtgtgtgtgtgtgtgtgcctgcgtgcgcagctaggccaagcctgcgagcctgcctgtcactggagagttttagtttgcattcagaagaaaggaggaggggagacaagaggggaggaggaaaaggtggaggggggaggagtgggggggcgcagagaagggagggagaatgtcttgtttgtggcttgtcagcaattgcttgagacaagcttccatgtgtgaaagctacttggcatgaatgcctgggccgtaccaagtgtcaccgcagcaagagggggagtcagaagaaaaacagatcagaccagagcagacaataggcccctaaagtgttccccctaagttgctttgatgttgtcctggtgtcttgataccaggaggccagggattgcaggaaaagggtcttttttgtcttcattcactttcccccctcagtttctgaaatgattctccagaatttctcctcataaaaaaggtaagagccctaacaattccttcttcggtggcaggcttgttcgcctgtgcctggaagtgggggtctcattcctgcgctgctctggaggagcgctggggtcctgcgattggagctcctgcgttgcccctggaagtctttcaaggcatccaggactggggatggcccctctttcgagggaaccccagtaacacgatctgtgcctctgggttggtgggggagaaggggtggatggagagggctgggaggagggtgtgagggtgggagggaaaagagagagagagagggagcgcgagagagggaagcctggaaaagagggagagaagggcagagccttggttcagggaaaccccagcccagagcccagggaggccttgcaggctccgagctgtgcattctcaggctgagcaagggccggccagggctccgccgagtgactgcagagattgcatcgagctttgtgtgtgccagtgtgcccgtgggt

SEQ ID NO: 34756 - DNA, 2001 bp, Homo sapiens
gctgtgaagcgacgtgaggtcctggacagaggttccctctgtgggcaccaggcagcgatgcctgagccaggctgggctgggccggatgtgaaaggagacccctgcacccccggcgcatcagcgggactcctgcacttcgcagagggcggaggagagcgcagtcctgggtgggggctgctctcctgcgaggggagaaagccggccatggcccaggcggtgcagactcagaggtggagagaagggacaggaaagcggggtggaactgcgtcccgaaggtgtgaggaggtggccttgaaggttgagggctaggccgggacctgggcagcagggaagagtgagggaaagaccggctcttcaattcgtttctgtcaaaagatggccaaattccacgctgcccttccccctccgcgcctttcctggccgccccccgcctcggttgctcccagggctgcgcgaggcggcgggaaggtccgggagagtgagcgcgtggggaggaggggacgggaagaggagaccctcccgtgccgaacctcccgccccgccggcccctcaggaggctctggagttggggactagagctctgccgctttaaggggggagtgggcgtcccctccagccgggtgacggtccggggcgggccctggcgggcgtgcctatgcaaaccaggaggtggtgccggcggtgggcgggcccgtagtaaaatatcgggggcggggcggcgggaggtgcggctgcctggtgggcagggccctgcgggaagctgggggcgggaggaggccgcggcgggttggtaccatcgcgcgcgtctggggagggggacgagcgactttccctgaaggggcacgagcgactttccctggaggggcgggcccttgctggtcgcggggccggacgctgaggcggggcggggcggtcccggttccccgcgggcgggacgtcgggccggtggggagggggcaccctccgctcgcgtccgaggcggggccggctgtacctttcgtggcgcggtgcggcgggggagggccgaagggagggaaggggcgggaccgggaggggggagccggaaagggggaggcgccggcggacaatggagcctatgtgtgcttgccggagtgggacggcgccgccgccgccgctgccgccgccggggggagacgctgcgccgccgctgccgctggccccggccccgcggggctgagagccgccccggacccaagcctctttccctgctccgcacctcctctcccctcccccactcctgcctccggggtaagtggcacctgggggagggggaggggaaggaccggagccgggggtagtgggggccaggtccgcgtccgcgtgttttgagccggtttgggggcaggggtagccacagccgcgaagagcggggtggaggggggcagaaaaggggcgggggccagggttgcggatttagtgaggcgagtctggaggaacctgtggggggaggtgggggtgcttcacgggcggtggagagagagggcatctcttctttttttcaaaggttgtgtcccaagcagtgcttggagaggttaaaccaggagagtgaggacagtcccagggtcctgggatgcaggagtgttggaggggcgagatggagagctaaataagggaattgggattgagtttgatgaggtctgtaagacccctgagatggatagaggtaaaggggactttgcaggccagtgacttgttgaagggtagggggaggtggaagctaggaagaatgtgtgagtagttaagggcccaagcaggtgaattggtgatgtctaggtcactgagtcattgtgggggtcttgggacacaccagtgatttccaaagtggagcctgagtcactggcctttgaaagttgcaaagactattaagatgtcactgatgagtgttgggtgagcctggtgaaatggagatatcctaagtaaaacaacagcagggttggttattatgtccagagggaaggagagggaggggccagaggcctg

SEQ ID NO: 34757 - DNA, 1805 bp, Homo sapiens
cctgacaaaaccagacagatttttaaaacattactgccacagactagcccattttaaatttgttccgacctcagatccctcccactataggtttagtaaccttaaatagaaaaggagaaccctagaatacaacacttgttacaaaaaaaaaacttcaggagatctcaaatggcctccagcaaaccctgagaaaaagcagttataaagtttgtttccaaaggcaacgacctcttatccactgtaatctcagttaagagtggttcctatcactaaagtcccttcagcccttcagctctgacaaaccaccttcaaaatggtcacacagaagtgcactgcacccttgtattcaagttcacctagacccttaatagaaatgctgacctggggcactactccacacctgctgaatcagaatctgcaacgtagcaggatccccaggcgactcccatgcgtcttaagcagcgcttactgatggctgcgccatcagggcaaaactggaagttccggggctgtcctaaccccagcaggtcctttgctcaagagcctggggagtcactggctactgctgttttcccttcttctggacccaacccgagccccgctccgcgcgagtaaagctctgaagatgtgtgtcagggcgagactcctggcctggcacacggtcctcgccccaccagccccagcccgggccgacctctcacctgctcctccagcgggagcggcttgagaggactccgagccccgtgtcgaaacacgacctgcaccattttcaacttcagcaggctgcggtcgaccggacactggccatcggcctcctgcagctcggccagggccacccgccgctggtgcaggcagtacgccagcgaggtcaggacgcccactggggtccacaagcgcatgctgaacacaccagtgatcatggtggtaggccctcgctgccctccgggttgaggctgcaggaggcaaacacaagtcttctgcgggcgccggggctcagcgggcgcccccaagtccgcgggaacctgcggatgcgtacatccagcccttcagcaagcagggaccgctgtgcctcccggccctgagggagaccccgagtgggaacgggggagagaacaagaggtggcagcagcgaagagtccctgggagttttaacccgggtcggggttggtcgctcctgctgcacaccgggccgggggagatcggatccttatcttttgcccgacgaggaacattaaacttgtatttcaagtttggcctccagcactcttgaaggaacaggagccggccctgagttccctggcggcagcggctccaccagcaaggactactcgattccacttttctataagcaagctcctacccacctcctcacctactcagggacccgtcccaagtggacccgcgcacaggagcacgggaaaacgagtcctgtggtgacacctcgcctggagactcagagctgcggaaactacaactcccacaaggctgcgcgtaccgcggctcccaagaagtggcttgtacccgcccccctcgcctgcgggcctcgcccctccggcccagccagccgttttccaggcgtggatggcccacggacgtgcctggtccggcagtggagtggtagtgaatctgtcgggccatggagtttgccaggcaggaggatcgcgagcgcaggagtagaactgggtggtggaggggagtagtttgagtctagttttgaatgtagaagacttccttccagtcctggaagcctggttgctgcagcgaggagctgagacacctgccgagtgattgccatttgcgaaaca

SEQ ID NO: 34758 - DNA, 614 bp, Homo sapiens
aatcaacatatttttgccaatgagaagcaaatttgtttattcctgtagcataaaaaatctgtgctttgggattcaacaactcttggaaagtactttctgcatcctgctgattgtggaagcatttcccctgcaaaaagttgtcaaaatgcttgaagaagtggtagtcagttggcaagaggtcaggtgaatatggtggatgaggcaatacttcaaagcccaattcgtttatcttttgaagcactggttgtgcaacctgcagtcgggggttgtcatggagaggaatttggccctttctgttaactgatgccagctgcaggctttgcagttttcagtgcatttcatcgatttcctgagaatagttctcagatgtaatggtttctgggattcagaaagctgtagtgggtcagactggcagaccaccaaacagtgaccacgactttttttggtgcaagtttggctttgggaggtgctttggaccttcttccccatccaaccactgagttgtcatcaccgattgtcatataaaatccacttttcgaagtatgtcacaatctgatcgagaaatggttcgttgttgttgcatagaataaaatgatggttcacaatgatgattt

SEQ ID NO: 34759 - DNA, 934 bp, Homo sapiens
aggaaaaaaaaaaaaccctgccaatactttcatttcagacttctaacatccagaattgtgagaaaaatcatttctgtcatccaggtcacccagtttgtggtactttgatttggcagccctagctgactaatacaccatcccagcatcttcatcccattacatcatcagcaaaatctcttcatcaaatctcatctcatcagctcaaaatccaaaatctcattatctaaatcatataactcaggtacagacagggatcctgggtacagtctattaagtacaattcctggggcacaatttctctccatttaagaacctgtaaaacttaagagacaaattatctacccacaaggtacccaacatacaatgttcagatagacataggataattgctatagacatcctggttcaaaaatgggagagatgagagataaataaaggagtcacctgtccatcacagtattgaaattcagccaagcaaatattacatttccttgattaagtttcaaggaatgggaatagagactgtttagctctctaacctctgaactctgcactctggtctctgagtcatctttcctttttgacaaaaggtagctcatgtttgcagctgagtcattttaatcagtccactttctgccagtagctcagagtcctctttcaagcctggtgtagaaagctagaactagcatatagagtgaggagggcatatttgcaggtgaggggctagcaacgaaaataggagattggtctcgtacaggaacactggtcacataattaaatatattaaagatattgagagccaggtttcttaccatcagaaaatggattaacaaatatgaaaaatgagaaatatagaatgaactctgtggttttggattggaattggaagtatccgtttgcaatatatagagagaaatataaaaatatagatata

SEQ ID NO: 34760 - DNA, 856 bp, Homo sapiens
gggcgggaaagttgacggagacgggaaaggcgctgtcggtgacatcacggatagggcgacttctatgtagatgaggcagcgcaggggccgctgcttctccacctgctgcttcgccacgaaggagttctgtgctgtgggagcgagtccaggacagctggtcggacctcagagtcccagctgtgtgtcagggctaggagggctcggggacgcgcggggcaagtgaccgtgcgtgtaaaggttgaggcgtatggagctgtggcggggcggaggtgtgcaaatccgtagttacctgggagggaagatagtattgtgaagatcgtttttccagagtgaggttttttctattgtgtgtactgatccttgcgattttcctaaatgtaggaaattccactgcataatttgtggtagtggggggggctgcgttagtgaattccgctgagatactgcagtgcaaaacgtgagctctacgcgaagggctactcttagtttctatgggtttgtagctttgacggcatgttaagtgtcgtccttactgtctcaagcgtgagaaacagaaagtatcgcgttacggtcctctccgccgctgtcgtgagcttatttaacacaaactaagtggccgcagggctcttccccaacctttctatgtggggctgctttttgcagactttgcttcatggtctccagtctcttgggttctctgtgaaaaccttcgtgttttttcgtagcctccagagtcacccttcacacagcctctgcttctaaccgcagcccccgcagtagtttgtaggatttctgtgctagcagggaatgtgttctcacctcctagagccaggtagaaactctacgcagacgggtg

SEQ ID NO: 34761 - DNA, 1165 bp, Homo sapiens
tctacctggctctaggaggtgagaacacattccccgctagcacagaaatcctacaaacttctgtgggggctgcggttagaagcacaggctgtgtgaaaggtgactccgggggctacgaaaaaacacgaaggttttcacatagggtgagaacccaagacactggagaccatgaagcaatcttgaaaaagcagccccacgtggaaagggaagagaagagcactggggccacttagcttgcgttaagcaagctcatgataggggcggagaggacagtaacacaatactttctctttcttatgcttgcgactgtaggacaacacttaacatgccagcaaagctacaaacccgtagaaagctaagtagaaactaagagtagcccttcctgcagaattcactttttgcactgcaagatttcagcggaaagcactaacgcagttctccactgttattgtgcagccaaatttctcccatttgggttaatcgcaggatcagcacgtccacagtgcaatggaaaagcaacgccctgggaaaacaaccttcataacgtcctctgcgatgtcaggtaattaggagttcacacgtttccgtcttgctactgctccacacgcctcaccctttttacacacggtcacttgccccgcgcaccccggagcccttccagccttgacacacagctgggactttcaggtctgaacagcggtcctggacttgctcccacagcacgggaactccttcgtagcgaagcagccggtggcgaagcagcagcccctgtgctgcctcatctacatagaagtcgccctatccgtgatgtcactgacagcgcctttcccgtccggctctgcttttccgccccaccttctgccactcagccgaccaacatgctgccagagactgcggggacagtgacgtctgcctttccttcctttccctcccttccccgccccaatctttccaaagaagcaggtgtttctgttgtagttttttgttttgagccgcagtctcgctctgtcgcccaggctggagtgcagtcgcatcatctctgcttcctgcaacctccgcctccagggttgaagcgattctcctgcctcaggcttctgcgtagctgggattacaggagcacaccaccaagccctgctaatttttgtatttttagtagagacggggt

SEQ ID NO: 34762 - DNA, 612 bp, Homo sapiens
ggctgctgcttcgccactaaggagttcccgtgccgtgggagcgggttcaggaccgctggtcggacctgagagtcccagctgtgtgtcagggctaggagggctgtgggcggtgggggggtggggtggggggggggggcgttcgcggggcaagtgaccgtgcgtgtaaagggtgaagcgtgtgaggctgtggcggggcggaggtgcaaaagctcatacttacctggaaggggagataccatgatcacgaaggtggtttttctcagggcgaagcttatccattgcgttccggatgtgctgacccctgcgatttccccaagtgtgggaaactcgagtgcataatttgtgatagtagggaactacgttcgcgctttctcttggtgtttctgtggtgcgaatagtaggtgagccgtaagtgtttttgtaattcagggtgcgggctcgtgttttgtggctgtgttctgtccggtcagttgtttccgttcgcaacggttagttttcctttgtgaggccatgtttggggacagcttagaactatccacttgctctcttgggaggcgaatttcagtctctgttggttgggttgttctcccaggttagctgccgcggtacttg

SEQ ID NO: 34763 - DNA, 1128 bp, Homo sapiens
atacactcttctgaaagggggggttggctagtttgaattgcgtcgcgggaatttgctggcgcaaaactcgctgggcaggctagagggcttacagaagcagaaagaaggcagttaatcaaactgacaggtcttgcaacgcaagcatagctggtgaccttgcagctgcactgaagggaagtcaggaacttacaaaaccagaaatggtaagggggaaagagaaggtagtaaaggcatttgttgttttttcctcttatccttatccgtgctaggggcggactgtgtagacagagtctctggaactcattccctggggctctgtcttttcagacagtgttatcaaggatctgctagggctctatctattgctggtcttggagtaagtcaagtactgtgaagctcagttatgcagttgagcttcacacattaggggaaacaacaagagaacagcacatctggagtgcaatggatgagcctcaaacttaggacgaatcactttggtaaccataggatttcccctgccagataagtggcagtccacatacctccgccctgccacagctccatatgcctcaccctttacacccacggttacttgccctgagaaccacccccgcctatccccaaccaccccaagcccttctagccctaacacacagctgggactctcacatccaccagcggtcctggacttgctcctacagcacggggaattctccctggcgaagcagcaaccctgtgctgcctcatctacacagaaatgccctatcggtgatgtcaccgacagtgcctttcccagtccccttctgttcttccgccccaccctctgccactcagccgaccaacacgctgccggagcaggcgggggaagtgacgtctgcctgtccctcctttccttcccgccttgtcctttggggaggtgcgccaagaccctgcatctagtctctcccaaagaggtgactacttaacctgtgccctgcggaggaaccttttggcggccagctggaagcctgtgcacccgtcttcaaataaaggcttttaattcgcagactagaacgtttaggattacaaagaaaactggttcctttcaaatctggttatgtttgtgaaatagcattccgcttaaaattg

SEQ ID NO: 34764 - DNA, 2730 bp, Homo sapiens
agattaatttgccgggcgcggtgtctcacgcctgtaaccccagcactttgggagggttcacgaggtcaggagatcgagaccatcctggctaacgcggtgaaaccccgtctctactaaaaatacaaaaaattagccgggcgtggtggccggcgcctgtagtcccagctactggtaggaggctgaggcaggagaatggcgtgaacccgggagactgagcttgcagagagtcgagatcgtgccactgcactccagcctgagcgacagagcgagactccgtcaaaaaaaaaaaaaaaaaaaaaaaagatgaatttacagtgtcatttgagaaggggtattaaggaatttgccagggtactgacgcgtgtcagttgcaaactgcaggttgagagagagctaagtattttctgtccatgaaggtgataagcgagggcctgaagaaagaggaaggggggaggacactggcgccagaaataggaaagggctgcttgggggtgggaaggatgggtcggggtgctatctagaaagctgcctggcaatggctgtgggatgcggaagcgagacatcaaacaagaagctgtcgcttaaataaagtctgaagaaagactagatatgtaaacggcaggagatagtagggaaactggacccgtctcctcataaaacttcccgccttatatttcagggaggatcgcagcgcatttcggccaagacaggtgagactgcggttttgacctgcgggcctcgatgaattgcgttaggacacctgggctccgggagagccgttccactccgcaaagtaagcgtgttatgtctacaacccaacggggacgcgctaagagccctaaaggccctgctttcatcccaaagaacagcccccgcctgcgtagtttgtagccggctctatgaggtgagaacacattccccgctagcacagaaatcctacagactcctgagggggctgcagctagaagcagaggctgtgtgaaatgtgactgggggctagggaaaaacacgtagattttcacagaccctgagaacccaagagactgcagaccatgggcagacaaatctctgcaaaaagcagccccgcctagataaaggaagagctgtgcggccttcgcgctagctagcttgtgtaaaggtcgacgattcttatttctcccggggcggggagaaagcgacatattactactatttctcagccttcgactgtgagagtaacgattaagactaaaacacaagccagtaaaaaaaacaagtaacccttgctgtgtagactattctttaaactacaaaaaatcaggggaaagcgcgaacgcagtcccccactaccacaaattatgcagtcgagtttcccacatttggggaaatcgcaggggtcagcacatccggagtgcaatggataagcctcgccctgggaaaaccaccttcgtgatcatggtatctcccctgccaggtaagtatgagctcttgcacctccgccccgccacagcctcacacgcttcaccctttacacacacggtcacttgccccgcgcagccccccccccccccccccccccagccctcctagccctgacacacagctgggactctcaggtccgaccagcggtcctgaacccgctcccacggcacgggaaatccttcgtggcgcagcagcaggtggggaagcagcagcccctgcgctgcctcatctacatagaagtcgccctatccgtgatgtcaccgacagtgcctttcccagtccccgtctgcctttctgccgctcagcctaccaacccgctgccggagccggcagggggaagtgatgtctgtctctcccttttttccctcccgccccggcatctgttctcgcccgaagaagctggtccttagcctgcgctgcggagcaacctttcagtggccacctggagcctgggcaccgttcttcaaataatggcttttaattctcagacgagaacgtttaggattacaaaagaaaccggttctcttcacatccttatccttgtcatgtagcattccgcttgaaattggaagccgttcaatgtcagagagaaaccatatttatgaaatgaaagaggcttctcagatgactgcaaaccagccttccttactggttttatcactggtaatgttataaagacagttgtccagtttcatgaatcttgtaggtttttgtttgtttatttgtttgcttttgatgttgttgttgttgctgttgttttccaaattcagtattgtagaaaaatatgctgccccagaagagatgattggacactctccagcgtggtgttggactttgtcatctcttgcacagccatctccagaccttagtgtttacctcacgttagttttttatattctgcaaagacaaaaccaaaataatccaaatttgacacaaatacctgggatacatcttatttgagatgtttaacaaatgtctggatcatcttttcttacattggattataacgcaggaaacactgtgaagtaagtaaagttggaattcccaagtcaaagaccatttgaatatttacaagtagatttgaggcaggaataatacagggtggccgcagggtaacaaattctaggcagcagatttacatgacttgaggctatgggctgataagacgctgaaaaaccagggtgtggaccaagctggctaagactgactggacccaatgtggtgctggatttgatgtaggttttaccgaggccctcattatatgctcat

SEQ ID NO: 34765 - DNA, 1312 bp, Homo sapiens
ttaatagaacaatcagtaaatccaggcacatcctggagatagtactgaactcctattactaaaatatgaaaaaatggaggcacgtacattactcgtttaagcgcataagggactgaattagaatttatcacaccaaaagtgggttcctaggtatctgtttcaggatcctgagttacacaggtgtaaacccgccatttcaggagatacccggttaagaatcggatgggggaggggggctggcccttgacatggatcagtcataaattaggggtttggggctggcccttaacatggatcagtcataaattagtggcttggtactccgggaagataaaatcttccccatttgtctagtgattgacaatgcgtgaatgctttaaaagttgcaatcagcgtccctggatgggctcgaaccaccaacctttcggttaacagccgaacgcgctaacccattgcgccacagagacaagcactaccagttctaataggcaatataggaagggcacactcactaaacttcctccgtcccttctattctcagcgcccgcctggcaggacgactgagcaaggctttggaaaaccagagagattagagcggtgagttgcgctggtcacattggatacctgcgcgttaggagattctggagccagacggagagccgaatggccttcgcccgccctgcccctctcttgcttcagaagcccccagaaactccgcggtcggcgacccagcccgagccgcctgaggtcccaaggggaagctgaacgcctggtgggctcccgggatggttcttcccgttctttgtgccgccttcacccagtgaaggagcctgtatccaccctgctcagtcgcttttgggctgctgcggagcttccgctgccatcttcggatcctgtgttccccaccggggctccaccagggcagggatggtggtgagggtcgctcctgggtcccctcgcggggagcagggtctggcactcactaaggcgcacgactaggacttgtcgaatgaatccatcgtctcctttagcttttaatcctttaaagagcactgagagtggaaatcaagagattttttccatggggaagttctttttacaaagcattgatttctcggcaccccgcggggcgtgcaactggcagggcctctggtgggctttctgccgggtggagctgcgggggctcagctgggcgggggtcggttcctggggccgtagggtgggagcgggggaagggaaaagcaaaagctgggaaagaagccagggagacatgaaccagacatccagacctcctgaaaggctcgtgcagacg

SEQ ID NO: 34766 - DNA, 546 bp, Homo sapiens
aaagacacatactagtgtgatagctacccttaaaaattctcttgacaatattatctgtcttgtatagggaaaaaattctcttgactaaattaaagagcaaaatttgatccaaaacaaagttaaaattcttcataagctcaaactgcctgctctggatcccttccaggattcacaataaagtctgctctaccttgcagtttagtacttaaagttctgtgcttttgctgccatagcctgggttcaatttccagtcagggaaccagtttattttggcttgatatttgtgtgacttttgactttttggaatacccatttattgatccttttcccgttcatgggcagctttttttgttctttttgtttgtttgtttattaagacagattctcactctattacccaggctggagtgcagtggtgcaatctcggctcactgcaaactccgcctcccaggttcaagtgattctcccacctcagtctctcaagtagctgggattacagccacccaccaccatgcctggctaagttttgtattgtattattagtag

SEQ ID NO: 34767 - DNA, 4293 bp, Homo sapiens
gggaacaccatgaggggagagtaagaaaaggagaaggaaaaggctctttccagtgaccaacacgctgaatttgatgaaaatccataagaggttatgctaaactgagaagcataagggtggatctaccattgccacctcctctttgtagcaaaaaaaatcttaacacggccccctcccagctgttgcactgaggtgactaaggatacattttgaggaagtagctccaagaacatttccattttcactgtgccttcacatacatctaatggaaatgaacagcacccttcatccatccacggaagcgattaagaaaagggtgggatggaaaaattaacccaacaatattagatcaatacgtagtatttaagtgtccataatgtgccaggctgaagatgcacgggaaaaccacactagccggtctgtcaagggcttgagaataccataaacaagaaaacagacgaaccaatttcagacagctgctagaaggaagataaaatgagacaggcaagtatgagaggcgcgaattcctgagtggatgacgtaggtctctgagaggtgacttttgagcccgtatctacatggtaagtgcctcgcagtgacctggggccgtagcgttaccatttaaagcacagaccattaaatgcagaaattatcaacaaaatgagaaataggaatttcaaagtctcaaagtgaacgacggaaactgaaatctacaaattagaaaaaggcgcagaattttgaatattcttgtcgcccaatcaggacaaggctgggacccggctgcgcggccttcgtccaaaatacacagaacggctggtatccacaggaggccccatcgcacggcagaactggtgaccggacacaaaagctgctgccaagcgtcagtcatacagagctgtcacgcagtgtttgcggaacccgggctgaattgtgtcctggagttctcttaaatgacagccgaactcagccacttcgttttagaatgaaacagacccaaggagccaccagggcgcgtgtggggcgggagtgggggcgggtaaagaggcggattcccaacagcctaattgagaaccgactcctgggaaggctaagcagcacaatgagtaaagacacgctctagattcaaaagcaaatccaatgacgcactggggacctcgagttccaaatagttaaaaagctacgtatgccatttcccatgaccttcacactaaaataacttactttatgaaaagaaactaagggaataagtgaacaagctcttttctagtgattaggtgggtggctctgaaaagagcctttggagtcaagcagccggcgactcgagcgagcgagcgccaggtcccggcagggactcacttggagctggtgtacttggtgaccgccttggtgccctcggacacggcgtgcttggccagctcgccgggcagcagcaggcgcacggccgtctggatctcgcgggatgtgatggtggagcgcttgttgtagtgcgccaggcgggaagcctctcccgcgatgcgctcgaagatgtcgttgacgaaggagttcatgatgcccatggccttggacgagatgccggtgtcggggtggacctgcttcagcaccttgtacacgtagatggagtagctctctttgcggctgcgcttgcgcttcttgccgtctttcttctgggctttggtgacggctttcttggagccctttttaggggccggagcggattttgccggttcaggcatggtaagacacagtacaaacgcggcttagccaagaaaagaagtaagagaatgggcgggcctgattcttttataaccaccttatgcaaattagggctccgaaagtcgttcatttccattggtccgtgtgcggaccttgcgttttcagcaatgcgtacgtaacaacaccgactcttgacttgattggccggttctgaagccatattaggaccaatgaaaaactcgttcttgaccccacccctaggaaagcttataaaggctttcctcttggttctctttcaatcttattttgttgcgaggttctgagcgttgtctgtgtttaaccttgatttcagtcatgtctggtcgtggcaaacaaggaggcaaggcccgcgccaaggccaagtcgcgctcgtcccgcgctggcctccagttcccggtagggcgagtgcaccgcttgctgcgcaaaggcaactacgcggagcgggtgggggccggcgcgcccgtctacatggcggcggtcctcgagtacctgaccgccgagatcctggagctggcgggcaacgcggctcgggacaacaagaagacgcgcatcatccctcgtcacctccagctggccatccgcaacgacgaggaactgaacaagctgctgggcaaagtcaccatcgcccagggcggcgttttgcctaacatccaggccgttctgttaccaaagaaaaccgaaagccacaaagccaaaagcaaataaatgcagacaaacaaaccaagaccaaaggctctttttagagccacccaagttttcaaaaaaagagctaatgcgctatttcgtgatcagcccttcatttgacactttggtggctcttaaaagagcctttggggtgaatgagtatggtgtcaagcctcttaattacttgttcttgccaggcttgtgactctccgttttcttgggcaacaggacagcctggatattgggcaagacgccgccctgggcaatggtgacacccccgagtaacttgttgagctcttcgtcattcctcacggctagttgcagatggcgagggatgatgcgcgtcttcttgttgtcccgagccgcgttgcccgccagctccagaatttccgcggtcaggtactcgaggaccgccgccaggtacaccggggcgcctgccccgacccgctccgcgtagttgcctttgcgcagcaagcggtgcactcgccccaccgggaactggagaccagcgcgggacgagcgcgacttggccttagcgcgggccttgcctccctgctttccgcgtcctgacattacggctaaaattgcagttacagcttcttttacaaggagaagaatgtggaaagaataaccaatttgatgtaatttataagagctaccgggaggggtgaagggaagtcgtttgattggctaaaagcggagccgtatctaacagccaatagaaaagcagaaagccgcctcttggtttgcgtcctgcactgaaaggaaatgacggattttgtaagtatctaccaatcgctgagagccacattaaagccccttatttgcatgccaggatctttaaagagagcaggctttcaaacaaaatactggttttgttttactgagaggcactgtgggtttttgttttgttttgctttgctttgtttagtttacagccgggaaatcccaatatggaccctaaggaactgcagaagacatccttagacggagagttactctcacgaaagagtaggggattctgaagccgatgatccccttgagctctaaactgccaagtcccgccctttctgtctcgtcacagccaaattccctttaaaaatacatgtactactaaggctgcctcctttctcgcccctaaacttaagtcgcccgcagcggcgtgtctccgccccacccccacccgcctgcactcctcggaatccggtttgaccgaggctagaatagatttgtcatcctcctcttgacctccaggaggcggccttcaaacttgctcccttggctttcaaaatgtcgccctgtttttcttcttacctcgccgacttttcttatcctgctcccccatgccactgcccatctctaaatctgcgagtccagctggactgtttccctgtctccaattcttcacttatcccgaagagtcttacccatttatatgctttcaactaacgtccaaatttgtttcagaagctcagacccttatgcctaactgcttacagaatacttcaacctacttatcccaacgagcacctcaaactcaaactctacctcagcctatccgaacgcgaactcatacaaacaacctcccctctttgccctcttttcctgaaatgcaccagcatacttacagatacctaagccgaaatctactctactcttcccttcgtcttagcatatccagtcagttgcttccttaacatcccttcagactttttctccatgctcccttgtccacctcatcatcatcccttagatttcagcaacagccgggaaagggtaattttgccgtcaggcactaatcgctggcatgactccagcggtcttagaaatctttcctgaaagctctcctttttttct

SEQ ID NO: 34768 - DNA, 1395 bp, Homo sapiens
tgtattcaatcagacttccattttcttgcatataaaataaaggagttgggctggatgatctacaagatctattggcagtaaaatagatctaataatcccaatcccaactgcgcgtgaattccctttttctttgcattgctgggttcagactttctgaccaccttaccagtggggagaatccgagactacagttcccatgagccctcagggcaccacgtggtgcctgcccgtgctaccaacgcgcagcgaggactccatttcccagcgtgcctcaggaagggcgccaggactgcattttgctccggagcgtccagagtcctggccctgagcgggaatcgcagtggccgaggctgagcggcaggtagaaggggcgtctccggggcttcacagggaacacaggggcttcggcccaaccacaagtacgcagttgcacatgccctacttttgcccattctttgcaaatcccctaaggaacgaacgcgcctcgcgtgcgggcctttctaatcttcgcttgtcccttcacttccacagctggaggtcgaattcaccacgtcacgtagagaaaaggggcggtgtctcgggtctccccgtgtggcatcaaggcgggctccctataggagctggtgtggacgtccgggcgtggggttagggcggatgcggggatcgcggggcgggtgttgacattgtgctctcaccaggcggatcgccccgaccctcactcctggcgtctgagtctctggcgtagcccatgctgagtgggcggctggtcctgggtctggtctccatggctggccgcgtttgtttgtgccagggcagcgcgggatccggggccatcggtccggtggaggccgccattcgcacgaagttggaggaggccctgagccccgaggtgctagagcttcgcaacgagagcggtggccacgcggtcccgcctggcagtgagactcacttccgcgtggctgtggtgagctctcgtttcgagggactgagccccctacaacgacaccggctggtccacgcagcgctggccgaggagctgggaggtccggtccatgcgctggccatccaggcacggacccccgcccagtggagagagaactctcagctggacactagccccccatgcctgggtgggaacaagaaaactctaggaaccccctgaaccccaagagagggaggaccaggatccgaatgggctgggtgagcacgaattaccgaggccttccctttgatacagtccaggatttgtaagggatgaagacccctgggccccattctgttggggtccatacatactctccgaagatagcaacttgcttcaggtcaaagtgaacccgagaaaagagaagaatcactcactactgctcttgccctggactattcaggaagggcagc

SEQ ID NO: 34769 - DNA, 1872 bp, Homo sapiens
tgaagagaggcttaaaagaaaaaaatctttaggttgctcatgttattccaaaacagttgtgaatactgctgggaccctccgggagcaattcgccccttgtcatgtactcaccttggtgctggccagtgactctatcctttggcatgtgggtgttgactactggtccagcctggagaaacagttcccacagcagcggttcactaaccttctcatccaggccccccacgtacacagtggcatcttgaagggagggagcaaaaagagcaagcgtgagagtgtaacgggaaggaaggaagtgatggaaacatgaagatggaacccaaccaggggaactggggaccgcggtaggggacaggagcaaaaaaaaaagtttaaacccttaaacttctctcttcccaggacttcgggaatcctctgaagtctaatttagtattgtgagtgggtttttttgattttttgagtgagaagtcagcaggggaccggacttaagtatcacacccagaggcctcagccagcacccggccaccccgcccccaacaggcagagggccggtctcgcgccctctggggaagggaggagtccagtctcccacccctgcagagacactgctggctgtagtcggggcctcctagccacgctgagcccattccagactttccccctccagttaccctgattccgctcggagatcggcccggcagccatggcgaaagagatcccgccgtctcccagcagcggttccgccttctgacctcagcacgacttccacttccggggcgaagacggacgtagcggtgggcggggccgcggaagaggaggtgcctggaagcggctgcagccatcttaggagcctccgaaacttaacctgggtcgggcggtagagtcctcggctcgcgtcctgaggtgccgctgctagttgtcttagcgaggagggcggaacggaaacgctcaggccctcttaatgcactgctagacttgaaagaatcacactgctctcaaaagtgtaaattcgaaagctaaaagaacaaaaatttcagttttaatatattttgtggacagtgattcttcttctgttgtccagagaaggatgtgctgaagagttccccccaacccgaggacttgggggctttcaggcgcagagggagccttccctctcgcctgcagccttcttgcagatttggcctcacaaccctgatttgggctggaggtatttggttttccctcaggggaggagactgcgaaatgtctgagcttagagtgacgtctgcgctcacctcgtcctaattgcatggggagggtgagggctgctccgcgttggtgtgtgaccacagctgaggggtggatgggatcggagctctagagtctggatctctagaacactctggccccatctgcctctaaatgggagacacacacaagagaaccctttccccaaattgcacttgaattttgcagagcctcaccaaacccagttcccctatttccttagcaataatatggtggatgccttcctctcttgggtcatacaccccttttacccaccactttcctacctaggagaatcctttattcaaacacaagaaacaatgccagcaatgtgtataaatactatgctttaatgagccccttaaatagaaattccactacaaaaatacagaggagatagggtgtttcctgtatccgcctcattcccatagaaaactataagggaagaaatagaacttggaattaaagcagcagcaaggcgaggtgagaatgcgatttctaggccatcttgttgggactgatgaacagcatctctgatctcatgatttaacatctggttatccagaagggatgggattggcctaaaaaaaccgatcaatttctgga

SEQ ID NO: 34770 - DNA, 1264 bp, Homo sapiens
ctactcgggagcctgaggcaggagaatcgcttgaacccaggagacgaaggttgcagtgagccgggatcgcgccattgcactccatcctgggcgacaagagcgaaactctgtctcaaaaaaaaaaaaaaaaaaaagcggggtggggggaaatcaggaggagaaaagaattgggcgatttggatcaatacttaaccaggaatggagtgggcaggagctgagggttaaggctgcctctcaccaccccacacacccccagtagaagcactagatgaagggaagggtggagaggcaaggggctatatcagatttttccattttcagaatcctgttctggctgcaggtttgtgccaggagtaaaggctgctgggaggggcagccggaggagggaggtggagctgagtgactcacaagatgagtcacagatccagttataagcacagaaagaggccaaggtccttcccacccctactcctcttaactgctgccagccagcttccgttgctcttttgtactgccccttacccacttggccaatgcaagagatggcacagagaaagtctacatggggacatcgtaatattttgttacccaactgatgtatggtggcaaaataccctgtgatttgcagactggctgtctgcaaagtagaagagacagaatgcctgcatgactcatccagatctatagttgaaaggcctggagggaaagaaggaaattagaaaaatctggagtgcaggtgattccaggccgggaaggggcttctaattctgtcttctcacctgtggctatatgtctggggcactgactcattggagaaggaagacacagaggccagtcgcggtggctcatgcctgtaatcccagcactttgggaggccgaggctggcggatcacctgaggtcaggagttcaagatcagcctggccaacatggtgaaaccccatctctactaaaatacaaaaattagccgggcatgattgcgggtgcctgtaatcccagccacctgggaggctgagacaggagaatcacttgaacccaggagacggtggttggagtgagccgagattgcaccactgcactccagcctgggcagctgagcgagactccgtctcaaaccaaaaaaaaaagaaagaaagaaaaaggaaaaagaaagaagactcagagtccagaggtgtctgagtaattcagagacaatcatctctgaaatactctttattgagaaaaaaaatgtgactggaaccttggacacatggctaaaaggagtta

SEQ ID NO: 34771 - DNA, 713 bp, Homo sapiens
aaaccctgtttctactaaaaatacaaaaattagccaggcatgatggcgggcacctgtaatcctagctactcgggaggctgaggcaggagaatcccttgaacctacgtggggcagaggttgcagtgagccgagatcacaccacttcactccagcctggtcaaaagagcgactgtctcaaaaaactaacttaaattaaattaaagaataagttattccacaaagcagagtggggacccaaaaggttcataacaagattcaatctctgtccattaacctcttgaacccaggaaacacatctactccaaacacgtctttctccacacaggacagatgactgtcaaataagttcaactgaaaaagatctcttctttcagactttggcagaaactatgtccctaacctgacagcctggcaccaatccaacattcctctgaggttaaaagtcagagggaagcaataacagagtaaagaacaatctctgatcaaattctgccaagtttacagctttctatagaagactcattcattaagttgccaggtacacttgccctaccatacccaccaatcccctgccttttgggaaaggtcaaagcataattgttgaaggcaaaaagtggcaaggcaaataaacaaaaaagatttgtgggttataaaaccagcaggtcactaacttgctaacactggattttttttttttttttgagacagagaaa

SEQ ID NO: 34772 - DNA, 378 bp, Homo sapiens
gggaggaggaggaggaggaagaggaggaggaagaggaggaggagggggagggggagaagaagaaaagcagtggctttcaacctttcaaataaaacagaggaggttttcaactatttgttaactgaatggtgtaaagacagctctcacctggcatcatcttccaactgaaagggactttagcaattacgtaatccaaatacctgcccccatgcaagaatccttctattacatctctgacaaatcacatagtctccacttggatacaaggtctgacagggacctcattactttgctataatgtctactttattactggacagctttaactgttagaaaatgcttttctaaactaaaacaaaagctatcaccagcctcaca

SEQ ID NO: 34773 - DNA, 620 bp, Homo sapiens
caacctcaaaactcttttctagtcctctgaatacagaaagctttttctatttgaatgaattgagcaggcaagtttgactcaagagtccctacctgcatactcatcagagagaactgagggaaaacaaaaaaaattccaactcgcatgaccacattacaatgttaacaacacattactcaccattgtgctacaagaaagaacctgcaagcaggcacgaactttcaggaagccaaaaagaaacaagcaaacaacattctcctagttctcaaagcacaaactcattcaaatgccaaagcaggtcacactgtccagtttatacccaggtacaagtgagtggagagggagaagggagaggcaaggggaagagaggaaaagcattattgtgcaagtatgcttttcagcaccaagacacatttctttcttggattcatcaagaccatttttaacaacaacaacaaaaaaaaactggggttccacctatttttatgcctttatatattcacagagaacatccaatatatgtaaacagtggcataatgtaacaatggttgcagacattccttttggaatccgttagagctatatctaaatcctacctgttactttcttgatttgtgacc

SEQ ID NO: 34774 - DNA, 3870 bp, Homo sapiens
aacaaacaaacaactctcttctattatattaaaaagtcaactgaattcaggcattcatgagaaaaactgccctgtatctatcttccagttacacaaatttttaattacctgaatttatcagaggctacaaaaaagattccacagtctgctattccacagctcctaagttcccataggaaagatactgctgaggtcacatttcaaagcgctgtttaaggattttccctttggtgggatgagtgtttagggtaaggagagtgctactcatacacacatacacccacactataatggccagtgtcttttagcatgcttaagatactcaggagctccaaaactttgacaagtggcacttagtgccctcataacaatcagaatacttattttggttacatacattgaatctcaaaattgcaaataaagcctcctgagaactaggaatagtggtggactaccaggcagctctccactcattcctaggcttcttcaacccctttgatccccatgccctggaataaagtatgcagttcaacttagggagttgctagatgcagatataaatagaatttacccagatatcatcactaatattggcaccaatcaactcacacagatcaaaacaattattgatcatcaacagattctgggaaaggtgtatgtggtttttaaaaattagattttcgtctccaaattaagtcgttttttaaataggggtctcaaaagaaagattaaacaaataaagctttgggaaattttccaagttgttggcaacataaggccactaaaggccacctaatgattagcattcattaccagtcaccgggccttatacaagtcagtagatagccagctcttgctttggcaaagttttacatttttttccgagggagtcttcagtattaaaagcaaggaataagtcaaataaggcaatgacaataaaaaattagtttggcactatcttccttccatctttccttctatcttgaaagtgtaatgtccaaagcagatatctgttcaattctaaattattcatgttaacggataattattggcagaaaggtggtgataatcaaaaatgagggtaaaatcgaaaaaatctattttggttttggaatatatgttttcagcatatttaccttcttaattattcctagtatgagctaatatttgcattgatttgcaatctctaagtacatagtaactggccactttgtcagggaggtgctctgaggcaagctgggtcaatagtggaaattagaacggtcgggggtattcagcctgcagaggagcaacatcaagttcatttattttacagttttgttcagccttcaaaatatcaatagactagcacagcaggttggttactgaacgttaaaagaactacttgaaaaacaatgaagacaaagcgtataattaattcttcattgtttgcgcataatgtatttgtaagttatacacagcaaatatttaactacctctgattctccctagccacccagcttccgtccctgaagtcttctccccatcaggaatgcaatctcatttagtaggaagaaaattttctacatgttttcagaagttacatagcatagaaacttttttaaatatttaggggttagcaactctttggagccagtcttaccgccacctctttctctactctgtccttttccacctttgaaatagattctgaaagacaaagggatccagcctcctcaaaaatctcctaaatatacagtactagaggccaaagactgaaaaattagcagcatgtgaatttctaagcaaagcgttacgtagtacgtataaaaagataaggaaaataaaagtcaacgtcctgctaattctaggctttgcattcgtgaaaagctgcctgaaaagtttgtggggaacttcttccataaaattccaccagtcagtttctaatttcaaatttttacatctttattgtgcccagagaagccacctaggttagacaagaaagactaccacgagcggggagaaagagactctgagcgctggtccttgtgagccgacaagctaaaaatacgccggcccagtaaacaaatcccattccatcccgaccggagccacaccgttaacctagtaattatgagaagagtgagatcacgcagcccccggcttactcatcatcagcttctaaagtttccatcggctcatggcaacttttcttttttctaaagttcttaagactgccctagaatccgtcaacctccgtctctctccctctctcacacacacacacaaacacacacacacacctttttctcgcctttcctccattactgtatgcaccttagtttggctatcaataggaagaataagcttatttgcttttcattttagtattatattgagattttaaatgaactttatcctactgtggggataatacactgcatcttaatcaccttaaaactccaccatccctcccgaaagtctagctgacaaggggggaccgtccaaactggccagcacagctcaggaagggaggccgggagctggagagcgcggggtaggaacgcaggacgcaggtgaaagggaggaggaaagatcgggacgaagcaaggagcagtcagggcgagaaaggagtgccgaggggagatggcttcgggtgaaacagattcagaaaggagaaaggggacagtggcgatctgaggagcagagtttgcgagtctgagaagccgggaggggcgggagcagacgggggacggtgtcaggacggggggctccgttaccctcgcgggctcccggggcaaggccctaggccggggcggagcgcggggcccggccgcctctcttcattcctcggcagtgaccccggggtccggccggcccctcccccgacggcgatggaggtggaggcggtggtggagactgcgaccgcagctgttgctccgcacgggatctggagctggagccagaaaggactgatcgggactggcctcccccagtggctttttgcccactccgcacccggtcgccactccggctccggcggctggttcaggatcggtggctttctgctgtccggccggaaacaggcgccagtttccggccggagcgggttggtggtgacacccaggccgcccccgggcctcctcccgctccgccccgtcgcagccccgcctttagcgccgctccccaggctgcggccagtttggcgcttgccccgcgcgtgaccccgtgttttcccgacccgagtccctaaagctcctggtctggagcattcttgaacaggagttggaggagtacagggtggactcttaggactctggggtagaatcagttggctacagccgttgggaaggagctgaaaggggtggagtagttgtagaaaggtgagagagatgaaaatacttcagaatgaaaagactgacattctagtaactctacacaatcattctggagtgaccggaggaagattagcttcttccacaccagtctccacccaattatatatttctcttgttccttcactcttgaagtgaacatatccttctctgtaaacacttaatatttatttacttgcataacagtgataccctgttgatacatctgctttagactgctaacagtaaaaaaaacttacatagtgcgtttgttatgtcttctagtgcgtttgttatgtcttttaaaacattatggcataattcaaatatgtattgtatccctgtgatgtgtatcactgctctcagtgatacagggggatacaaaaattaacaagacataatcccagacatcaaaggttttacaatttagtaaaatacataaaactatattatatgtagcagaacttgtatgtgtcctacctgagtgacaatgagctatggctatgagaacataata

SEQ ID NO: 34775 - DNA, 2432 bp, Homo sapiens
ctagggaggtggaggttgcagtgagccaagatcatgccactgcactccagcctgggtgacagagcaagactccatctcaaaaaacaaacaaacaaaaaattaaatatctaggtatatgctgtatgggcctctatttgtacccttgccccagaccccacaaagttagaggtagtcctatttaaaattaaaactgcttgagactagagactattaacagagaactacttaaaggaaaatatgtttctctgctatttctgaaaaactttgattacaaacttagatttttatttaaagctactgatttatcttgaaaattttctctgaaagccaaataggcccctatcatataattatctgtgtctgaaatcacatttccccccaaaatgtttggtgcacctaaataacaactgacacttgttgattgcttagtttccaaacagggtgtggatctttgaccctaactttatctggccctgttctggtctctgctggggcagcgccttccaccttttctcctctggttggttcagtctccatccccttacttctgttggctagacttctaatacgacaaaagcaattcattttttgagtacatagttttaaattttttctgttattttgaagatttttttaatagcaaatacattggcccttttctatttctttctctcaaaacacacacacccctaacaattgtttttaaaatgagtcagatttttcccccttcgggtcatatacttctagtaggaaacatgttccattttgctatatcagacagtattttgttaaggcttttgacgtctgtttttttccagtggcggtgaggaagaaggtaggccaggtctgggcagggtcctagaggctgggaggactggagtcaggttttcacacacagcagctgggagggaacaaagccagagggtgaatgtaaaactatatttggggaggtgtggcaaaggttaatattaatctggaaaaacgagatcttgtcatcttaccaagttcaagggtcaaattcagagccaaaaataggagatgaagtcagagatcaggaactcagtaaacccaagtccagtagttaaagcagatatgaggtgaaaggaaccagtgctacagagtgaaacaggtggagccccagagctccctgtatgggatgagtgaacctgaactaagtccgcattggatttaatgagagaagacacgacagcaccagcccagtggaatccaagttctagtgctcagtgaatacttcttgcatgataaaatgggtttactaattagtcaacaagatttatgaagcatatataagattcattaaaatgtgcatatcaccagcaaatttagcagctttcctaaagagaggcagaagggagaaaaaaggtgtgaatgttaacatttaaaattcattaacattacagatgcagtggttactccagactttctcttgccactgaaacaacatctaatccagtcatttagaatacagcttcttattccaacatgaagaataatctaaactctccctttctctctctccttaatcattcttcctgcttcccagcctgagcctggaacttttaatggaagtaatgggtcaagtcaagactagttccacagtctttagctgtgtcaaatactgtaaaatctcatgctgggctgggcatggtggcccacaccagtaatcccagcactttggaaggctgaggcaggtggatcacctgaggtcgggagttcgagaccagcctggccaacatggtgaaaccccgtctctactaaaaatacaaagattagccaggcgtgttggcgcatgcctgtaatcccagttactcaggaggctgaggcaggagaatcgcttgaaaccgggaggcagaggttgtggtgagccaagatcgtgccattgcactccagcctgggtgacagagcgaaactctctcaaaaaaaaaaaaaaaaaaaaaaaaaaaaatctcatgctgaaggtctgaggcagctgatctggctgagagagcaactccagccgttggtaactgggattgttgaaaagagccgtaaccacatgtgatcacatgtgcagagcacacacttcacggcttcagggtgtgtttcccagcctagcggtagtgcctcacctgggagctcattggaaatgcagacaggagacttgtgggcatcaagagacaccacaggccatctaatgacatcactatgtctctaaaacaggcttctgcaagccactacaacaagtggaagtttacctgggccgatcagttaagagtcactctccatttacttttatttaactctttagtatcccaccagatttatcttatatccaatggtatgtatttttaagaacccaagagaaaaaagaaatatctcaaagtgccctatttactaaagagcccaaggagtctctttacccagcagcagcc

SEQ ID NO: 34776 - DNA, 2094 bp, Homo sapiens
tcaaaacacatctaaaaattagtaaaatgcctaaagggaagctttatttacttggtagaaaagctgaaagaaaaaaaaacatattcttcacaatttcagaggtgacaaaaatctcttatatttcagtagtttctgatctcccttaagggatttgagaattatatataatattgcataatcttaagctgattaatgttaaagtgctattggtctattttaactgtgtacttcttaaaatataatgaaagaatttatttggtaatcctgaatctattgacctcacaaacactggtcattattttggtggaaatattcataagcatttttagttactgatttctaacaattgtttcttattatcttcctgattttacaattccccaaagtaaaggtgcgaaaaacaaacatctaccctccttttcgacaaatgccatgatagaggggagacctgtgtggtgtaaagacaaatgcagacatttggaagttgatggttttaagattcagtaaaaacttgagagttttggcttcaaatccccacgctagttttagttctaccggatacgtgtcccctacccatttcaaaggacccagtcacctcggctcttgcctgagtttcagagtcccgccggagttagagctggcagagtccaattgctcagagcgccgaggcgggggcggggcagggggacgcttgcaggtccggtggtcccgcgggctgcgagcccccacggccgaccctagctgcagaccctcctggagaacctcaggcctttcccccagaaacatccctaaaaggcgttccctttgttcattcattcaacaaatatttgttcaatctcatatgcccttctgtcttgggaaaaccaattagggcctctgcagcctcaacacaggggcactgttcccgcctattaatgacgcaatgaacccgggaagacgaatctcgaccactgtttcgcaaataccgcgtgtgatttattaaatgccgtctctccgagtcccaagcggccgggagcattatgccacctcccttgccctcatctctcactgccatgcaagaaagcgttaatggcaaatagggcacgtagccacactccgtcgttcctgcttccaagcaaaccttgtgccaggttcctcatttcgcgaggctccactctcttgggcttcaggctgccgctgggcctccagcaccaaagggcaataggggtctgagagtccgggcctcaggcatcttcaggccgcaggtgggtggagaatagcgcccgcgcgtggcagcggcccaggccgtctcagccggatttttccatccccggggtaggcttggtcccctgtacactccagcggaactacaactcccagcaccgtggctgcccggactcccggaagccgaatcccggctgggaggaagcagctgagacccggccaacagactgggggttaatttagccagaaaagggggcgggaagggctgtagggtacttgtcaattcgccgccatgaacgtggtttttgctgtgaagcagtacatttccaaaatgatagaggacagcgggcctggtatgaaagtacttctcatggataaagagacggtgagtttgcttttgctcagcatttgtgaaggaaccctctcaaccttacaattgctcgtcccattccactgtaggacttagcatttaattaaacatacgaaaatgagggtcggtttgtgtggaattgaaaagttgtttatataaagcttgcccggtgggttttcagtctacatggctccagccactgcctagagactacttctacccggaacaatttattggaatcagaaatccttttctaaatgtccccgccaagaaatcattaatatgtcagagcacttggaaggctttgggatgggcctactgtttccactcaacattgtgtttttaaagtaaagctgttggagctcaagctgaaatgacagattatttgttggccacagaccagaaaacaaaactctttaaggtgatagaaaaaaatatttttggaaacttatggattgttcctgttcaaagagaccatgttttttgtttttaatcttgaagcttcagctgaaaggatagag

SEQ ID NO: 34777 - DNA, 1699 bp, Homo sapiens
gtgtctgaaaagccagcatcgacactgtgtctgcaaatccctcagctattctgagtctccgttttctccctgtgagatggagatcataaaatccgcctcatccttaggattattctcctgaagctacaataaggcctgaggcattgtacgctggaagaaacgtgtattaatagcaacttctgtcccaccccatcccccaacacgtcgatcccctccggagcataaaactttcccccagcatctgacctgcccaggccaccctagcacctaggagcgtgaattcctgatgcgggttgtgggtggcgcgccctcccggttcccgctctcgtttttgtttttggtcgggtaaggcgatgctgtagaggctggcgatctccagtcttcacgaatccgcacgtctctccattatccaccgcgcccgcccactgggccccggggcggccggcggccgggtctctcgggctccgcgtgtcgcccgagccgccgccggagcgagggtccctgccccctggggagcggtctccagccgcttcgaagccgccttcttccccctccgtgagtcagaaacaaaggcgggggggcggggggagcgcccgagctgcggctccgcgattcgccctttattctgaactcgcaacgtcagcggcccgcggatggagctgcggggtgcggactgggccgcccacagcgcaccgggccgggggagcggccgcgctgggccgggcgggcgggtggcgggggtgcgctcggggacccgggccgcgtgggcgccgggatggagggcgccaaggggcggggagcgggcgtgcgtgtgtgtgcgagtgcgaatgcgagggaggccggccttgagtgaaaccggagctacaaagaaggggagagtccgggagcgggagggcgcgagggaggagcggcggcgccggggcagctccgacgccctcccgcggggaaggagcccccgcggtgccgccgaggccccgacgcggggccgcccctcggctcgccgccccgcgcccgcgcccgctgggaatgatgaagaagaacaattccgccaagcgggtgagtgcgcttgcctgccctgcggccgccgccgcctccgcgctctgacgacccccgctccgtcggcgccgcggcggcctgggagacccacggcccggccgcgcccccgccccggcggcccggtcccctcggcctcggccccgccaggcgcccgcgggggcttttgtttgtttactcgcctcggggggcttcaacttggctgagtttccccacgacccgcacctcccccgcccccgggcgccgggcgagcgtttgcctcgcgctccgccgtggcgaggagacaatgggagagaaaaccagagaaacgccgttagtccccgcgcggcgaggacggggcggcgggggcgcagggcctggagggaacctgggagcctctccgcgcccggccggcgcccctgccacttgcagccccggttgtttattcgggagcgggggaggggagcggggggagttcctcggagtgaaaacctttccgaagtgggagcgaacctggggcggccccccgccccccggccgcagccttcggaggagactgggccgccgaggcggtcgtgagagacggacggagaggaagcgccggctggaatctcctaaccgcccgcttctcatcttgtcctggggcagggacctcaggatggaaacc

SEQ ID NO: 34778 - DNA, 1050 bp, Homo sapiens
aaatctaaaagcaggctttgggaaatgcagtgatgtctgaccccaactgcctggattcaggccagacttcacagggtaaggaacagtcctccacttcaggccactctcacttcagacaccagtagccagttcaggggttggttccactacccctgcaggtttgataatttgctacaatgactcacagaactcaggaaagcactatacttatgataagttaaacttttattgcagcaaaagggtacaaatcagaaccagccaagagaagagatacagagggcaaagtctgggaagagctacacgggaagctttgggcaccttctcctgtggagttccagacatcactgcccctccctgctacgaggtgtggcagtgcttgcgagtgctgccaccaggaaagcttgcccgagtctttggtgtccagagcccttgctggagcttgaccacatgctgcctgcatgactgacctttgctctccagtccctatgggggctggaactgatatggcgtgtttcggagcccccattataaatcacatcatttgagcatctggtggccaaactcctcaggcaaacaatgacattcctattgggcaggacattccagaggcctagagatcatctcccagtagccgagggccaaagccagacctctctttgggtaaaatcaattcttcactacacaggggagttttaccttttgttttttttaattcgagatcgagtgctataacacactgttctgtttaatctttgctctcttctttgacctgtttcttctctttccaagttggcttcaggtcacatgttgctctggagaaccgagaagggtgagcagacaccaatcatgaccccaaacagcaagaggacagaaggtaagtgaagtctttatgatcaagcaagaaatattctgtttacaatggaaattattataaattatctttttttacatgacattgaaatgagttctagtaaatgtatctgttagtaaggaaaagaccaaagcaatgccgggcagtgatgtcaaagtaacataatactgtaatctact

SEQ ID NO: 34779 - DNA, 2306 bp, Homo sapiens
ccagcctcggtgacagagtaagactcttgtctcaaaaaacaaaaaggaatgttccacatcaaactcatttacctgggaatgacgtcagggggaggcaggagaaggatacaactggagaaggatgcacagggggcttcaactgcattgttgatgtttcattttttaaactgagtgacaagtcgatcaatgtccattcttgataccactgtgtaccttaaatatttaataataaataaaaagaaatgtgcagttttgggcttttttttgttttgttttttgtttttttagatagagtctcgctctgtcacccaggctggactacagtggcgtgatctgggctcacgcccagatcctgagtatctgggactacaggcgtgcaccaccatgcctggctaatttttgtatttttagtagagttttaccatgttggccaggctggtctcgaactcctgacttcaagtggtccacctgccttgatctcccaaagtgctggaattacaggcatgagccactacgcccagccaggaatgtgtagatttaatgtgaatttagcaaatggtttgtcctatttgagggcagaggtgaggtcagcttatattaacatatccaaaaacttggtttgagcccagatttctgacactaaaaacaaaaaaatgccccatttgtttcttttctttctttctttctttttttttagagatggagtctcgctctgtcgcctgggctggagtgcagtggggcaatcttggctcactgcaagctccacctcccgtgttcacgccattctcctgactcagcctcctgagtagctgggaacacaagcgcccaccaccacgcccagctaatttttgtatttttagtagagacggggtttcaccgtgttagccaggatggtctcaatctcctgacctcgtgatccacctgcctcagcctcccaaagtgctggcattacaggcgtgagccaccacgcccagcctatttgtttcattttttaaaattggactgaaccttaggagaaaacagaaaattgtactacattcttgcatagctagctaatgtaaatagcttcaagcaacaaactagatattattgatccgtttcaaaagagctgagtcaggctgtacacggtggctcatgcctgtaatcccagcactttgagaggccgaggcaggcggatcacctgaggtcaggagttggagaccagcctggccaatgtggtgaaaccccatgtctacaacaaaaaaatacaaaaattagctgggcatggtggcacgtgcctgtagtcccagctactggggaggctgaggcacaagaatcgcttgaacccggtaggtggaagttgcagtgagccaagcagagattgcaccactgaactccagcctgggctggaggtttttttcatctcggaaaaaaaaaaaaaaaaaaaaaagagctgagtcagattctgacttgtctaacggactcagtcgtgatgttttgcctgtctgctccaagttcccctgttccagacacatctctcacagcattacaatgatctacatgccctaggaatagcgactttccatcatctgcctcatcagagcaaatagaagtgtaagtggcaatgacgttagtgtttgtgtgtgtgaaaacctagtgtgaattttcccctttctctggcaaaagctcacaagccatcattatagaaaagcagaagaaaaaactgcttgttctgcttttcctgacctcagaagcagtagttgttaaaactctttaaaaaaaaaaaatggggtcttgctatgctgcccagacaggtctccatctcctgggctcaagcagagctgggactacaggcacaccaccacaccaagcaaaactgtcttttgatttaaaattacttaaatacttctttaagggtctcctatagtcacttatcttccagttacctaaatcactagcttcttttttttttttccttcagagaccccccccccaaagtcacatccgttgcaattatcgggcaggtactgccctctagtgtttatacttttataataaaaattttacacactacccttttaactgacctcaaagcatggaaaatctgtcaaaaactaaataatatcctattaacccaagatttttcaccttcgcactactggcattctgatcaccctttgttgcggggctgtcttgtgcactgtgggacgttttggcagcacccctggcatcttcccacttgatgcagtagcactcccacacacatcccggtgtgacaaccaaaaatatctccagacacagctaaatgtccccaggggaacaaaatc

SEQ ID NO: 34780 - DNA, 1178 bp, Homo sapiens
tagtcttttagtactttgactatcccgttcagtcagaattgtggcatttaaataattacatctcatatatatatgtattttttttttttagatggagtcttgccctgtcgcccaggctggagtgcagtggggcgatctcggctcactgcaagctccgcctcctgggttcacgccattctcctgcctcagcctcccaagtagctgggactacaggcacccaccaccacgcccggctaatttttgtctgtttttttgtttttttttttttttagtagagacagggtttcaccatgttagccaggatggtctcgatctcctgacctcgtgatccacccgcctcggcctcccaaagtgctgggattacaagcgtgagccaccgtgcctgtccaattacatctcatattatcatgttggctataaaactgtatgcaccctttttatggttgctaataaaaatgtttttgctcaaatatacttgctatttacctttaagtgaataatgtattccagaattaaaatccagggcaaatatacacacaataaggagcaccactctagcaataccagacacatttagtagacatgacacatgcatttaaatatgtggaaaattctaagcagctacctatcaaatctcaagagataaagtccagcagcccaaccacactggctgtcaaacaggctgaaatttgattcagaaaatagaatctgattcagaagacaaaaatggtaacgttaacaatgctattttgatgtgaccctttagcagaaagctgaccttttcggcagttgttaaaaagcaaggtatgtctgtaggagagagcagagcttgataaatgaagaaaacaggtctatccccataatatagagagaaatcactgacaatttagtctcatcttgttccactatcattttaacagtggaagctgccactgcgaaagctcgctgcatggcacctgttaggcctcattctcatctcgcagttcccagaattcctcttgattgcagcatccatacactcttcattttcctgcaaggtattatttggacactcttcaagaatccttttttcttttttttttcccgagatggagcctcacttcgttgcccaggctggagtgtagcggcgcaatctcggctcactgcaacctcctcctcccgggttcaagcgattctcc

SEQ ID NO: 34781 - DNA, 569 bp, Homo sapiens
agagtgttttttttctgaacaacttcattaattcaaatagtttagttgagcacaaagattccatcatctgcttttctcccagaatttaagccacttatttatttactatcttattgtatttgtcggaacttctataacaacgtcaaattatagaggctgagagactgaataacaaatggacaatggcaagatcatatgaaaaattgaactttgacccatgatgtgcaacaccttgcccaggagatcaaccctttatctaaaataaacaactcaggaagccagcctgctataagtcagacttagaggaagccagtttgctatctctagtgacaatccaagaagctaaaaaataacttctgtaacaattggcctaaaatggccaggacttgatcgataactgacggcgtccagaattgtagtccccatttccagcataggaccaaccaaggaaagccaaatatgcaccactaaccaatcacataagacgccccacttctggttagctcacctacagcttcctcatgccaacagcttccaatcagggcttttttcctctataaagctttccc

SEQ ID NO: 34782 - DNA, 856 bp, Homo sapiens
tccaccatttatagctgctgagcaggtggatgacattcgtcaacgtggggtttagaataatgcaatgtttgaaataaaattagaaagaaaataaggccaggcacggtggctcacgcctcgaaccccagcattttgggaggccgaggcaggaggatcgcttgagcccaagaattcgagaccaacctgggcaacaggacaagactccatgtgtattaaaaaaaaaaaattaagaaaacaaaagctttgttaatcgttaagtaaggattgcaaaatggaagacagtaaagaaaaggaaggtcctaagaatctgacccacgagtttcagtccaagtaacctggacctgcccagaggaagcaaagcggaagtaggatccaaaacgctttcagcaggccgcctgcgcccccgcgcatgcgcaggtctctgactttgaccgttttggcgggtgcgcgccagccctagtttatctagaggggaagggcggtgcgggaccacgtgactggggttgcggcatttctggcccaatccgagacggtttcgtagagcgccctgtagagcaattcgggttgcccgggtcctttccgagtcttgacctcctcttttgcttctggcttttcgactctgctctcgaatctaaaaatttgccttggcagaagtttttccctgtgttccaggaattacattagggacacactctaaagtgatcagcactttttatttttttccttcatcaactaaaataacattgctgtctccccaagacgctcgaattctgttctattgcttgagattccagaatcgctggagggcgccctgttgtaaaaatagcactccccacaaaaagagagagaaagtttt

SEQ ID NO: 34783 - DNA, 2140 bp, Homo sapiens
gtgtgcttgtgagagacagcttttaaagtttgattttggttttttttatttttttcctgaagcctctaagaataagctctagaaacttcaagttatctccgggatgaccctgatagcaagcaactgtttcctctccctggcccctgccaatttcagaaaacaggcacttaaaaaaaaaaaaaaaaaatcttagttgccactccacacgccggacgcgaaagcccagacagaccctgctcatcctctatgccgatctgcacagacaccaccccagttatatccttctatcgatcggtcgattcagctacagacaactcccttacgttccaattctaggcttatttcagcaagactgatgctttcctctgcgaggctccccgctggccaccagccctgctctcgcgacctgccgctccgactgacgggaaaccccacacggggcggggactccccaaggaaaaaacgggtcgcctcccaacccgcgttgtcctcgcgccttcgccctgggtaggtgaggccgagaaggcaaccgcgaaaaggaggcggaaacgcctcctacccgacccccgaaaagttgaccgcgaccccgcctcacatggcccctcccaaccccgtctctttaaggcgacagcagtgagagcgcatcatttagtttcggcgaacccatctttaaagcacgaaactactacgtcccttatgttgagttttgtgaaaccgtctccagggatcaaattcagagttgcggccacacgacgtgccacatatcgttacacggcgggggaagaagcggattacgcctcccgtcccctctccacctccggtcactgcgacgagtccccaaactcgcccgcggtcggagaacccgccgctgacccagattccgccgggcgaagggcagagggcggcgcgcgcggcttcccggaggagtgggcgccgccggagcagacagtgcgcggaccctgcaagcgaccccagcccgcgcccgtcgcgacgtcggacgcccagggcctcgaggccggggaagcccaccccctaaaaagatgagttggccgcactgcagaaaagttggactaacttctcaggcgcctatggctgcggcaggggctgagtgggactggggggtcgcgcccacgccgccggcccccaggaggaggagtgccgggagcgaagcggcggagcgcccccaccagcccgcttcccgcccccacgaggtcaggacgcccgactcgatgaaagccgaaaggagctaagcccccatgcacacacaaaaacgcccctagaaacttcaacccttcgccattttaagtagaagattttaatgatttaaaacttaaaattaaacatttccccaaccctaacccggggggatgggggctaacttattactccatccccgcacacccacccaggaccaccagaaatccgatcctcagaatactggactgatggggaagcggtgggggctgagtcatctcacctcctccggggatctgttccttaactccaggttaatcttcttcttcatctccatgtcctcctcttgctcttcagctactactctccttttccctttcctgccttccccaatacccccaacccaaaatttttaagagatttagaaatgaatgaaaaggaacgcaaatataaacgcccactaccaccaccagataggtgtgggggagaaagaagagaatagcaaatggagtccaagagttgggactctaactcagctgcccccacctccttgtccacacactagcgcgcgcacacacacgcacgcacgcgcgcacacacatacacacacacatacacacacacacccgcagttccttccccttcaatggctgctcagagactgagcctccatgacacggcaccgccaaccccctggcctacactccacccacctcccaaacgtgttggttgattcttcagcgtcacattacttcattgggctaggtaaaggtctatcagtcttcagggaggccctggaccagaaattccgtacctattggctacgatcaagcgcgcagttaattttgataggtccaggagggtgtacgtcccggagaaatgattttgaatcccagtaccccccctacttttctttatgtagttggcgcgctttccctaggcactc

SEQ ID NO: 34784 - DNA, 2158 bp, Homo sapiens
cactgcaacctcccactcccgagttcaagcaattctcctgcctcagcctcctgcgtagctgggattacaggcatgcaccaccacgcctggctaatttttgtatttttagtagagacgaggttttgctatgctttggccaggctggtctggaactcctggcccacctgcctcggcctcccaaagtgctggcattacaggcgtgagccaccacgcctcatctcagtcaagtttcagtatatctacaaggacaggagatggcgccagaaggcagtgagatgcttggttttggttttaacggttttagccaatgcaagcaaggaaagggcttgagagagaggtcagaactaaaacaaaggtgccagagtttgagtggaaactaagactgagtggggagagggagctgtgtcagttttttttttttttaacttacatataagggtccccttgacacctactccaaatcagcacagctagaaagcaacaaaagaaatatccacagtaaagccaaagatcaagataaagtcaagtgcctggaggacggcgctcgccttctggctccctctgtcctagaaaggagggcctttgtcgtctgggaagcataagcacctggatgcgttgctcacccaagatcagggaagtgttgattccaggctaagatatctttgtgaaacaatgttcagttgcgtaggcaaaatcccaaagcccagcagcagtgaaatacctcccagaaggaaccacatacacaaagcattttaaattaaaatttaaaaattcatagacgagccaggaggtggcgcctggcaagacacgctatctgccttggaaatcggaatctcagctcagcgctccaggggaactctgttccggcagaggtcattctgttcagacctcttctttcctactaaatctcttctttcataccaagatgtctctgctttctttttttgtttctttgtgttaagtaccctgattcccgggaaatctaatttatacttcaagtcttttactcttcttagatgggatggatggggctttggggaacctcaaaacataaaactttcctgaaggggacaaataactcagagggtgataggagaagaaaaagggaaatgacatcagcaaaatggcttggctttgcagatcaatcacaggggatagaaaggcacagtgagctcctgtctctgcaggagctgatgatccagcacatgcattattctgttcatttggcttttatcctgctcccttatttagcttctgctccctttgtttggctatttattgctactcggcaggagcaaggagggcagagggagcttcagatgggtgcatcctcctggctggtgcctctggtgaagagcatggaggagaaagaggtttcaatgtctggcttgaaagtatctgtgggtttcacattctctaacgagggatttaggatgtacattccaatcgggatttccagtcccgtggggagcaaacatcagttcacattcctgagacgtgcagcctccatgctccacggacgcagctccttggtggcaggtttcattcagtgccacatgtcctgcctcagccctttgttgggctggaaggaagaccctgagcccctcttccatctggatcacatggtctctccagaccctcccctctctttctctggaaaccacctttttctgatggtggtagtgattgttcctaaagtctctcctttcctcctgccctggcctctctgccggaggtcagtgtcctcttcagtgacaaaagccgccctagatctgggctccctggagagggaggtggctgggtctggcagttacagccgctgtctctccatggtgctgctacacccctcccccactgggcatacaaatgggctttatccagcaaacaacgctccctccccgcactccccccaccccaggccacacaggcacgtggacccaggcctcaccgtgggaagggggtggtggcaggcacagaagagattgctccagatgagttctccttgcctcacttctcttccttagaacttaggacacaactcaggttttagttattgacttcctccacccctcccctgcaccctgagtccctaattccttcttgttatatatctcctaattctggactcttcccattccagggcagctcagattatgca

SEQ ID NO: 34785 - DNA, 2229 bp, Homo sapiens
ctccctccagaccaactttctttggaagtgacggatgaaggaaagtaagaagccacttagaacatgtggatatttagagacttccctagaggagggggctgtccaactccctcctccagtccctctcccttggctcaccataggccatctggcggatggagatgggtgatcttccgtcctcactcagcgatgctaacccctcatctgccttcctggggtggggtggggtaggggaaacatgagggagggcagggatgctcctttccctctaatgtcctcccttagtgcctcctcttccaaaccagcacccaggggctgccccacttcccatagtgcagtcctttgcccctctcccctccagaccactccatcttcttacttaagcagcttgtagtaggcaaagcggaacacctcctgtagaaggacagagacagcagcaccaaaaatcaggaggccgtactggagccgggcatctgaccggtcggtcacatggaccaagatgaaccagaccacagaggccaggagcagggagaccagccagaaaaatgccctgagaaaagacaggggcagtgagacaagcaatagtagtgggagccagagaaatcaaggagggaaaccagccaaagctgcttgaaaagtggaagttagccttccggatggttagggagacatggaccaggtagggtaactgtctccaccaagagactcatctgtagaaaagtgaacgcactggaaaggggagaaatctaattaaagagtcttcagagcgatgacagccagagtgtgcgagcacggaagggcgaggtatccgttcctggatcctcccctaaggcacctgactcggcctgcctaggtcagcacagccccctcacgagtctcggccttgggccttctctgacgtcgctgggaggaatataggaggaatctgtgagatccttggaaggtggaaaccaactgcgggaaaggacaaatctcccagacccaacccctcacctccgcccaaacttcacctccgacttatcgtccccaattcaggctcccaggcttgccccagttcctccagccccttccgcacctctctcttcgacgctctcccgcgtctcccgggccctctactcaccctgcgaccaggatgataacgcgaagcgggtccccagccacagtgatcaagaaaagcgcgaaggccgggccgaacgcgacgaaagtgcagccgaaaaacaccgcagcccccatggctggtcaggtgggaaggggggtgggggcctgaccaggacaggcaaatgggaggggcgcgccagctggggagtccgcgtggggtggcaacgcgaccccacgaggggcgcggtgcaatgtcacccccagaccccggggaaggggaagggggggaaccgaaaccccaaatgaaggtccgcgccacttcctctacggaagccgaagaggggacaaatcccggccgcagccccacggccacctcccatctaatccccacccccggaaggccaatggagaatcagcgcgggcggagctgctcgacctgctgggagttgtagtcgccttccgaggccttgacttcgtcctgggagtggctcgagccggttaatgggggtgggccgggaatggaccagtcgagacaccaattccagggttcggttgcgcttccgtcgctgtttcctttcgtcactttgtggggaaaagtggtagcaatcatacctcttcttgaagggctgcagagggggtagatcctgtttgaatctaagggacaaatacaaagagagcacaggatggggcgcagggagatagggacgggtattgttcttacttgaatgagaggaaatgggctagagctgctgcctaagagatgaagattacattaaaaagtaggagctcttcggacagactagtataataaacatggaatacagtatatcgctaatgaagccttcatctgtaatgacaagagaatcggagagaagcaaaaggagcctggagagaaatgttaggaaggcattttgaaagagtccgggagtttaaaagcaattagagcgatggggttgaaggaaaacgacacccccaccccacccccgccataaattccttttatgtcatacttcctctatttattttctgaaaaatgaacctcagtggtgcgttttcctgaggctgagaggggttgtatattagagtgaatgaaagttaaagtaggctgagcgcggtggctcacccctgtaa

SEQ ID NO: 34786 - DNA, 592 bp, Homo sapiens
agaaacaatctgtactctggcattatgaatggagaggagaaaaataaatattatgaagaaaataccttgcttgagtgataattttatatgaagtataaatgaggagtgagttaaaataactcatgggttttaaacatggatgtctgggaaaatggttgaccaaagtgggaactatgggaggccagagtggtttaggacagaagttattaatttggtaatggccaagctgagtttatggtgacagccctatgagggtgtcctaaaggtcactgaactagatcagggctagagttctaagtgcaaagtcacagatatgaaagtaaatgagctcaacagagccagtacacacaagctcagaaggccagtgactgtgcctgtagtgagtgggaggaagagaaattaatgaatggaatggagaaggatttgactggagaagtaggcagatagccaagtttgtattatagagtctagaagagaaagtttaatataatccatcaaaagctaccaagaggccaaggaggaggaggtcacttgtaactctcaagaaagtagttttaactgagtgcttggagaaaagctagatttttgtgga

SEQ ID NO: 34787 - DNA, 2929 bp, Homo sapiens
gctcatccctataatcccagcactttgggatggtgacgtgggaggatcgcttgagcccaggagttccagaccaggctgagcaacatagtttaagtccaggctgagcaacagaccttgtctctacaaaaaaattaaaaataaataaataagaactcctctacaagacgttaaaaaaattaaaaataaaaattagttgggtgtggtagcacaggcctgcagtcccagctattgggggggatggggtggaaggatcccttaagcccaagaattggaggctgcagtgagccatgatctggccactgtactgttgccactgggcaacacagtgagactgtctcaaaaaataacaagtaaaatgaaagaagagggatcacatttagaaaaatcttcttattcagtcttaaagaagtttaggagatgctgaggcagacttttgtgatgagtcattactttttctgaactaagaggacttcaggatctcctagagcagatagatgatggggttgggggaatacttctccaagcttccaaaatgtctgaacaatcaaagctagttccagcctggccacgtttcaagtcatggcgaatgccagagggcaaagtgggtgggtcttacaacctggtagagtcaagaggcaaagttcagaggcagaacggatggcggttctctgatgtatggcagggcggtgggagagaagggaagagaaagccgtattataggaaaagaatttttaaattgggatgctaaataaccattgatcatagagagattcagcaggaggtgaaaggactgtggaggagaggggtacacacacatctttcccaggagctatcacagagcaatcccagctcagaatatctggggagtttccatagagtgtggggggcatgaaggggtttctcgggtctcctgactccttttattttctttctttctctgcttttttaggtggaagaaggctgctatgactctttggatgggagtctggcaagaggaaattggaagataaaataaataataagtgaaataatctggttaccatctactccttcatgagtctgttctaaagtcacaactaaagagagcgccaggatttagaggcagcaagcgtagattggaaggggaggtgggtgacaattgaattagagggcattatggactgaataaacctgcagtttggagaagactggagaagggcacccacagacaacaggtttattcacagtccatattggtaattctcttgttttattttattaagtatggtgttgaaacagtgtgcttggggaaacgaggttgaggttttagaatctttttttctttttataagaataagcacattgttaaaacataaggtaaaatatcaaaaactacttagaatagacttaaaatattcacacctacccacccctacccacacctctgtccaacaatgtgccttttgcagttggtaattatggcagggacaaactcacttaaatttttttttaattcgctatcctcgggaccctaattagaattgggctgcccccttgcggtctctccgacgtcctatcttcaaccagctcacagtccttgggccctgctctcctctccattgtactctcaaaatgcaaggcgcaacgacaatagtaacgtcccagttacttctgagactctctaaactctggacttgcctccctcccctccttcaaagtctttcgaatcttctccagcggacaaatgaagggactgaagctggacaaaaccataacctaggagatcagggacctaccccattctgttccccgtgcttggaatcagataatttaggacgccgggcccgagaagcctggataaaaaagtcaggaaaaactgagtttcgttttgacctctagcgtcgtggcgggctggcatctgagctggtaacgtgcgtggtaggttatgtaagaaaagggatggaggagccgccccagcgggagccagaaaggacgcggtgttctcggttgcaatccccaccctcctcacccagcagggcaggaggcacccaacttggaggagaaaggggtgggggaggtgaaacagagaccggagagtcacgagggctgggccgccgagagcaggagaatataccgtgtcacacacctccattctctcacacacgttgcagacacaaatcactgacggtttccacgtgctgcgctcgtgagcggaggtgttcaaagagggggcagatgagttacttcccgagacggaaccgggggtcccacgtccgccgccttcagtagcacaaccaatctctgaacactcaaaccgcgcatctctggcgcatcaccatcctatttaaggccacgggctccgcccttttcctcccctcccttcttttccactctttttccatcctcctccttttctcatcaccgggtcctctccagcagccgcatgtaggggaggagcacggaatgcttcccttacagccaatcatcacctggctgcctctctactggctgagcccctttgtactgtagcaaatgggctatggacttcagtaactagagtcacgtgttaccggcgacacaaccaatgagggcgcgagatctgtgtaagcagggggaggcacgtgccgggccgcacgtgtctgggagggggggaaggggcggggcccactgagagaggcggaggtgggtagatagacccggagagacggcgaaggagctggaaaccgagccagggctgagccggctgacaacaggtaaggagattcggaggacaaagcgagctgttagggagtatttgggagtggatttgggggctgaatgcagatcttggtattgggagggtttgcatcacgtggcaggtgcgagcccagagagaccggcgcagggatcctgatcttgaaagattgggagagggcaggaggccagtctctatgggggcggttcccgtagg

SEQ ID NO: 34788 - DNA, 1568 bp, Homo sapiens
ggtacgttttcctacagccattagatgttaacttacgtgaataaccataaatggatatgtacaggtagcatacaaataggaggacgggtgtctccacagcgaagaagaaatttaaaaggaggtttttcagtaggtctcattagcacgaaaaggcatagaagctgacataattttttattctaaaccctgcaggtgtttcccatatatctttattgatttcactttatgtagttaaattagtgggaagatgatataggaaactcacagtatgtttatttcttttccttagcacttaggcagatgacgtgtatgaatcaatctatttttcgtccggagagcagatctcaaagagtctgtcctttccaaagagaaaacaggaagcatcctcaggaagcgcctacttctcttgttttccatcgagaaagagaaatggctcaaatatttatcaaggatttcacaggattaaggggtatgaaattgggctgaccttctcagaggccgaaggacttcgactccatgagagggcgagaaacgtgtttcgggggaatttaagtcaatgagtattttgctttgtcaggtgtagagtccaggcccggggaagagaggcagtcaacagaggccagaaaggacgttgctatggtttccacgcacgttgtctccctcggcctgtttctttgcgcggcgctggcgattccgtaatttccgcttccggtagtgagaacccttccggtgggctaggtactgagcgcgcgaggtgaggagttgtgcagggtttggggaaaggaaggctggcttggcgagagggcaggtttgcgggctttcgcccccttttccaaagaccaacaaagagtccttccccaactcccaactcaaccccttttggaactatgtgtggtggttgggaccctgtggcgcatccttgtcgctcgtgtccttctcatgcccggcgacgcgtctttgtggtaacgccctgctgccatctcttttcttctctatgcgaggatttggactggcagtgagaataagagacaacgattcacgtctactttctaggatgacttccatgtgctccatctcgcgcgtccctgagcatgttgaatttccaaatcctaaataagccgcgcggtgtagtttgtattatgttgcgtttctctttctgctttcctcgccctttctccatcatcctttaggctctacagagtgaaggtttaaatccaaggtcatggcaaaacatctgaagttcatcgccaggactgtgatggtacaggaagggaacgtggaaagcgcatacaggaccctaaacaggtaactgttaagggaccagaatcatgcctagactctctgggaagtgcggtggttattctctcccttcccctttcgttgattgttctcaaaacagtgccagcccaggtgttcacagtctcttaaaacgtctcagcccctcagtttattatcttaaaaatgaagttctgggccgggcgcggtggctcacgcctgtaatcccagcactttgggaggccgaggcgggtggatcacatgcggtcaggagtttcagaccagcctggcca

SEQ ID NO: 34789 - DNA, 2063 bp, Homo sapiens
ctcgggaggcggaagtttcagtgagccgaatgcactccagcctgacgacagagagagactccgtctcaaaaaataaaaaataaaaataaaaaataaagggtcagtaggttagagcctcattttggagaaaagttaatatatagacctattgatagaatggagaaaacaatactggtaggtctcacttgtcatttattgagcccaaagtgctgggattacaggcgtgagccacggcgcccggcctgacaccactgttaaattagggagaaagggtttactttctaccagaaaggctgtgtttgaacacaaacgcagaagcctcgctcttcattctagcctaagtttacttttgcgcacttattctccatatgaggaaaacagcaagtagcccaatttccgcttcaggaagttaaagacattaacttggcagaaatcggccgggcgcggtggctcacgcctgtaatcccagcactttggaaggctgaggcgggcggatcacgaggccaggagatcgagaccatcctggctaacacggtgaaaccccggctctactaaaaatacaaaaaatcagccgggcgtggtggcgggcgcctgtagtcccagctactcgggaggctgaggcaggagaatggcgtgaacccgggaggcggagctcgcagtgagccgagatcgcgtcactgcactccaacctgggcgacagagcgagactccgtctcaaaaaaaaagctaaaaaaaaaaaccttggcagaaatctagctaataggtttagcctgggaaatagaaagcaaggaaattgctcagggaaacttttcggttctgcgacgcatgcgttcagcctccaagaaagtggcaaatacggctgcgcgaattggcggcccggccctccttggtcacgtgttgggagacagcggcgtggcggcggcggtggcggtagcgacggcacgccgtagggcggtcagaaggtttccggttccggtgtaacgttcgggctccgtctcaggggctgaagtttgtgaggtgagtagtggccccgggcccacagagggtaattccagtccgcgccactgtggccggggactcagtccaaggggaggaccgaagcgggagggttcagcgggaaggagtgtgaaaggagtacctggtttggtgggagaagaggttggaatgagattgttgagaggaaaagggcgggggcgggaaggagaccgggttgggagaccagctctggggtgaggagtttaggtagaacaaggtagagtaagagactggttggagtgacggagagagtaaaaatgaagattagcgggggagtggggggctgcagagggaaactcaggttgtagcaaacaagagcacggagtaaggaattccttctgaagactggatttggattctgctgcctgctcattgagaggagagatcattgtacctcgctttccttccgcacccccactacccccgcacctcgcagttattgttgagcatttgattagtgacaaggctaattaccgtttgaaacttttttatccattggctgtttagtttgcacgtcatcttatggaggtaacagtggcacctcatttattgctttgggctttcaaattgcttatactttctagcctatcattcaattctagtggaatataagacccgttaaggtgaggactcttgttagttttgctcactgttttatgtatccaccgcacctagtacattgcttgacacttagtagttactcaataaatatttattgaatgaattaggatgtaaatatggcagtactcattttgtaagatggtaaactgtggctccaaagaattacttaacttgcccaagggcttgtaaatggtggggctcagtgtcccaactgtttctgtgtgaactcttgttttcactttctatggcatctggatatgccgcttttgtgcaatacatgtgtaatatgtagaaattggtacgctgtatgtctactcattgtggggtaatagaaccaccatagaattactcacgtaacttgtcactgaggcagaaaatctttcagtcttagtttcatcacttcaatc

SEQ ID NO: 34790 - DNA, 4082 bp, Homo sapiens
ctgtattttagagcctttgcacttgctgttcctaatgccagcatgttccgctccccgtctcgcatatctgcttggttgcttttttctcaatgttcagatcgagttatttctttcgagaagacttcctggttcaccataccaccattcttatactggcgcgtgcgtgccgtgcacacgtacacacacgcgcgcacacacacacacccctttctcccttaccctgcttcacctttttacagaatttaatactgtctgaaatgtacttgttggtggtgtcctgccactaaatcccggagggaacggatttttgtctgttttgctccccatgatctaaaacagtacttggcacaagaggttcaacaactcgttgaattaatgaatagtggacatgaacttgacaaaacaggttccctgcctcaagaggcatggccgcagtgaggagacgttaaaagaattaaaactgtatatgtttagtgggaacacaggagcctttaaattagctcagaggatttacatagatacctgcgataaaatggttcgtataaggttcatataatagttacgtaagactcttgaaaactgtaatgtattatgcaattttaagattgtatcatagctggcgaaaatgaggtcacatcttgccattcttttttcgcctcgaaaaattttatgaggaaaatttcctttcacttcctcatttatttccttttcctgtaacctaaatggtcaagcggctgtgaatgttatcttctatgggcagcaataaatacggtttggtgtcggagtctgcgtagtgaatggctcactggatctggcgcatgcgcatcttttgtggtgccgcaagatggctgccagccattttgtcgcgcgttgctcctccgaggagttgggggcgatggctgcagccccctgaagactaacagtggtctcagtggtgggaattttctgtctctgttgtgtgagctgaacacacccaagagagcggccaaaagcagcaaagggcggggcaggggaacccccccacccggctaaccttagttataccagctccctcacccatccctcccagtttttccttccatcccgttacacgcttatcttctgcgcaggcgcaaaaataatcgtagcgcctcctgggccctgggggcttcagagctcctgcgcgcgcttgtggttctccactcctgattggtcaggttgccccgccatcacgcctccctctgctttcaaggttgagaaggaagcaggggtaggggggtggggccaagtggcgcgtgcgcgatactgttgctgcccctttgctgctattgcgttgcaaaaaaaatcctgactaggtagccttggaccttttctgtgctagcgagtctaaaggaaagaaagatttctgcaactgaaggggcagtcgggtagtattacatttaagatattaacgcccgacctggctcacaggagtgtgggaacaggggcggggaagggccttagcactgagagccgaaaagtataaaacgattagtttcggcgtcaggcgttttgaaaggctttgcaggtcctgttttctgcgtaatttttccgtgattactgactggtttaaacacgaccccttgaacaatattgataaaacctccgagacccgcagcccctccttgcagcgtgtaggagctgccagcgtgcccagcagctggtgttcccgtccgtacctccagaagagcccagcgcgtgcaccatccccaccccctagcttccctccccacctacggctttcacgcactcgcagtgattgttttgcccgctcccgccgccgccgccgccgccgccgccagaggagcagcagcgcttgtgcaaaccgggaagatggcggccggcggcggcggaggcagcagtaaggcctcctcctcgtcggcctcttcggcaggggctctggagtcctcgttggatcgaaaattccagtcggtaaccaacaccatggagtccattcaaggcttgtcgtcttggtgtatagagaacaaaaaacaccacagtactatcgtctatcattggatgaagtggctccggagatgtgagtgttgggggtgactagggaagggaagactggggaaatggaaggaagtgtggcctgaaacgcttggggttttcccacggagccgcagcatttggttggggttgttcacattaaaggtttgaccccagtggtcccaaacccagactccattcctagccaggattgtcctgaattgcaggagactcatttcttgggttttttagccattgaattgttgtgaccttgggccgttgggcccagatccatggagatttacgtatattgtttttaatatttcagagccttgtaaggtgtattgatttttccgaaccttcgcggaaattgtagcgtctgtttatttcttacaggccttgacgtgttaatgatttctggctttcctgatggtaggcgagctgtggttttaagcagtagtaaatccagtgatgtttaatgaggagtgccttgtctggatgaatgtatctaaaacttgtgatgtgtagtaaggagagccttacctggatgaatgttaagaagcagcatgagctctacatagatctgaggcaccaccgggttttccctgtacctgtgtttgctgcaataaaatacaggtttcttggatactgaccagaaacaactgcgatacagtagtcagtatcatcgttaataccttcaaatataaagcgtgtccagttcctctttttttttgagacggagttttgctcttgtcgcccaggctggagtgcagtggcgcgatctcggctcactgcaacctccacctcccgggttcaagcgattctcctgtctcagcctcgcgagtagtcgggattacaggcgcccgccaccatgtccggctaattatttgtatttttagtagagacggggtttcatcattgtggcctggctggtctcgaactcccgacctcaggtgatccacctgcctcggcctcccaaagtgcagggattacagacgtgagccccccgtgcccggccccgttactttttaattacctgaaatacctttttacacaattgagttgatctcatgggtaatgtgcacaggaaatgtgctttttgaatatgtagtacctttttctccagttatgttttttttgtctttatcctggagatttttccattttgctgctttactgcagaaacgagctctgttaaagcatggattgtttgcagaacgtttcaaatcttataggaggaagtgtggagaagttactgtttcctgctgagaagagagggttaactcatactccatatacatctattagaatttttctttgcttcctgcctgcggcatttcaccagtgagacccatcatccagttattctgccttattccacttctgccattgctcctgtagtgttttgatttgtttaccttttagagaacagatagataaaacttgcaaaattataggccccatgcttcgaactatttgtgtttaaagttttgggagggatgttttgtggttctttgaataataatgcagagaaattagtagataccggacagaattacctgtgtttaccaataaccgatcaaagagttattttcttgcccagaggtaaaattataacgtgcaaaaacatcaaatatgataacagtcatcattgaagactcacatgttaagtatctgctatgtgcccagtcatctcattgtaccttaaaatcgtctgagaagtagattttttaatcactgatttacaaacgaggaaactaagactcggaaattaagttgcttaaggttactcagtaaaatggtggggttagggtttgacttcatcattaactttgtaaaataatgtttaacgttcttggtataccagtgatatattgcaaacagttctaatgtgagtgagagaacctcttctccaccctattttaaaacatttttactgacctatgcaagcattttacatttcctcaccttgggctctggggctttaactgtatggttacatcatttgcaagaataagttggtccctgtcccgtctctgctgtgtgggatcacaagcgacaattacagtttt

SEQ ID NO: 34791 - DNA, 627 bp, Homo sapiens
ctgtgagttttttcaaattgttgtaaatctcctaaaattttgaaaatgtatttattgaaaaatccacgtataagtgagacctgtgcagttcaaacttgtgttgttcaagggtcatctgtctaagcatatgtttactagttaatggataagcacttcagaccacagtgtgttaagtgagaagagaatagggccaatgaaagaaccttgggagcaccagagtttcaaggttagtgcaaaaacaggtgtgttagggaaaggagagaggatcagaacaaaatggtttctcagaaactaagagaagagaaagtttgccagagggaaggagcatgattgtactgggttgcaggtgaaactgtactgtttctagtcatgtgacaggctagatattttgcaggatccttccaccagaaatacaactaaatcttacagaagttgcaacagacctttttttttttttttttttttttttttttttttttttttttgagacggagtttcactcttgtcacccaggctggagtgcagtggcgtgatcttggctcactgcaacctctgcctcctgggttcaagtggttctcctgcatcagcctccccagtagctgggattgcaggcaggcaccatgacac

SEQ ID NO: 34792 - DNA, 1960 bp, Homo sapiens
tctttttttttcctaatttatttattcaagaagtagttactgaacgccaactaagtgttaagcactattctaggtgctgagaattcagcagtaaataaaactgacaaaaatcctttcccttatgagcctatattctcgtgggggagataggcaaaaaataaattgtatagtatattggaaaattatgtgttatttgggagaataaagcaaagaagggtggtaagagtgttgttggcttgatgttgcaattctttttttttttttttttttgagtcggagtcttgctctttcacccaggctgaagtgcagtggcgcaatcttggctcactgtaacctccgcctctgggttcaagcgattcagcctcagcctcctcagcagctgggattacagacgcatgccaccacacccggctaatttttgtatttttagtagagagggggtttcaccatgttggtcaagctggtcttgaactcctgacctcaggtgatccacccatcttggcctcccaaagtgctgggattataggcgtgagctaccgcacctggcctgatgttgcagttttaagtaaggtagtcaggaacatattcactgagaaaggaacatttgagcaagatttaaaggtggtgattgaacgagccatgagaaaaacgggggaagaaagttccagaacagtgagcttaacagaccgtgaagcaaggactcacccaggtgtgttggaggccttgtaaagacagcaaggtggcctctgtggctacaatggaatcagtggtgatgaagaaattaggtcaggaagataacacagtgccagattgtttaggatttctaggccattgtaaggactttgaactttactcttgttaaagaggggaccattatgggagggatttaagaagtagaataatatgatcaatttatatttttaaaggatcaccctctcttctgagttgagattagactgaagccaggcaaaggtagaagcagggagactaggtaggaggctactgcaataattcaagcaaaagatgatagtgacttagaccacaggcagtgatggaggtagtaagtagtggttggagtctgtatatgttttttaaacttgttatttttgaataatttcagatgttaaaaaagtttcaagagtattacagaaaccttctgtgtactttccactcagattcccattattaacattttaacatatttgctttatctctcttactgctctctctacaggcacacacacactttttttttctgaactgtttgagcatatgttgcagacatgctgccctatttagtactttggtgttcatttcttaaaaacaaggatattccttaaacagttgcattagtcagcttggctgccataacaaaataccacagactgggtggcttaaacaaagaaatcgattttctcacagttctagaggttgcagagttcaagatcaaggtccagtttggtctctggtgagggctcagggctccttcctggctttagtctgtcacacagactagagtacagtggggcgattgtggctcattgcaccctcagcctcgcaggctcaagtgatcctcccacgtcagcctctgagtaacaggactacagttatgcaattacgcctggctaacttaaaatttttttttggagagatagcgtcttattgtgttgctcaggctggtaccaacctcatagaattgtggtgaggatgtaagttaatatctgtatcctctttaaacagtccctggcatatagaaagtattaaataagttaaaaattataggcggggcgcagtggctcatgcctgtaatcccagcactttgggaggtccaaggcgggtggatcacctgaggtcaggagttttagaccagcctgaccaacatgatgaaaccccgtttctactaaaaatacaaaaattagccaggcgtgctgatgcgcacccgtagtcccagttactcagg

SEQ ID NO: 34793 - DNA, 767 bp, Homo sapiens
ctcttccaaagtaagaaatcacatacgcttacgttttactattcaattcaatcctccctcccattgcacttatctaccttccccaagttgtttgtattaaaaaaaaaaaaaaaaaaaaaaagtaaagaaacacaaccaaagccatttcatttggctggggggttggggagtggggaggaaaacaatctttattttaccccatctattgaagagtattattacatttgaaataaaacttccatcagtacagataaccacatgtgcaatgttgggatgttattttgggcttggcttatcgagtagtcaatggaaggattcccgtcccctctctcggcagcttagtaactgctgtagccagctcggctcccttccctgtgtatctgtgtcctgctaacagccaagagatgttgcaagggaggaaatgtgagagaccttgaacctgtcaggtttatttgttttgtttttaaaggcatgttgaagtttagttctttacccttctcctaaaatctttttttaatcagcctcaaggttaaaataaggagtgactacagtatgtaaaataaggaaaggaagcattaatggtgtgatgtgacctgcctgtttttttgtaaacaagagaataggaaatgttttcaaggtagtttcacatgtcttgcaccaagctcatgcctcttgcttttcctttttgactttatctccctcagtttttcttctgctgtggccagaaagacagtcactacagttgactattgatacaaaggtgcaac

SEQ ID NO: 34794 - DNA, 1733 bp, Homo sapiens
agtggttactccagaggctgaggtggtcagttgagcccaggaggtcgagactgcagtgagccatgattgtacccctgcactccagcctgggcaacggtgagaccttgtctcaaaattaaaaaataaaactgttacagtcatttatcataatagcttcttgttgcttttgcccattaccaaaaaaccatgggccacactagacgatttacataaaatttaactcaacaattgggagcaacactattctcattttatagttgagaaaattgaggcttagagaaattaaataggtcaggcaaggcggctcatgcctgtaattccagaactctgggaggccggagcgcggtggcggtttggtgggggggaggggagggattgcttgaggccaggagttcgagactaccctggccaacatagtgagacccgcccccccctcccgccccccccggtctctattaaataaatatgagaagtttaataattttcccaaaattacatagttaatggcagatccagaatttacactaggtctgtctggttccccagtctatgctcttaagttttgctacttgctgtaaggaccacgtaaaataaaatgtatagttaaagggaaattactaccatttcctgtctggttttctcccactctcgccctcaaaagttcacctgcccttgtcctcaaagccacaggacgcctaattgctatttttgggtttcagctgaaacgccacgggtctgggggaatagcgagggtgtgttacattttcggtcttccggtcagccggaaccactcacaccgctgctggtgctgtgtagggtgtacctcttcggagttcctggaggtggtgccagactagagtggcagctgtagtaaccaatagacacggactttgttggaccagaagccaatgaagaattacgtggaggagaagcggcgataatctgtttgaggatgtaggcactggtgtgaaggaacatggccctgtatcagaggtggcggtgtctccggctccaaggtttacaggcttgcaggctacacacggtgcgtgaggcacccccaaagctccgatccgcatcagacttagcccagccgaagcccccaaatttttatgttaacccagcctcacgccactcctcctctccctggtcctccgagtccccagaaaaggactcgtatctaaactcgttatctaattctcgagttagcggtctgggggactctgagctcgaaggacccccagcctagggtcttgtatcacccaatccccttaaaaagtaggaattcggacgaagtccacttaaccatcccaaagtgccatcatctgcaattctaagaaagaatgatgggacgtgtgttacctgctaatatatctttccctccaggcagttgtgtcgacccctccacgctggttggcagagcggcttggcctttttgaggagctgtgggctgctcaggtaaagagattagcaagcatggcacagaaggaaccccggactattaagatatcacttcctggaggccagaaaattgatgctgtggcatggaacacaaccccctaccaactagcccggcagatcaggtaacaggcccatcctgtaactaccaggattatccttctgcccctttactttctcttcacttgagcaggggaagaaaacttggtctgcttgtttctgttccgtccccattaagatagcctttcctgaagattttgtttttgttttttgttgtt

SEQ ID NO: 34795 - DNA, 1208 bp, Homo sapiens
aataaaataaaataatgtctagtcggagagccggggaggtggcgcgcgcctgtaatcccagccacccaaagagctatggtctcggcactgcacttcaacctgcgagacccagtctcaaaaagaaaaaaaaaagtttagtcggcagccagcaaggcgggacgctgggaggccagttcaaagagtgtcgtcccaagtgccggagggacggagctgtagcccccaacctgagctggacccgagggtggcggtgactaggactctcaagccctacaaagctgctcccaggaacccgaggcctcaaggctggatctgaaagaatcggaatgaagactcggaatgaagagtcccaggggaacaagtcctgtgtgactccgccgccaggacgaccttccagaaagcagacttctccgctccagttctagcggagacggagagagtgaaccaagaaccatcatcctgcgccagccaggggcaagcggagcctcagttgctcccaaacccacgcccgcctctccttcctctcctcctccacaggctttcatttatttacttaagtatttttagcccagtagcagtttccagtccagcggctcctcagatctttcgccggctgtccgccccacctgtccgtcagcacgcgagccaatgagcgggcgagggcagcgctgtgccccgcccctgagccggcagcccagtctcgggagcccggggccgcctgggcctcctgcccgccgcgctcgagtctggagctcgagagtgacactgcgcatgtgcgggcgtcctgcgcatctcctacggcctccaggacagaggaaccgggggaggcagggggaaaaggccggcccagcaattcccctaccccccggtcccacgtgtaccctcctggcctgggtcgccccagcccacggggagcgggcggagtcctggcccacgaagccttgtcacctggcgggcgaatccgcaagcggagacttgtctttaaagggctttgggccgggcgcggtggctcatgcctggaatcccagcactttgggaggccgaggcggtggatcacgaggtcaggagttcaagaccagcctggccaagaaggtgaaaccccgtctgtactaaaaatacaaaaaaaaaaaaaaattagcagggcgtggtggcgggcgcctataatcccagctactcgggaggctgaggcagagaattgcttgaacccggga

SEQ ID NO: 34796 - DNA, 1260 bp, Homo sapiens
tgctctgtcgcccaggctggagtgcagtggcacgatcttggctcactgcaagctccgcctcccgggttcacgccattctcctgcctctcagcctcccgagtagctgggactacaggtgcccaccaccacgcccagctaatttttttgtatttttagtagagacagggtttcaccatgttagccaggatggtcttgatctcctgacctcctgatccacctgcctcggcctcccaaagtgctgggattacaggcatgagccaccgcacccggccagcctttgcttttttaaagttggttttcctttatttccacaagacccaggaacgaaagcgcagggagcagaggctggaccgtcctctgtcagttccctcgttcccctggagtggagctctgagccctgggaccacagagttggctgttacactggaaacactgatcagacctttggactcagctgaggtaaggctggagaagccaattgactcagatgaaataccccaggcataaaatcacaaaagagtttttgttagatgctggttgggagggagtggctccagagatctgggaaaagagcaggccggccggcaatagagacatgagggaaaggcaggaactttgcctagaatgggggccaggggttgccagcacccgccttggtgggacagagaattgagtcaagattcttatctcacctccactatgatccttttttcattccacagatattcactgagtgcatagtgtgtgcgccaggccctgttctgggagatgacaggcaaggccactgacttcgtggagctcgccccctaacggtgaagacaaacagtgactgactaaggaaaaaaaaaaaaggtaatttcagaagtggcaagtgccctgagcaaaataaactaagatggtgcaacagagaaaaagggtgctggggggtggggacacatgcccctttctaatgctgcttcttggaggaaggtatctgtgctgacaccctagcagccaggagccagcagtgcaactagagaggaagagcttttccaggcatggggaacagcttcggcaaagaccctgaggtggcccaggattgacatgtccaataaagaacagagaggccagtgtggccagagtagcagtaatagcgttgggatgaggccagggaggaggctcacgcctggccaggcatgaagggccttcttggccatgtcaagagtttagatttcattttattcaaaaaggcactgaatggctagcctgcctcagccgttt

SEQ ID NO: 34797 - DNA, 510 bp, Homo sapiens
gaaaccaagatatgtaaggcaagccctgctcttcggaatttctaatctcagtactgaaaagttaataacataaggacgcagcctatctgtggtaacaccatggcatgagctgtgtggattccaagtgctgaatgaagctggaagggcagaggtcacatcgggccagtatgtgcttcttggaagaggtggcatttgagtcacttgaagaatgagcaggagatgagggatgggaaggagaaggcattcctgggatgccatgagcaaagtgtcacagttttgcattgatcactgtcatccatgtaagagcaaggacagctcaggcaggtggtggccatagaatggaggtggacacataaatatgtggagaaagaaggaagtctttgggttaaaaggccaagacttgacacctgtgaggacctggaatctaaccctgtgtttgtctgtaaacccaaggcaagtcacccttcttccgaggcacagtttcttcacctgtaaaatgaagggactggg

SEQ ID NO: 34798 - DNA, 1259 bp, Homo sapiens
accagaaaatgctggaatgtggccagagctgaggcagtgctcaccccacacacattcattaaatgcctactgtgtgcagagtgaggtggtgaatacaaaggtaaacacagcaaggtggtctcaccctccagtccctggaagagcacaggtcaccactggctgctctcatagcagctgcctagtatgggcggctgcgtcaagccaaagcggaatggtcagaagaacagcatcagtgagacaaaacagtggagacagcatgacaggacacggactcaacggctggaagccagcctggcgcgcagcaattgggaatggggtgtctgttttggaacaaaggagttgagcaaccatgattcggagaggcagaaaagcaaacaccaggctttccgaaaatggttgctatgaccacaaacctaaagacagacagctgcatgttcatttctgggccccaactgtacatattattggtattagcatcagcattatcttggaatagggacaacgtcttatatgaggcattcattcaaaatgttatttaatttataaaacttccttatgctactgccaggggaaaaaattattaagtaaattcagctaaatttctggaaattttatttgcatacaatgtatacaaataacagcgcctaatttagaatcctggctctctcactttctagctgagagattagagacaaattagtggatttgtctttgtgtctttgtttgcaaatctgtaaatggtgtaacagtctccacctcacagggttacaatgaggacagagtgaggtaatgtgtgtaaagctcttctaacagcccggtcgggggcacaaagtaagtgctatatacatgttagctatattattattattaaatcagtatgttgagctcaaagtcagaccaatgtcagcctgtcccctctttttttccttatctgtccaatctttagagataattttggatgaacatctacttttcttttttctgagatggagtctcgccctgtcacccaggctggagtgcaatgacacgatctcggctcactgcaacctccgcctcccgggttcaagcaattctcctgcctcagcctcccgagtagctgggattacagacgcctgccaccacgcctggctaatttttgtatttttagtagagacggggtttcaccatgttggccagactggtctcaaacttctgacctcagcgatctgcccacttcggcctcccaaagtgctgggattacaggctggatgaacatctac

SEQ ID NO: 34799 - DNA, 2069 bp, Homo sapiens
aataaataataatataataataataaacataacgcagagtaaaaagcaaaagcctttttcagtcctcccccaaccctgcatccctccccagatgtcaccaatactactgagtttggggtgcattcttccatgtataaatgcataaagagacatatccaagcccatcatatatattagattagtcccattttgcagatgagcaaactgcaccacacaggggtggaagtattcgtcgaagaccacatagctggcaagagctggagctgaggttcaaatccagatcagtctgactcagaagtcagcacgctgtcctttcgctgagtcccgagtgtaaaaccttactgaggaaaaaaaccgaagctcatagaagtcccagcaatctgaaccaccactgcccaacacgggagaggcaggagtgactgagtttgcaggggaggctgcgtggaggggagagcctggacccacgcggatcgggggccgcgggtacctccgtccagggcgcttccctcccggaccagcggctctcccaggccgcctcgctccaggcgcccctggaggctgccccgcctgtgccgcgccgcgccgcgccgtgttcgcaccgctcacccgagcggctcggaggcccgggttgcttaagtccctagtctcagccgggcacgaggacagcgcccgggagcgactgcagcctctgaccccggctgggccagcccgggctgcttaagtccctagtctcggccgggcacgaggacagcgcccgggagcgactgcagcctccgaccccggctgggccagcccgggcttcagctcacgcagccgtcggggggcgcccggcgcgcagcccggggtgggtggtcctggcgagtggggctgcgaggcagaccggccccaccccggggccgccgaggggcgcgggctggggcgcgtggcgggcggggctgggcgggggcgggcgcgagggcggagttgcggccgaggcggccgtgaccggagcgcggctcaggggccccagtggccgccgcggagcgaggttgcctggagagagcgcctgggcgcagaagggttaacgggccaccgggggctcgcagagcaggtagagacctccccgggaccccggccccggccgcccctctcccgggtcccgttagaccgcccgccccgcgcgcccgcgtcgtcccctctccctgcgctgtgcggtcgcgaccccgccacgaccccggacccagctccggtggcctcggacaatcttccagcccctggggtcgaattcctggggagggagtctgatcccgtggaactctggccccatcacccgggcggggagtgaaccaaaattcctcctaagtcacatagtaaagttggaaaacagacccatgacctccccgcgcggccggtgcctcctgccctctctctaggagggtgctctcggacggtgtgtcccccactgcactcctgaacttggaggacagggtcgccgcgagggacgcaggtgggtgcccttgatccagctcagcccgatggcagaagaggttgacaaaaaagaaagacacctgttggggtggcctgccagacccaggagtggagggctctgagggcccgggaattcggactcaggacagggattctccatggctaggcccagaaacacagggtccaaccactctccagcagggagacctgggggtgaaggggtgagccctgcgcaggtctctgttccttggtcttcactgggcagtgtggagaggtgtggccaggaggagcccgcgtttgtccagaccagggtctactctggcaccagagtgaccacctctgacctctcctttcctcgtcctgggccgggaacgacaccaaatgagggacatggaaaggggtgagaagcataaatgtgcgtgtgtttctgcagaggagggggcatgggcccctgccgggctgcgcaggggagggtggggtgggacttttccagagagggagccaggcctggcccgggccccgggagctcacgtcacccccacccctcacttctccagggaactgccaaagccaaacccagctcgggatgggattatgtgtac

SEQ ID NO: 34800 - DNA, 5312 bp, Homo sapiens
aaggtctgatatgatggctggggtcgccccagtgttctcgctcctgccaagggggaacgcagacacgggaggtccagtgcctgagcaccaaccagaccctcagcacccgatgccctcctcaactgcggccctccaggaagcgcccctgtaacagccaaccctgcagccagcgccctggtaaagagccccctctccccaatccccaatacagtggattagctgaagtatgggaggagatgagaaaggaccagtgggaatgggcagcacacccattcccagacgggtgggtcctggtgactctcttgtgcccactggcctcctctgtccccagatgatcaatgcaaggacagctctccacattgccccctggtggtacaggcccggctctgcgtctacccctactacacagccacctgttgccgctcttgcgcacatgtcctggagcggtctccccaggatccctcctgaaaggggtccggggcaccttcacggttttctgtgccaccatcggtcacccattgatcggcccactctgaaccccctggctctccagcctgtcccagtctcagcagggatgtcctccaggtgacagagggtggcaaggtgactgacacaaagtgactttcagggctgtggtcaggcccatgtggtggtgtgatgggtgtgtgcacatatgcctcaggtgtgcttttgggactgcatggatatgtgtgtgctcaaacgtgtatcacttttcaaaaagaggttacacagactgagaaggacaagacctgtttccttgagactttcctaggtggaaaggaaagcaagtctgcagttccttgctaatctgagctacttagagtgtggtctccccaccaactccagttttgtgccctaagcctcatttctcatgttcagacctcacatcttctaagccgccctgtgtctctgaccccttctcatttgcctagtatctctgcccctgcctccctaattagctagggctggggtcagccactgccaatcctgccttactcaggaaggcaggaggaaagagactgcctctccagagcaaggcccagctgggcagagggtgaaaaagagaaatgtgagcatccgctcccccaccaccccgcccagcccctagccccactccctgcctcctgaaatggttcccacccagaactaatttattttttattaaagatggtcatgacaaatgagaaatgagctcttccttgtcggctatggacccctcagcagtgtgaaggcagaaggtagggtgggcaggggaacagcattagagcccaggagagtttgggtcagagaatccccgccagccccaggccctgcaggctggtcatgggccactagaggtcaccagttctcccatttgaggtgtggggcgctgggttccagagctgaaggaagggctgcgcggccgcggtgcgctttttggtgggtcgagtctctctgggaagtctccgggtatctgcgcctttccgctggggcctgagcgaagggcagttggcttgtcgaagctcttttttcctgttccctttctctagccctgccttctgtctccctttctgccgtacgcatatccctacgctctggggcttcttctggggtggggaaagggaagggattcctgccccgagcccttcccctggaggaggaggagcccggcccggctccagggccctgggcggggctgagggaggagcggggcagcactggatgtcctgccaaagccacattcctcagagatggctcagcctggcctccttcctcctcctactcgcttctctcaaggtagagaacttgctagaggcggcctgagaggggcaggcctttgccatcacatcctctcccagacccctgccattcggagactgaggccgagtctctcctggaagccgggctgcccaggaggggcggtgccgcaggagcgcccccgctcgcgactccacaagcccagctgagcacggccgggaatacggggcctgcggaaacagtgaactcagtggctgctgttttctgagcacctgaaccctgtgggggacgacagagttgcccgaggcggcaggatgtccccacactcgcggtcccccgcacatcttcctgttgctttgggactcgggctttctctgggttgaaagtggctgagaaggaagaatttggacatcttaagaggagagcgagtggggaaggaggcaaaagggaatggagaaggaagataaaactgacgtcagcccagggcagggagcgaggaaagggggccacaaggaaagcccagttccaacgtctctgctgagcctaaagaggcctcagcagggaatcacagatgtggggggccagggaaacgggatccgagcccgcccagtaggtatagaaggccgaaggcagagtcctgagacccagggaggggtggggtggaggctggggccctcccagcgattcctggaagcccagagctgggcggtgccggctcagctgacttccccgaagctcccctccctctgctcagggctgttgctgggcaggtttggcgtttgccctgagcctgagaaccaatcgcaggtggaggtgcggtcgcagcccctcgcagggctccccggcttcagcaccccctttctctttctgcccgcccatgagctccctctcggcctccagcctctgacctctcaggaggtgggctctcctctgggggtctgctccctttcccctcttattttagagctaggactcagtgcagcccctaaggattccttcctctggtcactgaggtcattatggggtcaatgcggaagttctcaggaaagggaacccgaccccaagcaatcccttttcttggccccgtagaggggagtagtgtggccagacacctgttcgctgacctctgaaaccctctggggggacttgggagagcagaagctgcagcctgagggcagaggaatgtggggagggcccctgggtttggtgcactagtgggaatttagggaaggactcagaggaactggacccctgagaattgagatgagggtggggtggtgataggaacaaacttgatatgcacaagagagatcaagcatgcaaaaggcctgcaaattgttgaggatgcctcctttctgagggtgtgctgggggagggggttgtggtttgagtatcagtgacactaggggtgatctgtgctctcacaagttcagctgggtcaggattcctctcccctccccctcccagcttccccagggtaaatacccacccaatttaagttgcagcttttggactaaatttagctcctggacttccccaacccccaggcctccctgtaagcaggtgctcacagctgcagcatgggtctggtggagagtttgaaccttctcctcacctccactcatccagattccacctttctggtaactaggagtgaagcagagcacaggaatccagtggctggcccagggcataagtgtctcagccttaagccaccttctcccaggaaacctgtaagagaagagctctggtgggagactctagatggacatggagggtggtggggtgtagagagaacaagatgccaggagagcctccctccagattctctccagccagaccctctctcattccttgctctccccttgtccccaggtttacaaatagagacttcatgttagcatcttccccaccagagtaaactgacccaggaagccctctcctctctttgaaccatggagaatcatgctaccgtagaaattatggtttggggaggtgtgtgtttcaagtagaggtggtttgccacaggtaggtgatgaagagctgtcagctttaaagggcagagacaccgtctaaaggaagtagaaagcctcaggaaagtacctaagtctaagtctgtcaacaagagacagaaaaagtttgggttaacctcaaagtagccagcataaaccctgaatctgacttttgggcttcctgacctaggagactgggaaaactcaagagggtgtttcagggctgagtctgaaggaagaaaggatttgagggaggaatgtataagattagtccaaaacaaggtatgcacgagatatggcagtcagatgccagggagccatcagctctgccagctgaaggggaggtgcagagttggctggaagctggccagagcagagcatttctcctgtgagcactggagagctgtgctgagaggcctgggaagagccctgtgctgggggaggaaggctaggttgggtcggcatgtttgtgtgctgtactcttctgagccttacctgaatctcttgagatagctccactgaactttgagtgaagaggaaaagaaactgggggaaagagggtgggattataaaaaaaggagcagactgtacccctgggatccctaggctaaaaggccctccccttgatgagacaggcagagatcatctcccctggaacaaggtcacccttcctctctcccatcgctacattcctctcctccttactgttgactattggttgcctgcctctttcatcacaaaatgagactcctctttagctttagtagagggttgggcaaactttttctctacaggagtagatgataaatatgttaggctttgcaggacctatcatctctgttgcagcttctctactgtagcagcacaaagcagccatagacaataagtaaacaaatgggcgtagctgtgttccaatcagacttgtgacactaaagttttaaatttttctttttttttttttgagacaggatcttgctttgttgcccagggtagagtgcgggggtggggcgcaatcatagctcactgcagttttgacctccagggctctagccatcctcctgcctcagcctcccaagtagctgggaccacaggtgcaggtcaccacacccagctaattaaaaaatttttttttgtagagacaaggtctcactgtgttgcccaggctggtcctgaactactaggctcaagcagttctcccacctcagcctcccaaagtgctggaattacaggcatgagccactgtgcccggcccatttttttcaaccatttaaaaataccaaaatgattcttagcttgtgggccatacaaaaacaggcagcagggcaaatttggcagggaggtggtttctgaccctggggatttttcctaactggtgacttctgctctgcctagccatagaaagtcctgtttgtgtctcttccaggcctcaaaatacagctgtagaaccttttaattcaacatactctactgatgcctggttcttaattgcttctcctagggaatttaaggacttgaaaatggttaatagagtaaacccttaag

SEQ ID NO: 34801 - DNA, 2497 bp, Homo sapiens
cttagcctccagaatatctgggactacaagcgcgtgcaactgcgcctggccaattttcctgggtccaggaaatgacagtattcctggtctttgtttaaggtacactgtcttgcaaacataggcttatgtataatggtaagccacaagcatttactaagtttttttttgagacatagtctcactggcccaggctggagtgcagtggcacgatctaggatcactgcaacctctgcatcccaggttcaagcaattctcatgcctcagcctcctaagtagctgggaccacaggtgcacaccaccacccccatttttagtagagagagttttgccatgttggtcaggctggtctcaaactcctgacctcaggtgatccacccgccttggcctctcaaagtgctgggattacaggcatgagccaccgcgactggtcaaatttttctttcatacagtagcactgatacatctttcatggttcatgatggggaaaggaagatacagcgacttccatcctgtttcatacctgaccccaactacccagctttgaagtggggcaaggggcaaggaagcaggtagcccagcactcctccccgccatcaccaggctcctctgcagagctgttgttccttaaagctgacaacaagccacctcatttcaaaacacacacacacaacctcattttgacacaaagttgtttccctctttctgtttctctgctttgcctcatgagggatttctgagaaatgaaaaaaagtcacctcccacagccgcagcctgcagttttgttttttggttttgtttttacagatgaagaagaggggggtggaggaaaggagtataccgcttaagcatctagtattaatccaaaactctgcaaagtaagagaaatgctcttcccatagcccttcacctgaggtgtgtgccccactttccttagatttgggctctcatgcaaaaggaaataaacaaggtatcctcccctcaggaaagttcagtaacaaagcagtgaaaccgaacagctgctcccttgcagcaggccagctgtctcccctccccccatttccaccaagggccggagacggtgggaactgctccaggcaacctaaaggatggcgttgtgagctgagaaaggcaggcctgatagatctgggcataggagcttcaggaataaaatgcatgtgaatgcggtgtttcccagggagaattaaccgcattctcgccttcaaatctgaatacctgagagtcataaccagcccagtagggtagactatgaaatgtatagcaaaattttcaaaaccagctcctcctaccagacaagaaaattaacattttttagggcacagaactgaaagcatttttactgaaatctaatccaggatgaaacctaacagttaaacattcttttccttctctgcttctttggctctctatcccagcacaccttgtcccaggctaacttgagtaaacatacacatgtgaccacatgagggcgggaagaacaccaagtgggggtggtgaaattctgaatggaatgcagccccagctagttagggggccccgggctgagacctctggcactggcagtagacttatacaggcaaagaagccaaaacaatgagctcatgggcaagaatgcagcctgtggggaagtctgggcagctagagcaaactggttttttgaatcaggatgggaatagcaatagttgagtctcccacgggaacaggatcagggagagtggaagccaccattcagtatcttagggttccagttaaataacttttggaagctcttattaaaattctgttctgcagacagcatagtgctcttaggcaaaaccttggttcctttccctgactatgtaaaacctagagggtgaaggaccagtgaggctccagtgacctaccttaggtgatgctcttaaaagagcaactttattcaaaccaggcctgccaatgccaactccttcagtctagatccaaagatggctatgatcctgagattgtgtgtttagggtcaccactttaacatgatacaggaagcaattgagtcttttctacttcctaaacacagtccatccagttgtgtgtcatttatacccagtccagacttatttagaccaaagagcctttttttcctatcagtgttttccaaattttatcttaagaggcagggtcttgttatgttgcccatgctggagagcagtggctattcacaggtgcaattctactactgaggagcacaggagttttaaccagctctatttccaacctaggcaggttcacccctacttgggcaacctgatggtcccccactcccaggaagtcaccatattgatgcagaacttagcgtgaacaccagatcaacgtagcacactatagccctgaactccggggctcaagtgattcttctgccttagcctccagaatatctgggactataggtacgtacaactgtgcctggccaaattttttttttttttttttttgagatggagtctcg

SEQ ID NO: 34802 - DNA, 6649 bp, Homo sapiens
tggtggcgcatgcctgtattcccagctactcaggaggctgaggcaggagaatcatttgaacctgggaggcggaggttgcggtgagcggagatcgtgccattgcactccagcctggacaacaagagcaaaactccatctcaaaaaaaaaataataaataaataaatcaagacagaaattttgattttaaagaggtttttgattttacttggaggtttaagaactcctctaagtacagcagtaatatatttaattaaaaacccaacacctctaattagaattgaagaaaggaactgtcctttgctctaaggcaaatcaactttgtgaggcttttgctttgaattcacctgtacatatttgctcagctgacttctctaaaaggtttgcctaagagagggaaggaaaaagaggcgtcgatgagaaaagacccatatcacaccctgtatttgaataaaagatttatttttttttctcaggaaaaacagaaagttagggaaacacactacatttgacaaccaacattaatttgtagttggtcctaacccttcctggcacagctatcaaaagtacagctgtttaaccagaaccaaggtgttcaccccccacagaatgtacatgaaacactagaggactgcatgtttttccctgagagaagcgtaagacaaacagaagtcaaaaagtagtcactgggagcgccatccttctaagcaaatcctccctttcccttttggaggatttgcccgaactacgtagccagtcagcacttagaccacctgcctcctcctccccctataaacccaccactcccctcctcctttcccaaaccacttggggtgtcctaagccctcactgccccaagcccaaaatatcaactaagatccttgtctgtatttccacagtcatacctaatgaattgggaagtggggcccctaaaaaccaattcacatctatgcacttgtttccactggatttggcagacaggcttttttagttaccgtaaccagatcttaagattaattaaaaactacataaagtgcttttaggtccttagagatacatgatataaataagcggcttatgatcaagaacgataaatacataggtaaaaatagctctagcaaagatgaccttatggctctgagatgggcaggcagggcagttcttccccattacattcttagtcatcttattcatacctatttttaaatggagtccacagactaaaggtcatgttccgagactgaagctttcaaatgaccctagttccaatatagacactttcttcagtttatcagtagcttttaaactctgaggtttaacacagctcacctctttctgtaaatttaagtgagcatactcctatacaaaggaaactttagagaaagcctcataaaatgttctttcctctgaaaattcctgaggggacttttgacacattgcccccaaagacaggataaaacaatagttgaaaagataccagtccaaggaaaagggacttcctcccacctctcaatgactgttagtgtcacagcacccatggtattaccacctgctaacaggatcaagttcgtgaaagatgaaaggtctgtggactcttggtggggagggagggtcactcaggtttccagcaggggtttcacagtgccaaaatctaaaagggctagaaagagttcagggatggcaggggaaagctgtaggaattgatataaatatctgtagagggagcagaacaatcagcaatttcaaggaaggacaggaaataaaaggttaagtctgatagaacaaacatcaagactgaaatccaaagatgccaatgcaaaaacttgcaacaaggtttgggaatcattaatagaaacaaaacagtaagtatttgctttattgacatactaggcttagacctgtgtgtgtaacaagcaagcctaataatagcaccatggttagactagcctgcttttccaagccatcattttataatttattaagcaaacaagggatcaaatgtctctccatccacctgatgtgatctttttatatgcacacagctaatgagttccattcagctgaaaatcttttagtaaaagctttaaagatgagcccatgaattcactttaaatttcaccagttaaattaggtcaaatggaaggaactcaaatgagtattgcccaatcagagcccattatttgtaagtcatcagtaaccttaaaactccacttagacctaattattgaaaacttgcatataatgaagtgaaagaatttccattcatcaacctctcaatcccaggttttcaaagaaaaacctaaggaatacttaccaaaatcagataagaaaatttaaacctgcatagttatcagatttgttccactacaaccagtctgcatacagttacacatcaattcgttctgtatacactctagaactgaacagaacaaagtttagcatagaaaagctgtaagaaacaggttcctaattacggaagttgcaaagttcaaaagggtatgaaaaaaactaatgtaaattcgatacttccttcgtttcaaagaaatagactttctgtaaaaatatatacaatttttacaaatacatttacaagctgtcttaagaattgaggatatccatattcataactaattactgagccttccgtcaagtattattggtgataaactaggctaataaagtaagaatcatggaaaccaagccaaagtataacaggtataaaagtcctgaacacttggactttctaagaagtatactgggaaagctaattagagagaggaaaagcttcccttgtacagtactgaggcttacagtcatagttctattacttgtaacttttacacaggtcactggcattcttagtgcttctcttaacactacagtaaattaatgaattcggcgggtaatcaattctatgacttgcctggctactggccactttcctgttctcaacaaggaaattaagtctttccaccctaccatcttcactaaatctaaaagtcctcctccatagcttcccaaacaaagtttgtttgttgctgaaactgaactttgcttctttcagacagtgactcttcaatcaatggggagcactcttcccatgtatttattcttgttagccataatcctcttgccacttgcttttctggctaggttgctagggtgcaactctaggaagttacagcttggagtccaactgcataaactggttttggtggtggtggtggttggttaaaagtcaactattgcacttacagtaaggctatcttattagatatgccaaaccagctcctactccagcaacacctgcaaaagccagcagcacattcctgatgccaccttctaggtcctctacatggaagaactccacaaacccatcctagaaaacaaaaaagaaaagcacattttcaagtatgggtttctgctctcttacaacactactatccagagagaaggtaaattaaaatatctaaggtttccccctaaagcaatagtaaaccaattattattcaccccggggcaaaaaaagaaaataagttcttcagtttcttaagcggggacccatgataattaaacttcattttacagtactatcttggtcttattaggatttatcctaacaaaaggacttccagagttcccatgaggtaaaagacgaaaacccttattctcaaatctccaccacctaatatttcagtaacgcctcaattgcgcagatcagtttttctcaacgtagttaagtacatcctgcatcagatctgggtttgtttaaaacgcaggctccaccccatatcttctccattaaaacaggcaccgccttaggaattatttcagctatcctcccctggtgacttattttttcatggtttgaatccactgaagagtattcaactgaattggaacaaaaaattgcctagagaaaaccaagatttttgatacaattcaagaccgccataccactatctctaaggatccactacttaaatcaacatcaaataaacaatggtcctttagttagagcctgcaaacagccgtgcgtcataaaaacctttagatatccccacctctctaaaaaaaatccttcattctacttccactccaaggcccctttcatccttaaggcaaacttacccagcctctttgtttaactagccagtcccgttttgtccttacgagaacgtctgtgatactttctgctaatggttcgatgcagctttcttggtttatggtcttcaagtgtttagccacaaaggcaccaaaagaaatgagagtcacaatcctgccccagtttgttacgccgtcgctgaaaacatggatcatcactcgagacaacgatttcacatcgtcttcgtttttgatgtccagtttccgaagcatgcctgagaaagaaaagcatgcaggtcctcacggcctcctttgtctaaaccggcgcaagattcgcctgcccacccgcggcgggaaaatcgctactgggatttacagaactcaggttgaccccacttgaaattgacatcccaccctttccggtctttgaacaagagctgccatttccaaaagaatcaagatgggcggaaacaatgactcatggccagaatattctggcttcaggaataggatgagacacgtttcaacactgactcgtttcggtttccaacccacccttggcgggtgagtccggggagagatggaaaaaagggagtgaggccttggcgattaatgaacccccttaccttggaaggccgtctcgtggttgcgctgcacgccatccccaacccgtcgtaaggtctccagcgccttcctgctggtggccccagacctgcccattggctttgtgtccttggcgccggtggcctgctcccgaaggtaccgagagataatctccagcgactgccggtacaactcgtcctcctcctcctctgctggcggcggcgtcgagggtagtgacccgtccgtactggtgttattaccagattccccgaccaactccagcagcggcaggacagccggccgcttcccgagaggctccggctcgtacccgtccagctcctcttcgggcgacatgatggcgtcagcggccggggcttccatctcctcaagcggcgccgcgcggcgggtgggcgcgaagaaaagcagcctcgcgggggtcgcggtgacgtcggggacctcggcgccaatgggcggcggccgcgcgaccctccgggagtctggcgtgagggtggacggggggcttgcgccggcgcttccgccaatcaccgcgccggcctcccctccccctatctctcgccgggccgaggcctccttctccgtagccaaaagtcgccctcccgggcgggtggcgccgccgctgccggcccccaagccggcccccccacagtagaggttgagtccgattaccgcgtttcttttgaggccaaacattgccagtcgccgccgccgcctggctgagaaaactggggaagaccccgactccttactggaaggaagcggaagtgagaagtggcgagcagctcctttatcacggttttagggcggccagtcctacggggtggcgccagcgaactctttttttttaaaaaaagtattcccataaaaggggaaaggggcggcagcttccggagggttgcgcacggcacctaccagctgcccggccgggccggggcggggccggggccggggccggggccggggcctgagccggggcctgagcggggccttccggtcttcggaggctctgagtgccggttacgtaacggcggctccgagcgcctggggtcctcccagagctcctgggctcgagctctttccatgagcacctcgggccttctcgtggctacctctgtgcttccctgagacctgatttgtgagccctttttgctggttttcgccagaggttttttaccaaatcaaaatttcaaccattgactaacacaggggttgaaggaagaggacggggaagttcagtgatggatgggaacaacagtcttagatgatagggataattaagagggcatagttggggacttgtggttattttgcacagctctctactctcagtccaatgtttggaaatgaggatgctccacgtgctaccctaaagaaccatttatgtaagtggactaagctaaaactgccacagctaaactattcctgcctccctgcttgcttctcccatctctgttccatagtctttggtgctatttacatataggccttaatccattagaatctcgtctgagagtcttgacaccattttttgtttgttttgagacagtctagctctgttgcccaggctggagtgcagtggggcgatctcggctcactacaagctccacttcccacgttcagacgattcggtacctcagcctcccgagtagctgggattacaggcgtgcgccaccacatctggctagtttttgtatttttggtagagatggggttttcacgatgttggccaggctggtctcgaactcatggcctcaagtgacctgcctgtctcggcctcccaaagtgctgagattacagctgtgagccacctcgcccagctgattattgtatttttagtagagatgtgtttcatgcgcgtctgtgtgaagacaccaccaaacaggctttgtgtgagcaacatggctgtttatttcacctgggtgcagg

SEQ ID NO: 34803 - DNA, 475 bp, Homo sapiens
attagctgggcatggtggcacgtgcctgtaggcccagctactcagaggctgaggcagaagaatcgcttgaatccgggaggcagaggttgcattgagccagaatccgggaggcggaggttgcattgagccaagattgcgtcactgtactccagcctgggcaacagagcaagactctgtccctttaaaaagaaaaaaaaaatttaaatgtgcataccctgtgacccagcaactttcaatatttaccgtagagaggccaggtgcagtggctcatgcctgtaatcccagcactttgggaggccgaggtgggtggattacctgaggtcaggagtttgagaccagcctggctaacgtgatgaaaccccgtctctacaaaaaaattacaaaattagccgggcgtggtgttgcatgcctgtaatcccagctactcaggaggctgaggcaggagaatcgcttgaacccaggaggcagaggttgc

SEQ ID NO: 34804 - DNA, 2917 bp, Homo sapiens
catgcccagctaattttttgtattttagtagagatggggtttcaccatgttgcccaggctggtctcaaactcctaagctcaggcaatccgctcaccttggcctcctaaagtgctaggactacaggcgtgagccaccatgtccaacctgtagttttgttttttttttgaatgaaggtttttaatgttatatgttgtataaaattaatgcattaatttattattatgaaatcaaaacaaccctaccttaccccgaaaataacacctgtaggtttttgtcagttgtcagatgggcatcttgctatgttgcccaggccggtttcaaactcttggagctcaagctaccttctgcctcagcctctagagcagctaagactacaagtgtgcaccaccatgtccagcttaggtgtcagtttgatatgagtcagtagcataagtagtaaagaaaacctaagggggccttgggctctcctacggtccaggtctacaagcaagcaggtaatggtttagttctatttggcttggtgaggccacatctggaccaaagttagacaggcacactgacacatttgagctcatccagagagtagacaaggtgatgccaggagtccacactatgtcaaggaggactagctaaagggagggaaaatgtttaggctagtagatgtagaaagaggtggtcctcaaactcttgacgttttcatgagggtgaagatagtagatttcaagacactggagttattcaagagactaaatattcactttccagggatactgtgaaaaagattcactgaggaggcattcgttggaactagattttttttttttttaagagacagggttctgctgtgttacccaggctggtctctaactcctaagctcaagagatccgcttgcctcagcctgccaaagtgatgggattacagggtaagccacgtgcctggcctggaactagattatcttaaagttagtttccaactaactttatttcaatttatttcaagtttccttgaaataaattgagttttcaatttatttctggttccttggcctcaaccagatttattgaaatttaagtccctaaaactgtcttttgttttattatagagaggatattaaccagaaggttacatactacaatctggaaggaataatctcaatatcatgagtgccaattaagtgcctcagagaatacaaaggtgaccataactggaatgcttaacaagtaccaactgaagaaatgtaatgaaaattaaagtttaatttgttttcccctgtctctgcacaatttatttcagtgggagaggttttcctcagatgtggatcacctttaggtaatagtctttgcaaccactttaagtagcaaaacatactcttggtccgaaatatattaacacatcaattttcatcataggtaagaatctctctaccccacagctagggtcaacagagccagccagctcgcctctgtgaaagagggggtagttggcttctctccttttgctacactgatatttctaggaatggggcagaatgaagaggaagggttattagtggcttcatgctgtctaggcctggctgatgttaagaattatctcatgagcatttgtatggctccatcagaggcttccctgggggcgctttccaaaggcagtggcaacttcctgaagtgaggtgatgtattctatttctatagccaccactctctcattatccttttgttttccagtgttcttttccacatgaagagccccactatgcatccaggcagttctcttgagtaggatttaaactggctccacacatggtccacaggattcatgtatatctgaccgtttatcagaagccagtgtggtgacttccaggatgtgactctctactttgttacatcaggctctgttgttagtcagcttttgccttgaaattcctctaccgtgagtcatacacagtctaatgattatcccttacccaaggacaaatacaaaatgtttcagtggtcttgaagccactgtctctaggattgagaagatagaattactcctcacctcatctcttttttttggggtgggggatggagttttgctccccctgcccaggctggagtgcagtggtgcgatctcagctcactgcaacctccacctcccaggttcaagcgattctcctgcctcagcctcctgagtagctgggactacaggcacccgtcaccgcgcctggctaattttttttatttttagtagagacggggtttcaccatgttagccaggctagtctcgaactcctaacctcaggtgacctgcccgcctcagcttcccaaagtgctgggattacaggcgtcagccacctcacctggcccttccccacctcttctctttgggattgaatagggctcacagcatggtagtagctctctccaaagaaagctcttttataaacccaatctccgcttttttgttgttgtttttttttttttttttgagacagggtctcactctgtggcccaggctgaagtgcagtggtatgatgatggctcatggcagcctcaaactcctggctcatgtgatccacctgcctcagcctcctgagtagtagctgggattacaggcatgcaccaccatgcctggctaattttttttttttttttttagatgtattactcttgctctgtcgcccaggctggagtatagtggtgcgatctcagttcactgcaacctccacctcccgagttcaagtgattctcctgcctcagcctccaaagtaactgggattataggcgcccaccaccacaccctgctaatttttgtatttttagtaaaaacggggtttcaccatttggccaggctggtcttgaactcctgatgacctcaagtgatccgcctgcctcagcctcccaaagtgctgggattacaggcatgagcctctg

SEQ ID NO: 34805 - DNA, 3848 bp, Homo sapiens
aatttttgtatttttagtagagacaggttttcaccacattggccaggctggtcctgaactcctgacctcaagtgatccacctgtcttggcctcccaaagtgctgggattacatgcttgagccactgcacctggccccatatagagtttttattgtcattattcccatattacagatgaagggactaaggctcaaagggtaaataagtctgttcttaaatagtgacttcctgagacacaggagatgtttaagaacagtactggtaggtgggaagtggcattttggagcaggagtgagaagcatgaaaatgtagcaagaatagaaaagggtgggaaaacagcaaattaagaggaagaaaaatgcaggtcctagcaagaattgctactcaccactgccagagtctgggccatgttctaggtgtgtatttaaacaaatctccatagcaaccatctggtttctgtttttctatgacaacacgggcttgcatttctaaatacaagcactggtgaggacaagtgtgggctggggaagggaagtgggaccgctgagtcaaggggaaattgcgcaaaaaaggcaaaggttctcttggtatgccctcatctatcccctcccagcacaccctcaaggaaggggtctttccttgactcacagcagtcattgttaagagctgagccttgtatgcactttgtcttttgttttggagacagagtctggctctgtcacccaggctggagtgcggtggtgtaatctttgcttacttaaacctcttcctccgaagttcaagcaattctcttgcctcagcctcccgagtagctgggactacaggcgcctgccaccactcagttaatttttaatttttttgtagagacaaggtctcactacatcgcccagcctggtctcaaactcctgggctgaagaattcctcgtgcctcggcctctcaaaatgctggcattacaggtgtgagccactgtggccagcccatgatatcttatttttaccaattatgtaaattcctatctaattagggtatacccttggtgcaagagggggaagggtagatgcttttgcttctcattttcaacccaggtggcacttttggagatactgagggtagagagaggttggaggatctcatctgataaaggtgtggtagccccagaaagaaaggtgagaaaaaggcagctaggcatggagatgcaggaataagaatagatactgccatgaggactaagtgggcccagacctgagttaaaacagccccccatccccgctttttttttttttttttttgaaatggagcctctctctgtcacgcaggctggagtgcagtggcgcgatctcggctcactgcaagctccacctcccggggttcatgccattctcctgcctcagcctcccgagtagctgggactacagacgcatgccaccatgcccagctaatttttgtatttttagtagagatggggtttcactgtgttaaccaggatggtctcgatctcctgacctcgtgatcctcccgcctcggcctcccaaagtgctgggattacaacaagagcccctttcttaagcatagtgattctcaaccaggcaaccaggcaactccagggggcatttggcaatgtctggggacttttctgattattctgactaagcaactaatgggtagaggacaaagatgctgttaaacatcctgaaatgcacaggacagtccctgcaacaaagaattacttggcccaaaatgtcagcagttccaagattgaaaaacctgagtaaagagatgctggtcctacaggaaacgtctcctttgtccattgcaggagcaccagtgtgacagataaaaccatttgaggggggccgggcatggtggctcacgcctgtaatcccaacactttgggaggccaaggtgggtggatcacctgagatcaggagttcgagaccagcctggccaacatgatgaaaccccatctctactaaaaatacaaaaaattagctgggtgtgatggctacctgggaggctgcggcaggagaatcgcttgaatctaggaggtggaggttgcagtgagccgagattgcgccattgctctccagcctgggaaacaagagcaacactctgtctaaaacaaacaaacaaaaaactatttgagggggatataccagagatgcctgcttgttcccctgggccctgagtccctctcagactttcagaccaagtatttttagtttacttctgacaaaaataaattcaagccagaatccaaatttgctgtgaaatcagctggttctagagaatagggtattttcctatacccttcttggtataggcaaaactgccccacagaggctgtgcaatcaggcaaaggcatgctcctcttggccttagtttcaccatttgtaaaacgagtacactgaactcaatgatctcgaatgtccctttagttccaaaactctgtacttttggacatttaagaaatatcctgggctgtacagtttgggtctgtaaaaaaggaaatgactcaaatgcaatagaggaagcctaaggatgactcagacttccctaatcataaacgacacttcagacatggaccttaacgtcaaaccaggattcatgatcactaaatgactttccttttgtacgtgtgagcaggtggcgttcaccaggggtgagactttattgacagtaagttgcctctgccaaaaaacgccctcatatgtctgctgatgtttgaatttctcctatgcagagttttgtctccagttaaaaatgtaaatactgttgtttcttgttggagctcagaggaaaaaaagataactactctaggatatgtatcaatttgatgctactttattttatttattgagacagggtcttgctctgttgcccaggctggagtgcagcagtgcaatcacagctcactgcagcctcaacctcctgtgcccaatcgatgctcccacctcagcctgccattgctggaactacaggcacatgacaacacgcctggctatttttttttaatttttcagacagggtctccttacattgcccaggctggtctcaaactcctgtactcaagtgatcctcccccttcagcctcccaaagtgatggcattacagatgtgagccacctcaccccagcaagttgatttttaacaaaagataacagcaaaaccccagataaattagcaaactaccttcacagctcgatgtgagaactctcttagttttatttatttatacacagagtctcattctgttgcccaggctggagtgcagtggtgcaaacacagctcactgcagccttcaccttctggactcaggctatcctccagcctcagcctcccacgtagctggggccacaggtgcatgccatcatgcatggctaattttttaatttttttgtagagatgggggtctcattttgttgcccagggtggtctcgaactcctgggcacaagccatcttcccctcccaaagtgctgggattacaggcatgagccaccacctggctccaatctaaaattttatattcttgctacaatgttttgaacttccaggttaatcatttctgcttctaaatcatctgctctttgaccttataaagagttctcttaaaaataaataaataatagagaaagaaacaaagaattctcttgaccagaggtttttttttttttttttttttttttttttttttttgagacagggttttgctcgttgcccaggctggagtgcaatggcgcaatcttgcctcactgcaacctctgcctcccgggttcaagagattctcctgcctcagcctccctggtagctgggattacaggcgcacgccaccacacccagctaatttttt

SEQ ID NO: 34806 - DNA, 558 bp, Homo sapiens
tgtgccgccacgcccggctaatttttgtatttttagtagagatggggtttcaccatgttggctaggctggtctcaaactcctgacctcaagtgatccacccaccttggcctcccaaagtgctggaattataggcgtgagccaccgtacacccgctggagttttttctcctttggtaacctttcttttgtacgttacattcacaggcagcttttaacttctttcagtagcaggtttccagcaatgcagattggcacatcatgaggaaagaaatcactctgcctcctgctggccaccagcagaaagacttgagtttcttttggcttattacaaagaaataatatatttcttttggtttgtcacatttctccctcacaaacatgggaacttgaaaaggaatggaagacagagggaaaaggagactgggcctccttttctgctaaacctggactaggcttaggtgtcaagaaaccatttagatcaaatatcttaaatgcctcattttgtgagccacaaactgaggttgatgcaccttctacattggttacagaaacaaaggg

SEQ ID NO: 34807 - DNA, 2458 bp, Homo sapiens
agtttgctaaatgtttcctccttatttttttctttcttttttaaaattgctacacgacaaagcagttccttctttattcaaggtctaagccacctgttaggtctccctgtggaggcggctagctatgtggccttctccaaagatctccacctgagtaatggcacagccttgcttcaacatttccacaaatattatggtagcaagctgataaacagagaggaaaatgatactgtttttaacctcaggaaaacaaagatacagtaggctcactagtatttacccaccagttttcatcaaaaaaatcaatacctaccctggtggtgcagggactctcactactgtagtcaatctcttttttttttttttgtggtccctgctgccctttagtgactttttgaaaagatatgaagtcaacgtatgactctttttagtggaattatattcctttctcttggaaattacgcatagatataacaccaagtgtatttaatgagtacctgaacccagtactaaattttaaaagtcaaatacaaaccccaataaggggtttatttggcgttagtgtttccatcacggaatcgcaggtgcactaagtccctgccttggaagtctaggggaagagagaagtgtctttctcacgaccctgtcggcgtcttttccaagtttaattaccatgattctgtttggaactctagccctcttcaatattgctgggtcctcactgaaggtgagcaatagaccatccttagctactaaaataggtctcttgagaaagttgccgccttaaactagccattataataactacacttctcccctcccccaatactggtttttttttaaacgtctttacctcgacccctatctttgcggattgaggctgcgggccccagcccggttgctgggtcacttacctctacaaaccaataacacacatcacacccaagaccaccagccatcccctttccattcaccgtctttccaaccacccgccccacgtccatgctcggccaattatagcacagcgtccaaggtttgagcggtaggcctattggccaatcaggaagagtacagtactgagtgacaaacgacccaactaaccagcgccaaagcagcatgtcgtgttgaagctcacccagcgtgacgcaaaaagtggccaacccctgcggagcctgagaccatggcgaccaatccgcactggtgggagaccgtctcccgccccatcacggtctccccagctcgcccgcccgcaccccttccacttcacctgcttctcctcgccggtctcctccgcagggttctcttcttcttgtttctgggacatggcgggaccgggactgtggagtgtaaggggcccgggaaggcaaccggagaagggaagggggaggggaaacggggacaacctgcgctgctgcttcggctcctgtcactagggttgctcagtcaaaatggcggcccttgcccgtgacgttgcgaccgccccttcctatgagagccagtgggagtgaggtagatagggcaatgacgtaacgatctaccaatagtcgccgtctaaaggtgggctctatagaggcgaccggcaagctggaacaccaacctggaaagagagtgagccacaaggaccaattggaagcctgtgggggatatcgggggcggggctgctggctgtggtacttttgcagctttggtgggctccggcttccttcactccagcccaccgcgtccgagagacttagcagggcgtcaaactggagagcggaaggatggaaccttttattctcaggtggagaggattaagctttgcggtgttagcagaaaatgatcgagctccagaaaatgatttggaggtcagattcgattttaaagtagtactaacaggccgggcgcggtgcctcacgcctgtaatcctagcactttgggaggccgaggtgggcggatcacctgaggttaggagttcgagaccagcctgaccaacatggtgaaaccccgtctctactaaaaatacaaatattagccgggcgtggtggcgggcgtttgtaatcccaattacttgggaggctgaggcaggagaatcgcttgaaccctgcaggcggaggttgcagtgagccgaaatcgcgccactgcactccagcctgggtgacaggacgagactttgtcgcgaaaaataaaataaaacggtaccaatggtattacgatgtgtcacttggcctgtggaagagagagactgagtctcaacccgagctgtcttgcaaaacactaatggcttacgttccgtagtttcactcttatgtgtagtttttatattccatcagggtgatcccttggggactacgctccttgaaacaaggaggacagtgtaagtatgtggtaaacatttggtaaatacggttaatactagttaacctatccagaattacagtttaacatttcctgggcgtctgtctgtatgtggatggta

SEQ ID NO: 34808 - DNA, 1334 bp, Homo sapiens
cactgtgaatagggactatttcctaaaccaatccaagaaactttaaaccttcgcggggcagggggggagggggagagggggcggtttctttgagaaattagtttcatctgcacatttactagttaaaaatcctacttgaaagaaaacaaatggcccaaatgaatacaaacctttccctcccataaaataataattttaaaaaatagaggttttttttggtggggggaagggacgttaggaaatgtaattttctcgttgcttacctgatgttactcctgggttatggctggacgcaggctgtagcttgtgctgtattttagaaggacacctgttctccccaccccacccccgtcctagtaggtgaaaaacttagccacgcagagagcacaaacttcctgatccttcgatgcagagaaggaataacacatcagcttcctcaggatcactaggcaacctaccttggtgtttcttcattgcgccaatcagaaatcaccaaggttgagtcccgccaatcggagctcacagggggaggctctcccccagctattctgttgcgatccagacaaacaccaccaaaaggaggcaggtttgcgttcaacctgacagctggtcaatccaatgaaggaaccttggtggaagagaggaaagagggctgcgctccccacccccattaaaccagccaatcaaagcgctgagtgagctaacatgggctgccaatctcgaaaggtttctgtgggttaatttcagcgtagcaggtgtgttgctgtagtagcgtatactgggacaattaagtgagatgtgttgggatccaagcaatacagctaaaaataaataaatatttttacattggttgtttctgacagtcagtttatccttgacttgactgttccagaaaaacatgatctgggtcagtttgtgtacgtttatatggtttaccttaaacaggatgaatacatttctaccatcgcatatgtaccagcattccctatagcgcttattactgacaaacccatggatgtgtatgtttttggaatatggctgctgaaactacaagcggcaaacagaccaagttttaagtcttcctttttctaaagcaaagaaagcaggcaaggctggaactagctcccaggtttctcattaaaagcacagcatttttcatactaccactcaaaaattctagaaagtgtgctcaactcttcttgcaaagtaatagctaccgaaatcatctaaaaattagtattccctatccccccatcctcctaccagcctttcaaatgaatgaagccatatttcctgctacttaaataaaaattagaagcgataaaagggcctac

SEQ ID NO: 34809 - DNA, 1670 bp, Homo sapiens
gctaggattacaggcgcgagccaccacacccagcttaaatatttactgaaaacactgcctgtaagaacacaattttaagaggtagaaaacagtactcctttaaaagcatatcgctcgagtggcaatccaatctaccttttccttgtattgtttgccataggttttcttccagagatgccagtggtgatccagggtaggatctttatgcaactgtgccactgcagaggagcacaccaagagcacacaaaccagccgtttcattctgtgtaaggaaaggtaacataggaagtgttgctattagctgcatatgttgtgaccacatgttttcataagagaaaataacaatgcaaagtctatcaaagggacagactattataaacagaattatacaggaaaattcctgggatatatagtcacagggaacagctgcagatttatgtcagaaatactacttccaatgcttagtagcactttaaaaagtgatttccaggaatttcccaatatctggtaaaccaaacacatctagagggttagaaaacagggactttccaggatttgccaacaaatctaatcaaaggaaatctctttctctctctctcaaaaaaaaaaaaaaatcatccttaagagagacaaacctctgaaaaatcagtttatctcctgaatttttgaatacatgggctcttcttaactgacctgtttaaatatccacagtctttacagatagttaaaagacaattctcatctattgctttcacatctttaggtaggtaattttcctttttacgtttttttttttttaatgatcagacatctgtttcaaatgaggcaattaactactctttaaaatgccacttctgtatttaattcaagagacatcaacagaaattcagcgactagctccctcaaactggattctactttcttttccatttctttttaattgaaaacatctggaattttaaacatgtaagcctttaaattatattccaaagaaagccatgtttcagtctcaacttagatgcttagatgctcaagcagacattaactttttaaaaatagagaagaggcaaattgaacgacacgattttttagtttacttcctgaaaccaaagatttaaaacctagcaggcagaacaagttacaaacacagagtgtttgaagaccaaatgggagaaaaagaacaaagagtacatacgtgatagaaccagcagttgctcccacagtaagagtccttgaattagtgggctctcttctaagatttcaaagcaacaaggagatttcagttcaattgacttgaaaagaaattggaacttgtcacatgaggtactcaaaatgaggaagtgaactttcatttcagtttcatttaaaatctagctagtacagtcacctctagtcatttccctatggtcttggggacaaagtggatacagtaagccatcaagaagagcccttgtctgagcccagtggctcatgcctataatcccagcactttgggaggctgaggcgggaggatcacttgaggccaggagttcaagaccagcctaggcaatatagtgagaccctgtctctgcaaaaaaattttttttaattagctgggcatggtggtgcatgcttgtagtcccagctgagggggagggtgaggtgggagaattgcttgagtctaggaggac

SEQ ID NO: 34810 - DNA, 487 bp, Homo sapiens
caaaaaaaccttactctactctgatcaactatcccaaatcctataagctggaaaatgaagaacttcaaactaatggtgtttaatactagaaaagtagaggagaaagggatagcttgataagactaagaagagttggtacattagaaatcccaacattggaaaatgcctatgtgatattatgaaatacaactgattgctcaacatggaggctaggggcactgacccctgtgccatcgaaaattcgactgtaaacttctgactctcccaaaacgttactactaatagcctactgttggccagaagccttaccaataacataagcagttgaacacgttttgtatgttgtacgtattatgtactgtattcttacaataaagctaaagagaaaatgttattaagaaaatcataaggaagagaaaatgcatttacagcactgtactgtatttatcgttatcataagcttatatcatcttacaagatgacttac

SEQ ID NO: 34811 - DNA, 553 bp, Homo sapiens
aattacacctctcagtatgtacttccttgtgtaaccccctcacacactcacacctggaacatatgacttgctttggccaatgggacataagcaaatgtcatataagcagaggcttgataagcacttgcacactgggatttgtgctgtagattgtagccatcaccacatgaaaaaattcagtctggcctccttgaggataaaaaaacacatagacagaaatacccagccatcccagctgagtccagttctcagctgaccagctgagaatgcagtcttatgagtgagtctaggtgagataagcagaataaacatgcagtcaatccacagaattgagaaataacgaactgttgttctttttaggctatgaagtagcagagaactgatacagagggtttgtaaatgccgtcctctcctcactgaggtcctttctctagagatattaacggaatgcttaaaaattttctgagatatatgaatatttatagttttaggatgaagtactctccttagacctaaggacaaaaatttacaagtcagaagtataaagatcata

SEQ ID NO: 34812 - DNA, 3142 bp, Homo sapiens
ctgcactccagactgggcgacagagcaaggagcaagaccctgtagcaaaagaaaaagaggggagaggggacaggagagaggggagaggagaaaggaaaacaaagaaaaagaaaaaggaaatctaaaaattgcagaagcaagcagccaaagcatagtaaacaaagctgtttcattaacaaggattctgcacacacacatacacactaacatatgctattttctgctaagatttaagctgatattgatcagcttatgaaaatatggtcaagaggctgtcattctggttgctgttgttcaaaaaacaaaacaaaataaagcaaccccacccacacagctggaaaaaagcttctgacatatgaactaaaacttgtttacccaggccacttcttaataagagaaatgctttgcaatttaactagggttatataagtattttgcaatgtgtgatcagttaaaaatcttgtttatttattccatagttcacagataggttatattactacaaggtcaggtttgacataacggcatttttcctgttttatagttttattctatcactcagcacttcctgcaatgtaatttttgcgattaattttacctccctttccttcaaaaaaaatttaaaagattaaaaaaaaatgacgtgacaaattaaccatttcttaaaatagctattcccagaaacacggtagaaaagaaatttcagtgattcaactgtcctatcaaaatctggatattgcaaaatcatactgcctttcagtaacatgaaaaaaaatctaatttaaatttcaacgtggggatgggggtaatcactcctactgttttattttcaagaaattctccgccccacgcaacacacacacatatctcaaggccctttttaaggctatcaaatatattggtttttggaaaaggatagactttatttggcaagaataaccaaggtctccaagataaactagacccctaaaatgaaatgccttctaaagaggaataactgtaacatagaggaaagagggctgggactagtaatttgaagatctgatctctctagaactgcactacaccctactccatctcttagacaaaacagaccaaacctttttgatatttgattattttttgaaattgagaaatggtgtggaatcaaacttttctgaaagagtttggaaattgcctcgacgtaggcctaacaagatttaaacctggggctgtggaactaaagacctgtccggaaccataaccattacacaaacccctgccctcagcaggcaaagacctacaggccctcttaacacaagatctaagtttcaaagtatagtccggggacggagacggggacgggggttgcgggtgggaggtaacagcctaaagaaacgtcgtatatatcaaagaatgtccattttttattttttaaattaaaatctaaacctttaaatgtttggaagcaacgcctcaactaaagagcagtgtggtccagggtttatgaatccaaactactcttaaagtaaaccgagacactctgcctacagttttcggcatcaagcggctccagcgggcagagggttaaaagaggaccacatcacagaccagacgccgaccgaggagtgagggcgggccagccccgcactggctgccgctccaacggaggtcaggacagggagcccccctcaactcccacctgccccctcgctcccttgggtatactcgagtctacccaagtccccgggatcgggcccctccccaggtcaccgctcccccaccgtctctcgcggcccccgccccgccccggcgccttcagctccagctgcgtcccctcagccctgggtctccttagttgtcagccccttcggcccctcccctttagaggcgccccagtcctccgtctcctcaccggggttggcagtagtcgccgccatggccgcagatgccaccgccgccgcgccacccccccccccagtgggaggagccgccgccaccgaaccgggagggaggggaaaagaaaggccactccccagaagcggcgcctgaccgccgcctccgctaccgcggaatccaagatggcggcttcagcagcccccagcatcccagcccctgcggcggggagaccccgcctatatagtaggcggagtcaacacacggccagcctcctaagaaaaattgaccaatgaaaatgccaaatcgtccaagggcagggctactcactgcgccagccagtccagtgaagggagggcgaggaagaagtccagctgtctccctaatctcgccctccttgcgtaagaggtcaatgaccgagtaacgtcattgaaatgcaattaaaatgggtattttaggctgggcgcggtggctcgcgtctgtaatcccagcactttgggaggccgaggcggccggatcacctgtggccaggggttcgaaaccagcctggccaacatggcgaaaccccgtctctactaaaaatacaaaattagccgggcgtggtggcgcatgcctgtaatcccagcttcttgggaggctgaggcaggagaatcgcttgaacctgggaggcagaggttgcagtgagccgagatagcgccactgcacgccagtctgggcaacaagagcgaaactccgtctcaaaaaaaaaaaaaaggatattttactaaaaaccttcgcttggtggtggattcgtctgagtggttgccgtgcagacaatgtatcttgtaaatcctctttaggtgctaaagagcacctaaacatcacatggtgatttgtaatcctttccagtttttttcctcttttaaggacttttgtccctggtgaaaaagttaaatgactaacttttgaatgcctgctatggaaccggtagtctaaaaggatccaggtgttaacggtttggtatgggagatattgccagccaaaattggaggcaatagatgaagaaagtaatttgagaatgggtaacttctttggtcagtgacagggacagagtgaggagttttgtttgtctgtttttgagacagagtctctctctgtcgcccaggctggagtgcagtggcgcaatctcggctcactgcaacctccacctccccggttcaagcaattcccctgcctcagtctcctgagtagctgggattacaggcgcacgccacacgcctggctaatg

SEQ ID NO: 34813 - DNA, 938 bp, Homo sapiens
gaccgttagcttaaccttctttctcttatgcgtattcttcttgggagtggtgtaatacttcttccttggcaccaccacaaagtctcagcacaataagaagagtggactccttttgaatgctgtcatcaaagtacatccatcttccaattgcttaccagcaaagatcactctgctgatgagtaggaattcctttcttatcctgccaggactttacattttgtattgtattagagagttcaaccaatgaaccccaacaaataagagagtgatgtcttccccattacaaaaatctgcatcttggtagcagttctcctgcagatggtggatcacaaagcaaacatttttaatgttaagaacaaagtatcaggattttgtaagaaaagcagactatgatgcaaatgccttgactgccaagagtattttatttcccaacacatgataattttctttcttcatcagaggaaaaaaatgaatgacacattattgaacatattctaaaccacatccaaatgttgcaaccaaatgggggtaaatgcttcccagagctgaatgcagccaatgcaactgaatacaactcctgccctctctcaagttgaagcatttgacttttgaggttactctttgctcttctgcttagaatctgacaaaccactgaatgctttcactagaaattctccaatagatccttgtaagctccaactattcagaattatctggtagccatcaaacatttcttgccatatctgacaaactcactgtaaatacagattttctaattttagtagaaataaaaattaacagatcagatcaggatgccagttggcaaattttaaaaaattaagaaatctgttgactgtgaagcctgatctacatgtttttatacacattttcagcttatcaatatttaaccattactaatactattactattatgttta

SEQ ID NO: 34814 - DNA, 628 bp, Homo sapiens
tgaaatgagcacaggtgaaaatgtggtcaacaagagagaatttcaaggacttggcagttctggcgcttgggctgtgtttccagcctcacacacaaggttctggtttgtactttttaaatgaaatgtagattcaataactagtacagttagtgtaaagacacatgaacaaattaaagcaatgataagacgctgtggtagtcaataaagctggttcatcagacacaccaggttctccctcctcccagaggtaagataactgctcttcctggccccctggtggttgtgtaggactttgtgattcattcaggtcaatgagttgtaaaaatcagtgtcttgagtcattttgttaatatgagtccctctagcattctttccctctggtattactactcatcagtgtgggtttccccagtagctatcattagcagagccccaccataccttccagagatgattatgtagtgtgagcaagaaacacgccttttttttttcttttaagccactcagattttggagttgtttccacaacataacctagtctatcctgatactgatactattttaatacatatcaagttcttaaaaattaagtagttaacacccagtactaataggggtgtggggaaac

SEQ ID NO: 34815 - DNA, 1684 bp, Homo sapiens
gcagtggcgcgatctccgctcaccgcaagcaccgcctcccgggttcacgccattctcctgcctcagcctcccgagtagctgggactacaggcgcccgccaccacgcccggctaacatttttagtacagacggggtttcaccgtgttagccaggatgatctccatctcctgacctcgtgatccgcccgcctctgactcccaaagtgctgggattacaggcgtgagctaccgcgcccggccaaaaatacaagttttaccttttttattggcttcaggtaatgtccacatgttaaatgaaaacaacaaaaatccaaatacagaaactcgtacatacaagactggaaaatgaagctgtattacctgaaaggagcggagtggtgatggggcaagagagaatattatcacgtttttcttattacatcttgatagcctttacaatttgtatcacttatgtaacaaaacaaactcaagtaaaactgagagaataaagctctgaacctatgagcgtttccctaagtctttacacaatgaatatagtaatggggccactagtcgagggtggtaggagcggcggagactcggtaatatactggccacgcctactctgccctgccagtctcttctcacgtgtgcccctggaaggctctgccttaacgcatgcgtagttaccttagttttcgtcgcctctgaggggcgccccgcggctttggatttgaccccgtcaggctaccgtcgcggtgaccggaacggcactaaaggtttgcttccgggcgtttcttttgcttccccttccctctttcacgcttcctcccctccccctcctcccttatcccttcgctttcgctcttttccgtcgaggccgacccctgagttgtgagtctggggtctggttggtgaaaaagagcccttgaagctggaagacgggaggtgcggggaatactgttgagttatttggtgaccaaaggcttatctgggacgttttgtttgtgggagggggtcgggcgagggtgggaaggaagtcttccccagaggcgaacgggggcggggctgaactgggtttgcgaatgggtaggacgcacccctagaatgggtagcacgggggtgggctggtgtgtgggcagaggaaaatggaggcgctgaaaatcagattttctttaaccgtttgattaaaaaagcagttcacacgaatgtgtgaagtatttggattgtggatattaggtacccacgttttattcccaggttgctttacttctctgtactttgggggaaacctttttgctgcaagctttcgtgtgtttgaatatcatagactttttaaaaagtaaaattccacatggaagcaaagtaatataaggggaacaagtaatgaaagagaaaacactgagttagtgagttccaaatcaactccatccccaggtggggttttgtttaaattaggcatagcatacaaagatttatcacattagttaaggaacacatatagaccacaaaaatatcttatagattggttctcttcagtatcccaaaagattatttttaaagttcggtttgttttgagacagggtctcactttgtcacccaagctggaatgcatggcgcgaacatagctcactacagcagctactcctgggctcaagcgatcctcccacttcagcctcctgagtagctggaactaaaggcgtgca

SEQ ID NO: 34816 - DNA, 5076 bp, Homo sapiens
agaaacagggttttgccatgttgcccagactggtcttgaactcctgggctcaagcaacctgccagccttggcctcccaaagtgctgggattacaggcatgagccacggtgcctggtcagagctatttcgtataaatgctcatccagaaaacagaatcctagtctgcaggggaacacccataccctctcagtctaggaaagagccgctatgtaaacctcctcccccaactgaaagacgaacaacatggtgggagtgaccacttggatacccagaggagggagggaacggtcagacgtgtgtggctcatgagggaagagcagctgcttgaagctgagaggaatggcaagatggtccaggagagccagggatgctgggtccagcaaacacctggcaatcctaggactcagcaagaagccgcagcaggatgaccatgacagtcttttccaggctccccaccccttgttctcctgggaaggagatgaggcggtgggatttaggctggcccagaaagtgaaagcagagacaggaagaaaagagagtggtgaaattgttatccacagtgacctggagactagttggtgccactgactgaagacagagcctgagaccacagctgggctgggctggtcctgctgctgctctgacagctcccgctccacccccacccaccactgtagcccttgcgaaatccctcagcctgtcacgggtcagtattccagctcaaggactttacccccttgtccccactcctggtcactgctctctcggatgaaatcagaggtcagcactgccagtaaaggagcttcagctccaccttctcccctcctcctcccccaaatcacacacacacattccagacactgcccctgccccctccacctcagccagaataaatatttaattaaacagatggaagccttctgaactgaacaaaattaaatgtaattatccacagtggaactttccccacacaaacacacacttttttcctagagaaaagttgtagaaaattgaataaagaagggacaagggtagaaaatgcacagagaagggacaatgcggaacactttgatgtgtgcacatggccccctcttcccacttttttgctcagcctgattggaagcgagaaatcagcctgacccagtcacctgactgctgtctcttggagcccaacttctccagggaaatgtaaagccaaaggtaccatgttgccctggcagtcctagacttcagatcccatccccaaccaggtctgtgaaaactggcagggatgtttctctagtcaggcggcaggctggagtcgcagagggagggtggagcccctgctggactcctggggcccaggaatgtctcatgcctgcaaaacagggggtggggggcaggcaaagtaggcactagagcatggtcaaggacagacacctgggcagtgcaacttcctcatccccaagatgagatagcgcctgtcctcttccactccaagcagggagagtggaagacttgggaaatgcagattaatgggggcttttacactgaggttgcaggcttcccatgaccacagccctccctggtggtcctgcacctccattagcagagaggcactacccccatctccccagcagggaggccccagattcagcagggtcaggacctctgactcaacatgaagagaggggaggacagctggggcctggccggcctcacttacacatccccacagaaccaaagagttgggtccctgtggcagtactggggaggcctcttagcaccagcacacagatccaagcaagaccccataaacaagaggctggggcaagaaaagctgaagtgtacacacggtaaggagacaaccctgtttttccaggccccctgggccttcagggcagttacttgacttcttatggagaaaatcacatctagaaacacttttccacccagacttcactcccccatacacatgaagagacatggtatctgtctacgctctctctcacacacacctgccttggaggcacagatgccactttctgaggcacaggctggagaggggccagaagagcagggatttaactggcattagattagcaggaacttgagcaggactctgtccagccccaacctttgccccaactctgactgacacccccacaagacccctctaggtggatgaaaggagcagaggatccccatgggagtttgtagatccaaacggctgagaaggcagaagtttcggcctgagaggaaggaattctctcagactccaggtggtcagtctgactggctctcatagtttggaagaataactgaggaaaatagaaaggagttgttgacaagggaggagtgacaaaggtcccaccggctccctgcttccactgaagaagtcctgaatagtcttccttgttgaaaactttcaggcaacagaagcaggtcatgtactagaagtctacaagccatggatggagccaatgagaggtgtgttatccctccaggctgcaggatgggcctcaaaataagccagattgtaaaaaagaggtgggtgagaggcagtcagaacagtagtcctcagcctcatctggcctacagcttgtctgcaaagtcccaccaaaggcctccacggaccaaaacactgcatgagactatggccccaggggcagggagacgccggtgggtttgagagacagctggggcggtgttgaaggacacagtgagggatcagccagcctatggccagtgacaggggtaaaaggaggcccttcctcccaggggaaaatctggccagaggccccagtgagggaagtgggggaccaggggagaaaaggatccctctctggaacagactgtgcagatcacggtatggtcagcgccaggtcctcagggacaggactgcaggcaagtccttacccttaggagcccctttacatgtgcagccactcacaccccggtgcggtcatcccgactccggtatgcggcagcaaccgccacccacccctgccccagcacagatatgggggtgactgcctgctggaggcctgctcggactcacttctccaggaacaggggctcactgcattcgccacgatcctcagaaccccctgaacctgggcctggcaactcaggtgactgaaaccaggttttgatgccaggagctaggcttagggagggagagactccaactgcaggctaaagatgagtgctctacacctgcagtcaacccacttgccacgggcctctagtgattaacaagctacggcccagaaagccagttccaccaggagctcccttgccagccatccacacctcataacggtatgccttagccctaccgggccggggcaggcgctccgggccgctccttcctgtttcccgttaagcacatggaagctctgacctcgcctgcgaggtgggcacggtgggccggtaggaagaaaacggggcagggccctcccctctcctcccacccaagccacaggacgcgtccaggccagggcaaccccgcgggccgctgccagggtggaggctctcgcgccaatggtcaccaagctcctccactccccaacaaagggaagcccacggctcggccccgtcgcccgcagcccccgcgtccccaccttccgccctacctgttgcccgggaaagcttctccggctcagggcggcgctgccgcggacaccgcggcgccaggcccgccggccccggccgctcccttgaggcgctgcgcccgccttacccggcggccgccgccatgagcgcccgcagcgccccccgccagcgccgcctccctcctcgccccggccccgcggccttcccagcccgacccctccgcggccccgcgacaaagcggcacccggggctcccaacttttccgcagccccttcccacccccgcgcggggctcgggcgccgggcgggggccccgactcacccggcggcagcgttggcggggccggggccgctgctccgtgtactccgtctgctcgggtggttgctccgaggccccgaggcctggctccccgcgcctctcctccctcttccgcccgcccgccggcccgcgcccgccctcgccctccctcctccgccagccgccggcgccgccgccgccgcccgccgagcccagtcgagctgagcccgagcccagccgggaaaaaaaggccgcgagcagcccaagggccgggaggctgggcgtgacgggaggggagggcggggcgggcctctgcgctgcggctgccccttcgccccggcgcgggaggccagaccccaaccctccgctcccggccccacagccgcgtccacgcccgtcaccttgcgctagagaaaccgccgacctggggaggcgggtgcgggctccttccgccacttcggtctcttttcggggtgggaggtctcccactgggaccgacacagacgcactggatgccgcggggtcccgggctccgagcggcggtgtccctgtccccttactcctacccacccccacccacccccaactgctgtgcggcccccggtccccgccagggtgggcacattcccacttccagccccacggggcgcgggcggaggagggtgcagcccggggatcctgcccaagtgcctcgcgccgaagctgaaaacctctccagggcagaccgaagcagccgaccctcgagacccagtcggagcctgcgatcactcgggcgaccctcgcctaccccgccgtaaaagccgcggcctttccacctaggtgctacgggacctacccccgtggcaaggaagagcaaacccgaacttgcgcacacccggcggccctgtctgaaagagccaccccaacttttgttttgtaaaatgtatgagttttcaaatgacaccacgtttatccgtattcgatttcgtgttaaaaagtgttttccggccgggcgcggtggctcacgcctgtaatcccagcactttgggaggccgaggcgggcagatcacctgaggtcaggcgttcgagaccaccctggccaacatggttaaaccctgtctctactaaaaatacaaaaattagccgggcacggtggctcgcgcttgtaatcccagctactcgggaggctgagccacgagaatc

SEQ ID NO: 34817 - DNA, 1500 bp, Homo sapiens
accatgcccggctaatttttgtatttttgagatttcaccatgtcgctcacgctggtcgtgaactcctgagctcaaaccatccacccgccttggcctttcaaagtgctgggattacaagcatgagccaccttgcatcccaattgtctctttctacccccttggaactctcctccttcagccttctaattccaaagttccctcttcctttcttcagtgctctccccagagtccttatctgctacacacctacacaccttttttccagcatagttccagggctctttgggccgcagctcaccttcgggtctctaacactctccacacctccgtcctattcatcttccttcttttagttctgaatccctttcttgtggttttcctaagtgccaggctttcctgtagtccctaccagacttttcaaatgcttcctcaggagaactgaagactggttaacttttttttcttttttttaagatagcagtggggaggggaagttctggggcagaagttggataaccagggcctgagaaataaagataagagggtatattcctcccccaggagacaaaagagaaggtggatggagaaggggaaactgggcctcagccagcaccgggatgatgcgaccagctttgtcagcacgcttggggagcatacacaccgcttgccttggctggaccggagactgtgatcaccacccttccaacccatcccccaacacgcaggctggcatggccacgcccacagtgccccaagtgctgcctgccttgcagtgactcacttcctctgtatgggctgctgaactgtcccaaggagaggacaggccatctccaggccttcagccccgagtttagatatctgggcaggctttgtggatgggcaagcatacagggagcccaaatgtggaaggtaggttttttcaggtcaggtggaactgttaacactgaagcctatttgggtaagaagcagagcctagctagtacctaatggagattcaggggccaggagtatcggggaggaaacatttcctaacagagaggtaaaatagccaagaggagtttctatgtattctgaaatcaggcaatggaaagtatttgcagaaaagcaatgtagggaccaggcgtggtggcttatgcctgtaatcccaacactttgggaggccgaggtgggtggatcacctgcggtcaggagttcaagaccagcctgcccaacatggtgaaacctcatctctactaaaaatacaaaagttagctaggcatggtggcacatgcctgtagttccagctactttggaggctgaggcaggagaattgcttgaacctaggagggtgaggttgcagtgagccgagatcatgccactgccctccagcctggcaacagagtgagactccatctcaaaaataaataaaaggctgggtgcagtgattcatgcctataattccagcactttgggaggccgaggtgggcggataacctgaggtcaagagtttgggaccagcct

SEQ ID NO: 34818 - DNA, 1140 bp, Homo sapiens
tgcctgtaatcccagctactcaggaggttgaggcaggagaattgcttgaaccagggagtcggaggttgcaatgagccgagatcgcgccattgcactctaacctgggcaacagagtgagactctgtctcaaaaaaaagaaaagaaaaggtggtagattagatcctctctaagatttcctccaactctgcaattctaaaatgtacaacatggggaaggaaggtgatcagtacaactgtaaacaactgcaatccggccctgaagttgaacaaaacaaaacctagggagaggaatgagtttgtagcaggtttcaatgcagcgattgtgaacgcatcacacacacactcctcacaggcaaggacttcgcttctgccatgtgactgagactctgttggacttctccaaattcagagttcagcctggcatgccggccaggagccccttggagagattcggcgtgaggaaacaggaggcctcacgcttccttcggttctccctaaatctgctgggcaggtagccagaagaaactctgaagggtacagaaagccgagggccagggggaccccggctgcggagctgcagtaccgtgtttacccagcctaactgcggtcacccagtctcctgcatgtgtctgaggtcagcctcgggggctcccctgagtaggtatctacctgaggctcttcccctgatgctacctgcataccaattccacccaggaacctggcgtcctcaggaggctgcacttcccaagtgggctgagacagccccttaatatgtggggctggagccagagacctcaaggggccactagggggctcgagactctcagtggctgctgacgccctcttgtggccattttggggattggccagaaaagtttcagaagcgagccaagatcggaattcttaaggaggtaagtaataacaacagtaacagttaccatataacaatacttatcgttatatatttgataacattgtgacatttctacttaacagcgctgtgcccagaactcttctaagtgctttatatgcactgtagttatttaattctcacaacaacctataacataaacactattacttgtctgttgatgatgaggaaactgagcacagaatagttgcccaaggtcacacagaagac

SEQ ID NO: 34819 - DNA, 1649 bp, Homo sapiens
ggacaaggtggtgtttggttacatggataagttctttagtggacacattacttcatttaatcatcccaggaaacctgtcctcggaggccccagcatgtcccacagcctccgtctctctcaatcctcccatttagagagctgaaaggactagcgaagcttacagaacataggtggcagagctggatattgaaccctcattctccagttctgacacaggtgcatgttttccttttaacaggagagaaaagtgaggagcagtgattaccgccacagaaatatcctttcatggcgtgtcctccggcatggtctactcagtgtggtggagccactgcaggtccctcctccagggatgtaggaatgccagtgaaggccttcctgagttgggagagaggcagaggagtgagtggaggcagggctgtagcttctgtgccccgcccctacccaggctctccagggaggcaggaaagaggctgtgtttagacctgagggagccagctgtgaggctggagcagttgctgcatggcggggcgggggctccacagggctgttcacctgctgctctgtgcagagacagcctcaagtccagctgctggggttgcatcacctgcagctaaaacagccacagggcccaggctgccaaaaggcaacagaagcaatctaagaaaccaggcaagggagcctcccccatctccctgttgccttttgggagcatagagcttccctctgaaggtaacaccctttgcatttttctctcttgactctgttcatcaacttccactcccaaatacttgtgcccttccttctccacagatatacacaatccctgggcactctccacctaggtcagctggctctagtaaggcagcagtcaagggagtttctgggctgggaccccctctggggtgcaggctggggtgccctgctggtatgtgccccaacaggtttttccctatcagccttgaaatcagcctgcagcctgtctgacctgccccccagggagctggagccagaggcagagccaggtcagaagctggggcagagccaggtcagaagctggactttgagactaggtctctgtggtcccacctggacccacagggaaggcagtgcataaaagcctcctgtgtttgaggctgagccgctgagaggctgagtggagttcactcacatggattgaggcccagttcctgggagaagagatgctgggcaggaaggtgtctgcatgtgggactctgtacagcccggtcctctcccacgtctgggaggggccagagtcagacaactgctgggttcgtccctaagagaggtcatctgactggctgttcagcctaggctgcacacacccccactttcctctaccaggccacaccggaggcagtgctcacacaggcaagctaccaggccacaacaacgacacccacctcacctctggcacctctgagtaagtactgggcccacggccccatgccaggagggcttgttgattgcttgggggagggaaaaatgagttttccttttccaacatgagagtgcctcctttctgtccaggcatccacgtacttgcaagaactcttgctcacatcagctaagagattgcacctgctgacctagagattccggcctgtgctcctgtgctgctgagcaggtag

SEQ ID NO: 34820 - DNA, 487 bp, Homo sapiens
atgtctctctctctctctctctctctcacacacacacacacacacacacacacacaaataaagagagagaagcaatgattaaccatcttaatctggagctccaaggcagattccaaagtgacagtcccaaaggtactcatgtcaccttcccagccccttgccatccctgccatcacaccacattccaagctgaacccagccatgctgcagcctgaggaaaaggtgggaatctgccctctgagtcatgggtgtcacctttcatgtccctgatggctggccttgcttggctacaagtgtctcacccactaatttgtggctttttcccatcctcatcttaccaccccttccccccacccctacctctttttcttgctttccccaattttcctttgatgtctaatcttggcctatgttcttcttttgagacaaggtcttgccctgtagcctaggctgtgcagtgatgtcatcatggctcactgcagccttg

SEQ ID NO: 34821 - DNA, 1645 bp, Homo sapiens
acaggatgaaatttcaagcaactctaaaggctgaaagagcaattggaacaattagggtggcagagagcaaaaagccaaggttacaaccgtccaagaaaggaagaagatatttgccgaggctgtagaaaaaaacaggctacagagttgcaaagggagaagcagcaggagttggcaggagactgtaggtgttaacaagaggggtcaaagattattctaatgttctcctaacatgaacaaccacaaaattggtggcgactgagtcagtttggtaaagggcagaatttgtagaaagaagatgatctgttttgccaagtgtcatttaaaatgtcaccagatgctcggtgtgatatatgtaaagatgttatacttggcctgatctgagagggaaagttcagatgccacaataatgggttactgtgacacatacacatttgtttaccgaacgactgatccctcagaaaacaatccttccctcggttgctagggacattgcggagttgcgggactacgtttcccacgtcgccccacgccacgcccccttggcctcgccggaaagacgtcccaggagcctctgggcgtagagccccgcctccgccgctgggggcggggcgacgccggactccggagcgcccgcttacgcagttcctcccggggtcggaggccgattcgccgtgtggcgggttcgagtcccgcctcctgactctggcctctagtccctgagtcccgggcgggctgcattcgtcggggaaacctctcctcgaccaggggcacctctactcgaccaggggcgacggcgtactttgggcttcatcatggaggactacctgcagggttgtcgagctgctctgcaggtaacgaatccctgtctgtgactgtaaggaatggagcacggggtccaggaaggacgaagacgtgggatctgggggagcctcgacggtccgtgtggagggaacactgagttgtggggaggggggttggggcctgatcagttttggggcatgaggagcgaggagcgagaagccagtttaggagcgtgagaatgctgcttgttcagtctcccggtttttggctccccgcctttggggtccgcctgagagcggggagaagtcttgggtctgaatcctgcatttgagcctctgcttgctgtcatcttggtcagttccatcaaaaaaaccaggactgtgccgccgccagcctagccccgcgaggtgtgtttattcttttctccccgcccctctttgagttctccgctcccaaggcttcgcttggcccactggcctccaggtgaacctcgggggtgtggagggaaccggtgctcacggccttatttcctccgaatggcagtttctgtctggcgggctgaactcatttctaggttagaagtagtcacagtattttactttaagtcagtgtttttaagccaaacatacaaaatccatcaggcatatttgttgacccacaaccagcattcctttgcctccaggtttctcctttggccttaacgcacacaaatgacataaaaattctccacttggaagggataagcacaaagtgtgtttggaatcaaaaccataaatatgactactcaatgctttgtggcttatttttggtgctctctgactcagttggactcacccagccatgc

SEQ ID NO: 34822 - DNA, 1069 bp, Homo sapiens
ctcatttaatcctcctaacaacatcatgaaattggttacgatattattctcattttttttgtttgtttttttgagatggagtctcacactgtcacccaggctggagtgcaatggtgggatctcggctcactgcaacctccgcctcccgggttcaagcaattctccctgcctcagcctctggagtagctgagattacaggcacctgccaccacacccggctaatttttgtgctttttagtttcaccatgcttgccaggctggtctcgaacccctgacctgaggtgattcgcccaccttggcctcccaaagtgctgggatcataggtgtgagccaccgcgctcggcctattctcatttttatatgaggaaaatgaggcttagagggtccaaagtcctgcaacaagtaagaagcagagctggaattcaaccccaaagtctgtgatcttttcaaatagtagttctgcattcaaacagagaacaaatagtgcaaagggcagagctgggaatgtgcacatcatggtttgcgggtggtgaatagtccagtcaggccggggtgacagtgggtgttgacaggggagaggaatgctgctgcctcccttggtcactccagttccaagatttgctacaagtcccaaagtattccttttgtattcattccttttggttactgtctaggtttggctgagcgcaaggggttcattgttcaccttcctctgtagatggtttctcctgacttcagaaccataccactgtatttggtccctactttgtgcttttctgcttagcattctcttcatggtaaggatctaactgaacctgattcagctgctgcttgcagtgaagcaacactgatgtaaataagcgtggaaaggttctccagcatctctttggaccctgcagtaggtctctcctgcttgctctgccttttctccactgctcttatgtttttcctccagtcagggccatatgcctcatgtttatatagtttcctctctagagaacactcgctccccctaactgcttcagtgagcaagttatttctgcagcctcttatctcaagtgctttgctg

SEQ ID NO: 34823 - DNA, 1668 bp, Homo sapiens
gggaaggagtgctttcaaaacctgtatttttgccctctttagtaaatttagaactgtagaggctaataaactgcgatgagacatttaagctctgctccaaagaagtgaacgactctttcaccaccccttgcatcccaaaccttcggttctggcagagttcttgccgcagaggttccttaggagcaccccgcgcggcccgcgcgagcgcgcctgcgcgtcgaaccccacccccttccccgcgggcctcggttcaaacgacccggtgggtctacagcggaagggagggagcgaaggtaggaggcagggcttgcctcactggccaccctcccaaccccaagagcccagccccatggtccccgccgccggcgcgctgctgtgggtcctgctgctgaatctgggtccccgggcggcgggggcccaaggcctgacccagactccgaccgaaatgcagcgggtcagtttacgctttgggggccccatgacccgcagctaccggagcaccgcccggactggtcttccccggaagacaaggataatcctagaggacgagaatgatgccatggccgacgccgaccgcctggctggaccagcggctgccgagctcttggccgccacggtgtccaccggctttagccggtcgtccgccattaacgaggaggatgggtcttcagaagagggggttgtgattaatgccggaaaggatagcaccagcagagagcttcccagtgcgactcccaatacagcggggagttccagcacgaggtttatagccaatagtcaggagcctgaaatcaggctgacttcaagcctgccgcgctcccccgggaggtctactgaggacctgccaggctcgcaggccaccctgagccagtggtccacacctgggtctaccccgagccggtggccgtcaccctcacccacagccatgccatctcctgaggatctgcggctggtgctgatgccctggggcccgtggcactgccactgcaagtcgggcaccatgagccggagccggtctgggaagctgcacggcctttccgggcgccttcgagttggggcgctgagccagctccgcacggagcacaagccttgcacctatcaacaatgtccctgcaaccgacttcgggaagagtgccccctggacacaagtctctgtactgacaccaactgtgcctctcagagcaccaccagtaccaggaccaccactacccccttccccaccatccacctcagaagcagtcccagcctgccacccgccagcccctgcccagccctggctttttggaaacgggtcaggattggcctggaggatatttggaatagcctctcttcagtgttcacagagatgcaaccagtaagtgtttggtgatgagccagggtctttgttgacggatctgaaaagtcctggtatctaaaacccagttgctaagccagccagtgttgcttacatgaactgttactgacttacctggttattgattcataacatgcattggttattcacattgttagccattgattccacctattatttattgagcaactactggttggtcattaggtaaaatgtcttactgctcattaggtgattattgaccaaatagttaagattggaaatatttttttttttcaagacaagagtttcactcttattgccgaggctggagt

SEQ ID NO: 34824 - DNA, 2624 bp, Homo sapiens
ggatgggaacaaagccagaaaaggaagtaagagccactggcggccactcttctttaaagcagccagaagagagtgggttgaggaaaaatgaagtcctgagctggtcagcccaggcggaagagccacccgaatccaaccccacagtgaatagggaaggggctgagaaaacaacaggagggatgaggattagacctcataaggccacgtcctgagagccaagtggtgctcagaactcgacctctctgagttccaaatggcaagagtgaaatatggaaccgggaaagccaccccccgcccccaccaagatcatactaggacttgagggtctcagagctgttgggaggtgagcagaagggatgggaaagaggtgccagggaggaaggatgtacaggctagttctctggtcctgttcgggccccaaaccggttctcccggtcccaccgcctctggccctaaggcctccaacccgcggcctgacaagccctcacatgaagcagctggagagaaagaaagaatcgagagaatggcatgggcaattctggctagaagcccggggcagcagctggtccctgtgtggagaccccgagacatggagggctgctgagggactctggagaagcggtgtggactccatatttcagccaagtgacaggcccaacaccaaccttcccttccccaggaaaggtcttctgggggcttaagaggaaagagggctaggccctaagcctcccctccccaaatatattcaatcacacagattccgtatctgtctccccccactacacaactctacctagaagttctctgctgttctcaacccttaaccggactgggacctctctgggaatctttcggaccctctccctcccacctcccccaacattccagttccttcttttccttctactcttcagcggcctcagcctgcgcaccccaggagcgtggatgactacggccaccccgggcgcgcacccctttcccaccaccccagcatctctgcagcccaggacacccgcctcccccacaccccgcatccggtgtgtctccgcctggcccggccggcgcggcaggcgggccaggggaccaactgcacggcctcacctgctcttctccaccatccagacgttcagctacagctggtgggggtgagggactctgctccgtggccgccagtgtgggcttcccgggctagctctgcggcgaggtgggggagccgagtacgagccggcagaggtggggccggctgagggcggaagcggcggcgacgcgattacgaaacccgtccggctcggagcccggcgcactgctcccctctggactgcggaggcactgcactgcgcgggacgtgggagggtgcctctgcagcccctcaaggccgccgcccctgcggggagaactggagaatgcggacacctagatgaggccctggcacccaagctggggcccccggaatctcacgttccctttactcgccaggcatttcggggcaaaacgaagcggagccccccaaacccccagacctaaccaagttcagagattcgcagaagcacgccccccaccccaaatttattgtgctctacccaaaatggaataggactaggtttatttacccattgtgagggtagagaggcgagtctggaggagcagggattgggagaaggggtggaaaaatactctgattcttaaaaatactttgtaacctaaagtccttaaattgtggaagaaaggaatactcctcctttccattgtagtctagagttaagatttcaaatccataaattagaggacctaaaattagagggcaattaactgctcattcattgggcccccagtcagcacgggggtgctggaagagatcgggaataatagcgcagaccaatgagcctagggagatgctttcatcgtctctccttccctcaagtgttctggaacctatcatttgaattagccgagtcaggcaggagggggcggggaatccttccgcccttcttaggaggggctgcattgcagggggagagtgaactgacagactcagtcactgaagagggaaaaggagtgagaagacaaagccgtcaaagccccaacagctttgtatttctccagcccggcgcagaccccggagctcccgaggcactccctccatctttggaacacgccagtaattgattgataacaggtaaaccaaactgagggagggggcagggggctgcaaagatagaagagcggctgcttatggttagattgaaagaccccacatgaggtgggggacagctgaagaggagagaagggggcgctatgaacaatgggtagttatttcttcacagcatccatgccttgttaccttatacagaccattaatctctaacaatttacttgtagttatttctcagcacctacctcatttcaagtatccttttctgtaatttattgtcctgtgtatttaatatcttcagtctacttatcttccttttcaaaccataatttgttttaccagctgtttaatttttagtcctactgtatctctctgtcctctacttccctatacttgcaatttttttctgtagtgttctatgtttctctgtaggagggagtttgggagggggttatatgggataatgttgggt

SEQ ID NO: 34825 - DNA, 1023 bp, Homo sapiens
gagattacaggcgtgtgccaccgcgcctggccccatgattctattttttaaagagcctataatgtggcctgcattatactaagctcattctggagaagacttgtcaggtaggatagagaaaagaacccagctagctgtgaaaataactggtaacagtaagaatccctgtagccacaagtccataacagtattgactcctaggtatgcttcttagaatctctatagtcccagatttaagcagtgggtggttggttaatggatacaaccattttttgtagctctctttctgcacacgtctctgcaaagtactatggagattatcagagttgagtatcataggatgatgacctcacctttccaacatgctccccgaccctgctgcaatcccggcatcaccctccttctaagcagcttctctgctgagtaatgctcagttcccagggtttattttggaacttaaactaagaaaaagaacaactcagaattcactttcaacattaaaaacatcctagcctacccactcaccattcctgaagcccccacactctcacacatcactgtgttctagattaacactttctttttctgccttagtacagtcatttcacattatactggagcattttggaacctatttaaggccattatttaggagtctctggcctggtgagacccaatagggtgtgttggagaaaggccttttgaaacttggggttctgtttttggaggtgatagaatgttctttctgctcctttgggaacatttcaactaatgcttctttttttaatttttatttatttattattattattattgagacggagtcttgctctttcgcccaggctggagtgcagtggcgctatctcagctcaccgcaagctccgcctcccaggttcgcgccattctcctgcctcagcctcccaagtagctgggactacaggcgcccaccaccgcgcccggcttaatatttgtacttttagtagagacggggtttcaccgtgttagccaggatggtctcgatct

SEQ ID NO: 34826 - DNA, 1929 bp, Homo sapiens
aaaaggccgcgcgcggtgggtcacgcctgtaatcccagcactttgggaggccgaggcgggtggatcacgatgtcaggagatcgagaccatcctagctaacacggtgaaaccccgtctccactaaaaatacaaaaaaatctccgggcgtggtggcgggcgcctgcagtcccagctactccggaggctgaggcaggagaatggcgtgagcccgggagacggagcatgcagcgagccgagatcgagccactgcactccagcctgggcgacagagcgagactccgtctcaaaaaaaaaaaagaaagaaagaaaagaaatgactcagttatttgtttcactgttctcactgacagcttggctctggggtccttacattcggcctgtaactggaaaaatgtgtccatcaggcaccagaacccaatgcacaaagccaggaacgtcccaaacagctgcagccgaggttgggataaggaaacgaggctttcctgtcaaactaaacctggccgccccggaccccgaagaagcagccaagagttaagacgcaatctgcatgactgacgcacgctccgagtctccctcagcagttcgccaggttcttggcgccaacaccagacctaggatccgtcccctgctggaactattcagacgcgcaagatacgtaaccagcagtcctccgccccgttaaatagtcctgcctagcatgcctcggtgacgcacttttccacctcagaagtgcctcagcagaaaggcgatgaacctcgggggtgcatcatctttctgttagaatgggagcatgagttttctgatcattttcccttcacagattcctccgccagaaatcttactcgcggcgccttcatttccgggtccgccattttgttgcctctgtttctccacgagggggggttaaaggcccccaaaacatgcacacatgaaaagggcaaaaagtaaccgtccttgacagggagtcttaactagagaaggaaacgggactaaactggcgggctccgtggaagcgtggccggcagcgtcccggacgaggaggtgaggaggaaagaagagatgtgtggactccggggggcgtcagggctggaaaggaaagtgccgtgagaagtcacaccgcttcccagcccagcctcggacttctgggtgcagacctcgcggctccccgtcactgaagcgggggcagcggcgggagggggacggggaggaaggggatgctgtcgggaggaaggggaggggactggaaggaggtgaagaagggggtgggtgtaagacctggggctggggagctggaccaagggaagcccaggccgcggaggtgaccactagggggcggcgcggagccggggccgaggcctgtcgccgaggctgagtttggccccctgccccaaattggttcccatctttcagacagacattggtgtgaggaactgtagggtttatgatagagagggaaacggcgactctcattatctgacccaaataatgacctgaaagattactagtgaactcggtaatctgaatgagagcagtacgggccccgcctctgcttttttgctcttttttttttttttttcaaaactgagtcttgctctgtcacccaggctggagtgcagtggcgcgatttcggctcactgcaacctgcagctcactgcaacctccgcttcccgggttcaagcgattctcctgcctcagcctcccgagtagctgggattacaggcgtgcgccaccatgcatggctaatttttgtatatttttaatagagacggggtttcaccatgttagccaggctggtctcgaactcctgaccttaggggatccccccgccttggccttccaaagtgctgggattgcaggcgtgagccacggctcccggcctcgcctctgcttctttcacagttgtttgtacagctggccgcccagtgggga

SEQ ID NO: 34827 - DNA, 2297 bp, Homo sapiens
gaccttagccaaactggttaaccaatccaagtctcagtttcttcatctgccaaaagggaacgataaatgtatacttgatacagatgtgagggtgaaatgagctaacgtatgtgaagccctcagcacagtgtctggcataataaaataggagctgttcctctccgttggaatagtagggcaggacttgtgcaacactgtgatgggaaaacaaagataaaggcagaacagagtgcaacacattaggaacatttcaggggaggttacctagaagggccactacattcttctcaggactaaatccctcctgactgttgtcttcaccccaatcctggaaaactcaccgtcaccccatatttgagtgctagtccagccagggtgtctccgggctccaactgatgctccaggcgtctttccctcactggggagcaggccgattgcaccaggcttccatatgaacgagcccggctcccttgaagcagtcctgacccccctggcgggggctgtctagacggggaagccatctcttcaccctgccaacagctaaggttgcaactaggggaggtacgaccgagactgcgactgacaggcctgaagtctgggaatgaatattcaggggattcctttccccctctctcttcccctgtgtccccgcctccccagcactacgccatctgccccctcccggtttctcctccctccaagctacttatccacaaatctgtcccttgagtattcagtccctccctaattctcccctaagcacccctccgactttggactcccccacaactcctcgctacattgacctctgacctttgaactctagaaataatcctcaacactctttcctcagtttgcccccaagtagcctggcctcagggcgctccaacatcccagctctccccggtcccggggtttgtttgctagagtcaggaacaaatcaggcccaccccaggtgaactgtcgccgcagacgaagagcgtgaggattgcaagaatttgtagtacaccttccactcagagatcctcaaaggtccgctccgcataagataggtcacaccctcaaatttcggctccacatctaggttgttgtccctccaaacgcctcagatccgccaagatgcaagggcctggatccagttgagcggcaaggtctttgagaaaagacttcatttcccaaaaggctccgcgtctgcggagtcgcagggcaccataggaaatgcagttccctccgagcaccagagagtggatttccggatcgcgcaatgcatgcgtggaagtgcgtccccggaagtacggaggccgacaggaagagaaggaaaaaagagaaggcgctgtcccgctcttgctacggtggcctggaggagtggcgaaaccggaacagagaatttatcacttctgggactcacagtcgtgatgtctttcaagagggaaggagacgattggagtcaactcaatgtgctcaaagtaagcgtgagcggagaggatctggagccgcttcagtcgctccctgaaggttgggaaggagctttgtttcattgctctggcaacaactcgggggtgcaggagagaaccaggcgacttagagctgtgtagtgactcctttttcggtctatgatcgctgttctccccagggtccttattccatttcactcctcatttctataatttcacttccacccctctctcctatcccgctgatcccgtccggatttcttcccctactccctgcagaaaagaagagtcggggacctcctagccagttacattccagaggatgaggcgctgatgcttcgggatggacggtaagagcaaggagtggctcaagcctgagggttctgcggttagaggctcaatagacttttttttttttttcctttgagacggaggtctcgcggtgctgcccaggctgccctcgaactctagggctcaagtgatcctgcctcctcagcgtcgcgattagctgggtttacaagcgcatgccaccacgcctggcttcaacaaacttttgttattaattaggacagcaggagtacctaggattctttggcggccagtgaggactggaagaagtggagattgggtcaccagggagttgggttttgcaaagactgctaggacagggtgggacctatggcagggacgggcccaaccctcttcccctggaccacttatcctcttctctacccctgctcagctttgcttgtgccatctgcccccatcgaccggtactggacaccctggccatgctgactgcccaccgtgcaggcaagaaacatctgtccagtaagttagggg

SEQ ID NO: 34828 - DNA, 1847 bp, Homo sapiens
tttttgtattttaatagagacagggggttttaccatgttggccaggatggtctcgatttcctgaccttgtgatccacccgcctcggccttccaaagtgctgggattacaggcgtgagccactgtgcccggccaaagccactgtgctcggcctatcacacagtattttaactgttaacccaggcagttaccccactggggcatggagtatgtaaggacagagcactgtttttaatattctgtttccctagagcctaaaacaacctattaccgatggcatgctctgggtactcaacacatttaataaacgggtagattcaactaataaaaatttagcaagtggcagcccagtccggacacctcacacataatgttgaacaaaacagaccatctctaactttatacagtttacaatgcaatagaaaagcataagcaagtaagcaaaccaaatctaattgcaaattgaaatatgttctgtggaagaaataaatggggacacttgttaggatagtcaaggaagggttatcttcctgagaaaacatttacactgagacctgaaagctgaaaaagaagtgggctaagctcctctacttttggagcggttcctttccatgtctcaggtgaataatccagcagtgggccaacgagtatacatcgagcaactgtctactactatgtgtgtgcctcgtgtatgctggacgtcagaagtacagtgaaagatgcaaccacgcaagtatacggtaggtttctgccgttctctgttctctggagtgcctccggagagcttctccgtctcaggcccctttgaccccatccagagctctcccttctaggactccacactatccgttcccccgcctcgccccccggctccgattcacccacccaactcgagtatcagctcccagagctcctctctattccccgccctcttcttctttgtccggggtttctcccttcagggctcctctttgcctcctcccctcccttttcccaggcccggatcttgcctctgtgaaacccccataagtcgtctggtagaactcatcttcctcctctgcctccaaaagcccagaaagccggttcccagcggtcttccggggtgcccggcccccagccaaactcataccgcctaccgagactgcgccgccacctgcagcccctcaccagctcggttttgggagctcgacgctcgacatcactacctgcgggtggccaccagcggcggaagtcgggcgtttacaggcagaagtaacagagtgtcgagagactcccagtcccaccctctaaaccctctttactcttcagcctctcctactcctgcgcggatgctctaggccgcttgctctagtacccagcgatctcccttgctcaatgagtccacttggtggtacgaagacccccataaccctaagtcaacacattttattttatttatttttattttatatatatatatggttttttttttccgtagggacggagtctcgcctcgctctgtcgccagactggagtgcagtggcacgatctcggctcactgcaacctccgtcccccgggctgaagcgattctcctgcctcagtcccccgagtagctgggattacaggcgcccgccaccatgcccaactaatttttgtatttttagtagagacagctttcaccgtgttggccaggctggtctcgaactcctgacctcaggtgatccgcccgcttcggcctcccaaagtgctgggattacaggcataagcctgcgcccccagctcacattttcttttagaagaggtcattctctccgctccagtccattttctacactgctgctagtaggaaactttctaaaaacccacgtt

SEQ ID NO: 34829 - DNA, 1657 bp, Homo sapiens
agttgcagcgagccaagatcgcgccactgcactctagcctgggcgacagagggagactctgtctcaaaaaaaaaacaataataaaataaataaataaataaaataaagaaactgttctaagatatgaatgacactttaataaaggtgtgggtgtgtactcacatgtactgaagtctgtacctgtggccctactttgaggtcatcagattgtaccccctttcccaaagtatgtattggtgaactcccttttctgtttccttggggcactaagccaacatgtcctgctctgcccctgtttccacaccctgccacgtcaccacagttctactatgccaggaatgttaccggggaggagtggttccatgactcagaggacaccccaggtactgagtgggagtgggggcgccccagggactgagtgggagttggtgaaattaaaaataaaaatagtacttgatgaaaataaaaattaaaaatataaaaaattagctgggcgtggtggtgcatgcctgtagtcccagctactcgggaggctgaggcaggagaatcgcttgaacccgggaggtggaggttgcagtaagccaagcgccactgcactccagcctgggtgacagagccagactctgtctcaaaaataaaataaaatggaattcacagattagctcacagggagaagattcctctgtttgactgcgttggtcattctgggatttattagtctgtttccaattttaaaatcagaaacagctttacatcaacaccagccgattttttttttttttttttttttttttttgagacggagtctcgctctgtcgcccaggctgcagtgcagtggcacgatctcggctcagtgcaagctccgcctcccaggttcatgccattctcctgcctcagcctcccgagtagctggggctactacaggcgccggccaactcacccggctaattttttgtatttttagtaaagacggggtttcactgtgttagccaggatggtctcgatctcctgacctcgtgatccgcccgcctcggcctcccaaagtgctgggattacaggcgtgagccaccgcgtccggctacactatccgatttctaaagtaactcaggaaatggtagcaatcctatgccttttcggaaaacaaggataatttattcaacaaatatttatttattgaatacctatgagccaaatcctgtgctcagtgtgcccctcactagttcctgtcctgtttagttgagtggagggtataggtacagggaattataaaatacttcaacacaacaaaattccactgctgtggaattacaaacaagattttgtctactttcggtgcccaaaggaagacgaataatccagcaggtggcagcagggaaacaattatcttagatcttcataagggaggagtagaaggctgcagtaaatgcatggggatttttttttttttttttttttgagttggagtttcgctcttgttgcccaggctggagtgcaaaggcgccatctcggctcaccgaaacgtctgcctcccaggttcaatcaattctcctgcctcagcctccggcgtagcgagtagctgggattacaggaatgctccactacgcctgggtaattttgtatttttagtagagacggcgtttctccatgttggtcaggc

SEQ ID NO: 34830 - DNA, 3300 bp, Homo sapiens
ctagagtgcagtggcgcgatctccgctcactgcaagctccgcctcccaggttcatgccattctcctgccccaggctcccgagtagcctgggactacaggcgcccgccaccacgcccggctaattttttgtatttttagtagagacggggtttcaccgtgttagccaggatggtctcgatctcctggcctcgtgatccacccgcctcggcctcccagagtgctgggattacaggcgtgagccaccgcgcccggccacaaaacctgttttaatggagttatttcatgggccatgagtttgagaggatctatctgaccgactcttaccccgaatgttttaccattcctctttatttattcattccacagataattatggagcccctactatgtacgaagtcactggaggagctggagatacaagagtgaaccaaacacagtccttgctccccagaagttttacagtctgctcagagagactggtcttcccaccagggttcatagcctacggggtactttgttaaaaacgagcagttactacgaagactacaatgggagaaatttttctgtgtatctccatgccctttggagcacagataattgacagttggaggctaaaggggttgggtcgcgggaaggttgtgataagtccctgatagcctcccgtgcccttttttgacaggtcttcactgattcatgcatcaaatatttactgaactccgtcactgtgcagtgcctaactttgtgcttgaggcaaacaaaacacagatctatttcgaatgccattccgaggaaggtaagacatgcacgcacgtttaatcaaatagtaaacaagagtagtaaaacaggaaaaagactaagaagagttcttggtggtattaaatgttttgtgatattcgacaccttaacgtctctgacttgacaccagtactcccgcagagagttctttcctgggttaggaatttcagaggacttggcggaccgactcttgtcccgagttcagatcactcgacccagtcctagcaaagaactgaacctaagaggacctgccgagccaccgtagggactgtcggccaacccgcgcgcgcacatcttccacccgtggactcgtcagggcgtgaggacccacctcacgtgaccattagcagcctcccgattggttttgctccttttttctccccaatgagtgggctgatgccccgagaaggtcgggcgcatgcgcagtgctcggattttttgcttggctacccggagtgaagcggccgggttgggcgattaacaggccgtggttaggaaggacggagaaggggcgttcgctcctttgggacttttcatgcctcgtttttttttcagatgtggcttggtctgggcgcaaggtcccagcagccagcttaagcttactcttctgtgaaaggggaaagtatcccctgtggaaagcggttaaacttgtggagggggtgcgggacgtgagttcttccccatgccaggcgaatggtgtggccttgagctggtccaggagccggctcgacgtgtctgagggaggccccggagggggcggggaggtggcccacagaacgcgggttctgtaaagagacgttgggaagattcgattccgagaagaggaagaaccggattgaaagagagccaggccgctgagggggagggggctgctaagatggcgtcggcctcctccgggccgtcgtcttcggtcggtttttcatcctttgatcccgcggtcccttcctgtaccttgtcctcaggtaagcccggcagggcgtgggtagggagctggtgaggaatatgcgatgggaggaagagcgagacctaagagggtacctgtagctgggaatgtcctacgtgttaccggtaagtgggcgcgagctgggctttcaaatagggatttatgagcgggcaggagtttgaggaaaggataagtttgattaagaagttgtcgaaaactttggttgtctttgaggaggacggatggagattgaaggtgggggtagggtggcccggcgcggtggctcacgcctgtaatctcagcactttgggaggccttggcgggcggatcatttgaggtcagaagttcgagacgagcctggccaacatagagaaatctcgtccctactaaaaatacaaaaattatccggacagtagtggcgtgcatctgtaatcccagctacttgggaggctgaggcaggataatcccttgagcctgggaggcagagcttgcggtgagccgagattgggccactgctctccagtctgggcgagagagtgagaccctgtctcaaaaaaaaaaaaaaagaagttgcggtaggaaacaagagaaacggaagggagtagagaaactaagaaagtaaatggaggcctaagaagtagagagaactacttagtgtgagaggcaggtggaatctaagttgattgtgggctaattggatgaaaatgttgaagagaagccatgggacttaaaagatatcgaaaagttattggacgctttcgatttctggagaggtagggaatcgtgaattttgttgggtgggcgggagttgttgaagccatcttttccctcagatactcccccctaatgtgtcaccccttctcacttcgcacccccacccttagggccgcacaggcacacagacacacatacatactttctcagactaattcctttggtgattcccaactctaaactgcccaactttgggaaggaatggaaattttgaagagagtctaaggaatgtaggaaattaaggtcaaagaccttaaaaacagatgggaaagatggaatggagtcttgaattgcagtagagactgcgagaagtgatgttttggaaattaggcctgagaagaagaaagatgggtgggggggtgactgtaagtgttgtgggggagtattgcataatagaaaaatggactggaagaatgcttacgctgtatcaggagattggaatttggagaatggagccaggttaatgtagagagctcagcgtattaatagttaaaaacgaatgaagattgagggagggctgaggaggctcacaagaaaagcagtagattgtgtgtaggggagaaagtgtgtgtatgtgtgtcgggtgggggggcgggaggtgagtcagaaactgagcgcttccatcagaagtgtctggtgtttcacagtaactgctgcttctacactggaatagacgctgccagatgttggatgctttgcttgagattttggtatttcctcaggcctggtgttgcgtttttgctgtttagaatttgctgaatagggttccttccacctttcacattcca

SEQ ID NO: 34831 - DNA, 1721 bp, Homo sapiens
ccccaggctggagtgcagtggcgcgatctcggctcactgcaatctctgcctcccgggttcaagtaattctcctgcctcagcctcccgagtagcggggattacaggcgtgcgccaccatgcccggctaattttttgtatttttagtagagacagggtttcaccatgctggccaggctggtctcgaactcctgacctcgtgatccgcccgccttggcctcccaaagtgctgggctaacaggcgtgagccaccgcgctcggccgatcccgacacttttttaaaatgccgaagccggaatcgacacagcactttcaaaggttcctccatagctcccctgagatccggccagcgggaaaccccaactgagaactgcaatggcagggaaagtggaggctagatcctgttttttgtgttaccgcgattcccttcaactaccctcaagacgcctacaaatttgtttggcggcacctacaactcccagaacgcaacgtgggggacggaggcggaagcagctggccaagccgaggtctgtgattggtgaagagcgacgggccaattggaggagttgttgttaggccgtcccggagacccggtcgggagggaggaaggtggcaagatggtgttggaaagcactatggtgtggtgaggagctacttcggggcaggaggggcagagctgggttccgggcgcgtgtagcgccaaggcagggagggcctggggtgggggccaggggctcatgggcgagaggcggccctggccccggaggtaaggagcccgctggactccctgagtcatcccggggccctggagtggcggatagtcccgggttaccactgttacccccagggggacggtcattgactggtcattcctgcttcctttctctgttctagcgccgtcttctctagagcagcccgggtctgtctttagctacagttctgcttttcggactcatcgtaatagttttctgccctcctttctttgcaaaataacgtctattaggaaaatagattattaatcccttcctctccccattccctcgtctctaacttcattacctttccctgtatcatcttcaaaggtaccatttacagattgctttttatgtatcagtcattttgtttatctcacttatacctcacaaccacaccttaaggtaaattatctctccattttacggttcaggataccgagtctcagcgattttaagtgatttgtccaaaatcatacagctagttaagtggtggagtcaagatttaaacccacggctgtctgacacaaaggctttatccggtgaggtagctctctttgtcagtttcaggcttgggctgagtacctattacgagtcacattagaagaggaggacataaatttttgcagggtttcaagagttccttctaagtgtaatcactgaatgtaatacagaatagttgacgaacacaaatcaccgattgggtgaaacaggcacctatgagatttcttctttttattttctcgggggagcatagcattgccagataacatacaggatgcccagtgaaatttgagtttcagataaacgatgaataatttttttttgagacggtctcgctctgtctcccggactggagtgcagtggcccagtctggctcactgcagcctccgcctccctggttcaagtgattcccagtgattgaactaatttacacttgcaccaacgatagaacagtgttctcttttctcg

SEQ ID NO: 34832 - DNA, 2218 bp, Homo sapiens
ctttacaagctggctctgaagcaccgacaaggcaagaatcacaagatgcgcatcattgcctttgtgggaagcccagtggaggacaatgagaaggatgtgagtccaagtggcagctggggaatgtggggagcccatgtttgggactgaggtcttccagccctcaggagaacctggcagaggcatcaggctcatcactttggggaaaggtgaatgtggagaattcagtgattctgttggaggaccttggggaggtcaatagatttctgtatgcttttatgcggcgggtcctttccccccctcgagtatggaacagatttcttgatttttctccccttcttcccagctggtgaaactggctaaacgcctcaagaaggagaaagtaaatgttgacattatcaattttggggaagaggtgagtagggactgattggagggcattgacttaatttggtcataaacagaatggtccttaaccctgaggagtgcgggtactgtggcagagtagtgcagaaatgggaaagaacagggagcaaggcctgaagaagggcatcatgtgttctttcctccccaggaggtgaacacagaaaagctgacagcctttgtaaacacgttgaatggcaaagatggaaccggttctcatctggtgacagtgcctcctgggcccagtttggctgatgctctcatcagttctccgattttggctggtgaaggtggtgccatgctgggtcttggtgccagtgactttgaatttggagtagatcccagtgctgatcctgagctggccttggtgagcaaatgttgaccccaggtagagtccaaaggtccctctttgttctcttctggcacacacatcacagagcttctatcaggctggatagtcctagacactaccaatcactcattttccaagacctccttttgccgcctcttccctataatgctgtctgatctctaggggcaccagtgtcagatgctttcttgttcacttctgatgaaaaccgaggcttctcccaagtccttactttttaatcccgtaccactgcttatccctccagcttcttctctgtgtgataaaccagaagctgcccctttatgttcctttcccacaccccaactgactttcccagctccctgtaggagtgagggcaggggagccctgattatgccctgcccttcaccaggcccttcgtgtatctatggaagagcagcggcagcggcaggaggaggaggcccggcgggcagctgcagcttctgctgctgaggccgggattgctacgactgggactgaaggtgaaagaggtggaatccgaagtcctgggactgcgggatgctaaacattgaaagctgggtgtaggcactgcagggagagtgtggaggtctgacagggtaggaatatgtgggagggctgggctaggaatggccttggaggctggcctgtgtggatatggcaccaattctaccctgctcctcttttccttttcccagactcagacgatgccctgctgaagatgaccatcagccagcaagagtttggccgcactgggcttcctgacctaagcagtatgactgaggaagagcagattgcttatgccatgcagatgtccctgcagggagcaggtgagccagagcctgggtggtgcctaggcagaggttggggtgaggaagtgtaactgaacagactgacctctcttcctcagagtttggccaggcggaatcagcagacattgatgccagctcagctatggacacatctgagccagccaaggtgagacccaaccctgcccccatcaggtttaaagtccttgaatttagatcctcatccctctggggctgggagtatttctaccatagctaagtcctttgaggagcagagggaaacacatggatttgcatttcttacatgtaaaccttgctaaggtagcaatgctaatggtcagagttggagaaatgtcctcttgttctgtaattttcctttcttgctggtgggagcagcctgggcagttctctaggatgtcttcccaggagggaaaaaagcgggtctgggaaaaagaaaaaggagaactgggtgtcttgagagcaggaaacctcaatgtgatggcatctgtttttctcctcagagctcaattaacagagttctcagcaggcccctctatttggttagtaataactgcattcatgctgtataaaggattttgctgacttgtcctttccttacgtc

SEQ ID NO: 34833 - DNA, 819 bp, Homo sapiens
gcctctatgagatgacacatttgacacaggaaagagagcacgctcatggagatagatctgttgttgattgctgatctctctggagtcctttggtattccctgtttcttgttctttaggggcgaggggaggacgcagaccaaggtaggacagtaccaagagactgggagtgcctgtaagaaacagatgggcatctgagtccttggctggatgtttcctgggtggcagaactcctgacccagtgttgtcaaagaccacaagcaagtcactgagagagagttctggaagagcctgacatgaatttactggtatttgggagatataaatgaacatagagaccaatgtctgctgaatgggacatgtgggaggttggctggagcccagacctggaatggtggcactagtgggtagactttatttcagcacctggcatgctaagaatgtgggagtttcccacggaccaagaggaaagcatggaaagtacccaagcttgagccatccagatagagcctgcccaaaaggagttcctgaagggcaagaagagcccaatggtaagatgccatggggcaaaagtgcagggcactgtgcaagaggtcacctggagagtgcactgcagatgccagagaaaagggcagtggagaggtcctgtaagtctcccagggaccttcaaatatgctccacccaagagaaagcgagcatttaggaacctgtcacacagagggctctgacagcccctgtcatgtaaaacttgactcctttccttcctcgcaccatcccaactctggagaagccagaggcaggaagggaagggagggtgaaag

SEQ ID NO: 34834 - DNA, 2686 bp, Homo sapiens
cagggcgatttggcgctcacttgtagtcccagctactcaggaggctgaggcgggaggatcactggagcctgggaggttgaggctgcagtcagccgtgatcgcgccactgtgctcccgcctgggcagcagagtgaggctctgcctcaaaaaaattaattaaaaaataaaaacacgccgttaacgagcggctgcgtgcgcgaggtggcacactgggcttgcatacgaattctgccagtgagtgctattagagcatcaaggagattcattttccgagcgactcctccctttcccccgcctccagggggcgtggcaacaaagcgcgggaaaactcgaccttgaccccacccccactccatgctgggggcggggaaaaggggagcccttaaatgggaaatggagctggcggttccccccccagcccatacttaggacgcctatcagttgctcctttaatgcctctttggaaatggcccggccacgccagcactcctacgtcacctcccccgcttccggtccgcgagcccttcccaacctttaggtcccgattccttccatgctccaaatcccgtgccccgtccacgccctcccgcagagggaggagcgacgggttacgctgtcgcccaggagctgaaccgcgcgaggaccccatccatcagattatatggcgatttagacggtgggaagaccgcaaggaaatggtcagcggatgacgtaatgtttggggtggcgtcccattctgtaacttctgtacggcatcagtgacacgggtttagcttgaaacagcgcaaaaggacctacacttctgtgctccactccgactcaatgcggttctgctctcagtgcccaccacacagaagctgggttccttacattcgcgaaagtgaactgcagcttcaagcttcgagcggccagtagggagcgaggggcggagacgcacctgggtgctcccccttccagtaggcaagctgggaagcaggctggcttctttctaagcgacagtggcggaggccaatcgtttacgagactcgtagatggggcagacggaccccggcgcagccaatggggagaggtatcttcagagggcctcggccccttgcccaatgagcataagaggactgtgcggggctagttccgagcggcagtatttagggccaacccagtgcggggctggaaggggcacagggctgagcgacgggggcaagggccaatggcgagtgcgaaaacgggcagcccagacctggagcgcggagggaggagagggagtggggaggccgaaccggagagaagcaggaagtagcggcggccgcggggagggcggcggtggctgcagcggctggagcggggtagagaccgccgggtctcggcccgcaccaggagcggaacaagtaagcgtgcctggggtaaatacccgcccttggctccgcccccttggggggggcgggtaaatacccccgcccctcccccacttggtcaactacccccttctccgcgccgccccctggggcggcttctaggaaggcccagacaccgcctccatccattggggcggatgggcgaaactcctggcctgttgtaagcacagtccgtagccgggtaaacccccaggagggtcgagaaccccaggtcctggcgcccccggctcgagaggcacccgaagtgcggcccggagattgaaggctgcgggatgtcgcgacctaaaatggtgtccgttcccggggatgggggcgggggacctgggccaggccggagcagaacctgcaccccgactgggtgcgggtcagcgtccgggcccgggcaagactcaggcttgcgcccccggccccctgcgcaccccccgatcagtctccagtctctagcgagcctccgggagtgcgcggcgggaggaggctccgctgcgcccggaggggaggggacgaggtccgagttgggacggaccccagctagagagctgagagtcgcgcagagaccgtcccctctctcctcccctctttccagctccccaccctatcctgtgtagtcctgggtccccaggtgctgcgcagcagctcccaaagggcctggcctggctgaggcccggccttcgcttcgcacgccggtgcgagtgagagaagggccgcgcgcctcagtttcccttgtagtttctcatgtgtacaccccgccccctcctcgaaacccaggacttgctccccgcgccagccctcggcagatggcagggacttaattccgtctgctacccagcttggcctcaacctaatcgccgccagcccctcgccctcctctgcgctgcaggccttgggcccgggcaaaggtcagtggagcccccactcgacctgggcctgttcagcctcttcctgttcagcctctttggcttttggggaaccacagagggaaagggggcgggggagataggagccctagagacagggctcagcagtcgcaggaaggcctgatcctccttggcttgagcttggcggcttgcttggtcgactgtctgctctgggtgggtggccatcggatgacctctaagtcactggggcacccaagagggaggtggctggcggggtgtgggggcgggtgagttcgcaggtgttttctcctagtccccgctggtcttcgttgtagcagtccacttttctgagtacctgagtggaaggtagctcaggcctctggtcaggagggaaccagg

SEQ ID NO: 34835 - DNA, 4003 bp, Homo sapiens
ctcattccagcctctgcctcttgggagatggttcagagtgccacatagggactgaaagagggtgtctgaatccttcaggaatgctttaagtgacattgttgaaaagagataaagaaaaggaaaacaatggaattgggtttctaaggtccctggaaatatcctgggggtctaatagagaaagaaaataagaggaaatttgaagactcacttcttccttcatctgaatccactcagatggcaactgatctctgtcccaaggaccctctaccccacccaattcataatcatctcagattagaaaaggcagaattccttcccattctcaaatcagcatttgggttaggggcccctaagttacgtgagcatgttagaaatgtgaccccaggcctcaagagagaggctctgccacatgagaggagataggaatcatgactgaaaggggattagcacagaacagagaaaactgatttgatagacaaatcaaatagaaaatataaaaaaaatcagccaaactcccagaggtcctgcatttcctctcacgtctttgcccagcaacaaggtccaagaccctgtgggaccaaagggtcaggggttagtccagagggaacaagaaaggagaggggattaaggaacatcctgggcagtgagctgggaaaagggaagaactcagacctggaaaaaatgtggttgaagttaaaaaagaaaaccagttgtggagaggcaaaactttccttcaggccaagtcctatttgtttttggagtcagctcaccagcacagggcctagcatttagaagattatgaataaatatttgataatctgacggcagaagccatggggaaagggttctgggtgggagaaacaggatcctgggggtttctgccaggcagtttttggctctaatccaggagtgaattctacctctctcccagctgtttgctccagacactcaggagctgggggctgagcagcactgtactccagctgtctctgagagaaggatcagctgagctcatctcagcctgggctcaggatttccaccgcaaaggtcaggggaactccagcagatctgggaggtctgggagggaggagctgatctcccagtaagaaaaggggcattttaactccagccttggcctgggggctcagaagacctggggacggagaggaaatgcggccactgggggagcctgccaccccgtcccagcctggccccacttacggaactgaatgaattatcaatactctcggtgctggaggagagctcctgggaaagggccagagggcaaagggagaaggagggggtgggaagggaggggagagagacaaaggtaaagaatttagctccaacttggatcgtaactgcttctctagtgaagttctacctttctgctttaataaaagaaagtcaactcagaaatgctacttgcccagatgcttgaccacttgtaggagatgctggaagggcagctcagactttaaggtcagaaggactgaagagacaaagcagcctctgcttttcactttattcacttctattctcaactgaatggatcttccttctaggccaaagctctaaagctgggtccctagggcagtaactgcactgccaagcttccctgctctttttttttacccactcacatgctctcaaccaaatccttctccatggggaccaccacaggactgaacttaataagctgcatggctcccatactggaaaccccatgttcctccagctttttggaaacctcagggaggaagaaaagctaaactttcagtggcaggtatacctcttctctaattagcctcattatcaccctgggaagctgaatcccaaccttgaacctctgtgacaaagagcatcctagaccaataagcccaaaatctctgggctggatgctgatgggagtgaaggataaatcaatctcctatctaccaaacctccttaggcttcctatcaggctatccacatgacaatcaatatactacaatttttgatataagttggggagttagctatatccatctagaaagctgactagctggatagcagctgtcctagtcccagcccagaggatttatctaaacatcaccccattgctgtgtcatatgtgtccgtgtgcaaaaacaggggaaagagatggtgtcaaactctcactcagcagctctgaggcaacactcatgcacagggctcatcctgggttctgtccaacatggtctaccagggcagggaacagagcagcacgtgtgcacaaatctaggttgtgggggacgttgaggtcggggtgggggaggttagacttaaaagacaaagtcctaagagctcccagggcaggagggcagtggtgagtttctactctgaaatctgctgagtagattcaagcatccacttgaactcaattccatggtttcagttctattctagctggaggtcctatagtcaggtccttccttgaagaatctggggactggagcactttgagggagaagccacatttggaaacatgcccctaaggcaacaactcttccattttgggtagaaggtggtgggagaattaaggcagtgaggatgtcagagtctattatgaattagtggttctatttctacctatgagctggttggagaaggaacagcaggcaagatattggctccctgagcaacgctccagctgattctgtcacagacaggtcctgtctgactcattgacagccctgggggaagggaggtatatcatgacctgctcctctcctactccctgggcttgagtcactcacactgagtcagctccggggagtaaagatgaagcaagaagctgacatcacaccatatcaagctagaaggcctactggggcttccagtgtgacatgcggcagatttctctgtacaaaggttgcagtcctgaaaagacaaagctaatctactaacagtgtcatcatatcggggagggtgtgatacctaaatcactctctccttttagctcccccattctataccaaaatatttgccatttggttacaaatgggaggacaaactgcctgggcagagttccccgactaggctgataaaatggctttgaagcggcaggctttgaggagcagtggtggaaaatgtgaaaaatcagcacaaagccttctgactgtgggagagagtgtaaaggattcctcatagtaagaaagagaacactgtgagagctgagcagagaacaactctgcagggagaccatgggcaggaagagaactgtacatgctgcccctgagcctcttctttgaggcccgacctcatccttgggagcccctctactggtggtaggagcatagtattaaactcagaacctaaaagaaaagcaagagactgggagcagagtgttagggtctacctagagattctcctagagtatctctgcttaggtcttagataattatgtgcctcattttagtaagctgtatacttcctgcttatggcagaaaacaactttttcaagagagtcacaaactaaacagttccatagatactggggttttcattattacttcacatgttcctagagggaaggataacattttatcccccgtcctccacagcacagctcacggctttggacattgtacaaagtcaataactacatgttgagtgaatgaatgttacatgaaagggaagaaggatgagtaaaaggaaaaccaattcctttggtatttaggggacaaaagccttgacagacgcatcctcaaaatgccaaaggggctgggtctagtcactcatgcctgtaatcccagtgacttgggaggctgaggcgagaggatgacttgaagccaggagtttgagactagcttgggcaatagagcacgacctcatctttacaaaaaaattttttaaaaattagccaggtgtggtggtacatagctgtagccccaggtacttgggaggctaagatgggaggattgcttgagcccaggagttaaaggctacagtgagctatgactgtgccactgcacgccagcct

SEQ ID NO: 34836 - DNA, 1586 bp, Homo sapiens
atcagataacgcaggagtgcctgggaacatagtatctccttcctctcctggatctagtgacccaagataaggagtcaggttggaagaacggcagctacagaacccaccctaaatgatgtaagtattcacctaatacctgcctctcagtgccatccataatcttatcctggagtgggagttagatgtaaggaaagagggaccaaggatcagcagagtaagaaaagccctgaggcctcagcttttctggtcctaagatgagcactacaaaatggataaagagaaaagccaagcctgacaagaggcaccaaggaattcacttccagctgctcaccctctgctacaggtttgactccaagatgagacagctatccaacccttcatgttccactagaatctggatgactcttcttgttctgcagcaacttctcttcatgacccagggctctgctgccaagctcaaccagatatgaaaacggttcattctagttctgacaacagttttggctttgcctgtgcatggatgtggaagctcagatggccatagcctgggccgttcttccccacatggcttctgacagctggggaccttgggaagtagatattgagaaataaccaaggtagttcagctgaatgattatgagcaccagctggagatttgagtcctggtctgacattcactagttgagggaccttgggcaaaacatctaatctttctaagcctcagtttccttgctggcaaaataatacctgtctctcagcatggttgtgaggattaaatgtaaagtacttggcaagatgcctggcacataagtgctgaataaatgttagcacttttagctttaccattattaaactatcctaacaaaattccaaatttccagagagcaggctctatagtctccctccctcttccttttctctagtcactctgacttccctctatttgaaagaagtcccattgtatcaaaaacgtgggtgggttatatgccccacagaggcagatgccaagaccatagctatccgcatttttcaaaaagtgcaaattcctcctttttttctccctcttttctaggctgggttggaagccaggatgggagcctggccaatggtgagtcagaggggaggactggagcaccattgtctggctgggacaccaggtcactgacacttggtagtccactgggcagctttccctgctatctgtccagatgtggagtgaagagtgggtataacctattcatgtggccacctcttccctgctctatatcctaagttatacctccaactgctgctgtagcttcctcttcttcccagcctccaggtccttgactaggcactatatttactctatactaagagtgctttctcttccctttgtgcttctcccaaatggtatgggaaagataccagcaaggcactcttccccctaaggaaaggcaggcaatgaaggcattctccagatgcctcagtgataagaaataaaccttacacttatgtcaacaaaaggtaggatcttcagagggtagtgaaaagggattagattatgaggaggagtggccaggagaatgaagccgatgttctaacat

SEQ ID NO: 34837 - DNA, 2530 bp, Homo sapiens
tgctcacaacacatttttcttcttagttcaaggtttagttgatcctgaaataagtggtatgtggagataaagagtgtaacagagaacacatgaagcccacgggaaaaacagaacaaatgtcacaaggatcagagaaatccctgaaactcgagggaggtgtcaaagttggaaatcctgaatgggaagggcactgtcaaatctctcccctacagacagaaacctctagaaagttgggggattgaggagggagaaagagaagctaaagaaagttatagggatcataatgcatcccagagaagagtgaggactaggttcaaagtaagaatgtaaatggtacttttggattgatgacaagggcccgagatcccttaaggagaagggaacaggcaattcttggaagccaggagctggctgggtaggtgggtgacagtgaggtaatggaatcagaagcagcacaggaagacagggatgcaatctttagctcagggaaatgggaacccagtgctggagttgcacagggacataggaggaaaagtgcaaactaggaaaagagataaaggtggagtccatggaaaaggtttggggcaggggcagagacgacgaggaaggacaaggatgggcattatgggagtcgtctgatatggaaagggttcatgacttaaaaaaaagaattattcgagacgtaggcaacagggatgagtgagggaggggggaatccccgaggcagagggaggagctaatagaagaggaagccaaaaagcggaggaggaccccaggcctgagaggaaagggtggagaaggaacccggggtgcagctgacaccaagagggcagtttcgtagtcgaactcaggtggggaagactgtgcgggacagggtgggagagggacccccccccccacccaacagggcaaaggtgactcatgaaggaggagtagcttacctctgggggacccccgcggagggggtgcgggcagtcgcggttggactgccgacactgccgcctcagcagcagcgaccgctcccgggttccattggccgcctgcgcttccctgacagcggccgcggaggctgcaccaggccccggctgcggggctgcccgcggcgccgcctgagggggccttcaggctgccacaagttcgaccgggccacacaacctcttcttcctccctcagtacaaccaagaccaaaaaaataataaaataaaataaaattccccagcaggtctcgatgtagtattcttctccggagtccaagccaagcctttcttcccaggatacgctttcctgcttccccagcggtcaggaccctaccgattccatagtaatctaaggagtcgggtgagctgcctggaacatgcctgttcagaaatagaaaagggggcggggaaaagatgtttggaagctctcgagggagagagggcgaagggaggagcttacgggtgggaggaggggccaatatttaagaagcggacctaagcgatagcgtttgcgaggctaaagaagccgagagagaagtaaaatttgctgcataagtagggtgagcaggcggccgtgggtgccctgttaaagaagtatggacatatgcatacttccagaagtatattaacatgcaagttatatgtaaacgaccgtttgagtaactaaccaaattaccgtaattgcaatcaatgacttttccccctcccgtatgctacaagactcccttagtaaatcaggccgtgggatggacgctgggttcctagaagggcgcgcaggaagacggcggacggggaagacgttctttctgactgcccttttcctacttatcttggaggacgatgcggagtttaagctccttaacatttcgggaatggcgcggtccaaccgcgtcagtcttttcgccgttagaggcccgactcgaggccgtggttctgcctccgaggtcaccaacctgcctgggcagcctgtgacctccagcatccatatgcccagccctccagggaggggctggacagggccaggttgggagaggtgagtgaaacgacaaaggcttggagggcacaatcccttcttccaaacaaaacgaaaccatattaggccaaacaaataaacaaaaacacgccatgcaaatgggcctctggtgttgcttttgtgtatttttcgtttgtttgtttgttttgtaaagacagggtcttgctatgttgcccaagcttgtctcgaactgttagcctcaagcaatctgccggcctcaggtaccaaagtgctgggattataggcccgacctcgcccagcaagttttttgtgtatttttcggttaagattgttgatttagagccctctttgtcctcagaacctctatctcaatgcctttcctagggctttacttaatatgcaatgcccctcattagtgccttacttaatacattgaggctagttatttgagcccgggtcttgaatgccatcttccctgccacttacaagccgtttgatttggaataactaatgtaacctctttaaacctcagtttctatgtctacaaagaagacatatg

SEQ ID NO: 34838 - DNA, 1373 bp, Homo sapiens
gccttctccgaaaattagaaattattccattacttcgccaggcccatatatgcccaaagagatctttgccatctccattctatctgccccacctttctgaagtctcctaaatctggaaaactgtaaaggaagagatagggggattgggaatccatgttagcaagaaattttcatttctgcctctgaccccatactgccctcctccccctcaaaaacaacaataacagccacaaaacaaagttctctaattctcaaaaatactcctcaccattgcatatgcctgggaggtcagaaaggatacgaacatattctgcccttctaggcttggaaaaaaaactgggcccaagttctcattacttaatctcgccacgacttcccccgctgctccccctccccacgtcgccggcccctacgtcatctcccacaacagcccatcctgaggcgcgcccccacctccttcccttccccctccattcaatccccggtttctgcaaagtggagcgggggtggggcggggtagcggaactcatgcgctgggcgtcagaaacccggcaggggaatggggtcccagattccgggcacgtgcacatgggtgaagaagctgttgaaaatacagctacaatctttttctgctctcctcccaactcatcttgcccctccctacctctgaacagtcgccttccaacacaagcaacaataaaggtaagggagaaagagaaactacctcgtagccaccttcactccagcccagccccaaggtcctggcccagccggctcgtgcgttgctttattttcctttttctgaatggttgtaacagccgcgatctgcctagatacacgggcggcctgctctgtcattggtcactgctgccacccggagacagaaggcgccgggctcgtaccggcggccgctgaagtctgcctggtaacagaatctgattggtcaataggggagggaaaatccaaagttggtcttatttgagtcaagagggggaagtccgggttgggtttcggttaaaactggggtcggttgggactgcaggtcccaagaggttcttctcttaaagggaccgcaggatgaaagaacgggcgctcggctccctttggaactgtcttttcttttgccctccccttttgtgtttcagtttagtctacggtcctcagagctgccggaagagaagaatcaatggatgataaaataactagacaatgatgggtaggagtgatggaagttcactgtaagctcctataaccccccatcaccatcaccacatgcctaatacaacctgcagacacacttactcgcaacagacctgcaatctgggctctcttttccttcttgatggaggcctcaaaacctcagcagttgtacc

SEQ ID NO: 34839 - DNA, 999 bp, Homo sapiens
cactggttctccttgggaagtcattccaaccctccccttccattctgctcctcccacagaaaaatgcttcccacatttcacagctgtggaagttttcatgagcacacagtgctggcaggtacctttgccattgcccttgacgtctcccagggagctgatcatcacttccccgctggccaggcagtggctggtgtggagaaaggccagttcgcacttggcatggatgtccttgggctcaatgacctggaaggggtggggaatggtgtcagaatcatacaggactgggagtccctgctcttaacctccatacttcccctacttctatctgctgactctgtcatcttttccttcaaaacatggacacaactctccctgtgggaatatgacaaagattcagtctggtaacttctacagagcagcaagggaaagtcagagagattgctaataactccccaggcagaaagcgctgacctttccccatgtgtcctgaaggcacacgcagccctgtgaaaccataagctcctcccaggctggcctacaccagtgtcaactctgtattaccagtagacaacacagtaaatgcctggcaccaaaagtgcactaaacaaagtgttgggagagaccggaatttttaagagaaccctgagctcctaactgcatgggggaataaatggctccctccctctctcagagtaaaacaagaagccttgtccctcttctcccatgccctggtcaccgtgctggagggtgatgacccagaatgcctgggtagactctgctctgaggtccaacctccctccctgctgccgagccagttgccgcgtaagagctggaggctgctggtttaggtctggcttcctgcccgtagactacctggggtggcaggtgtcttatggtctactgagctggcaagggcagaggacatgccttgtgcagctttggggcccggggctcagagcccacgtccaccacatagatgcgagaggagatgagactggg

SEQ ID NO: 34840 - DNA, 784 bp, Homo sapiens
attaccctgtattaaaaattagcctgtattaaaaaatacaggcatacacctgtaatcccagctacttgggaggctgaggcaggagaatcacttgaacctgggaggtggaggctgcagtaagccgaaatcacgccactgcagtcactccagcctgggcaacaagagtgaaattctgactaaaaaaaaaaaaaaataatgaattactgtgtaaatatgggaagggctgtgccagaggagaggagaatgccagggagtgctcgatgcccagcgagagggctggaggtggggcagggagagagagagaggtccagttcacaggagttaaggagactggttctgttacacaatcttgctaagtcggggcttggcaccagatgacagggggtggggaaggaggttgctggatacagaagggaaaggagattttaaaactccaagacctcaagacagagatacaaaaaatacaaagctagggagaagctgagagggaagtaaaagtgcagagatggagctgcccgctctgcagcctcggcccaccccacaccccagcaaccccagccccagcatttcttagggtcaggcctggcatgccactgcagccccagggagcatcattcctctttctggggaatacccccatctgaaacatctcaagcaaggtctcggagcagctttgggtttgggatggactcatggaaagctcaagtgggttttccatgtcaggctggctgctgggcattctgccagctcggcattctgccagctcaagagccagccccgagcg

SEQ ID NO: 34841 - DNA, 896 bp, Homo sapiens
gtcacccagaagcctacagatggaggaatagcagggccaagggggatttaggggtgggggaggcattgaaacaggtccccagtgaaagagtgtgggggtctctgatttccctcccagagagctttgctgtgtggagtagctagagagtgacctgggcacagaaaggctttggactccctacctcgctggagtacaaagttggcccatggctgaaatcaggatcacctctctactatgtgagggccagggacctagtggtgttttctaagagcgcccatctgattttcccagctgcagaaaggcaccctggtcccagcctctgctggatggagccaagtcagggcccaggatcccatctcccagcagtgcctctgcccgtcttcctcagaaagtttggctgagctgggaaatgcagtggggtggtgggggagggggtgtgcagactggggacaatgaagcagagtccactactccctccccagctccccactcaggttttctagcattttctggaggagggccttccaaattaggggcagacagagcaggcaatgggtgattggaaacccctctccttacccatgctgccgactggtacactttgatcccggcgggtttgctgtgctggtgtcagaggccgctgttccggggaaggagcgaagggagggaatttatacaaccagctgggggtggggcagagaaggaggagggcccgggctgtagcccagagtaaactactcagggcagctggccaggatactctcaagtggcctagggcaactggtgtttgaattatggggtgtgcgtgtatgtgtttaagtgtgtatgtgtgggagcctgtgctttatttatttatttatttatttagagacagggtctcactcttgcccaggctg

SEQ ID NO: 34842 - DNA, 1765 bp, Homo sapiens
tgtaatcccagcactttgggagtccgaggcaggcggatcacctgagatccggagttcgagaccagcctggccaacatggtgaaaccccatctctagcaaaaatacaaaaaattagccaggcgtggtggcaggcgcctgtaatcccagctactcgggaggctaaggcacgagaatcgcttgaatctgggaggcggaggttgcagtgagccgagatcgcgccactgcattccagcctgggggccagagcgagactccgtctcaaaaaaataaaaaataaaataaaaaattgtgacgtctcactcaggatcagcgtctttaagtggccacctccccaccccaccttcatgcctccctcctccttgaatcgtgtgttagaacgctgtgatctggtccaaactccacggagatgcgatgcgatgcgaagcgatgttgggcaatttcaactccctgtctcggtcgccacctaggattactgcatgttcagctacgacctcatcaacatggctgctggaagtcgtctacaggaaaaagaaagaaatgacactgaaggatcacttccgcttccgttggcgcaagcgctttcattttttctgctaccgtgactaagatggaagcgtttttggggtcgcggtccggactttgggcggggggtccggccccaggacagttttaccgcattccgtccactcccgattccttcatggatccggcgtctgcactttacagaggtccaatcacgcggacccagtaagttctcggcgctttcgtttgcgtagcgggagggaccgtggggcctggtgctgccggctggttttgagagcccgggaaggtgaggcggggaccccgggggcgcgcgaacggcaggggagctcagggcgcggagtcctggagaatgcagaataattggaaggaattatagaaaatcagaagcgcagctcagtgcgcggaaagagggcgcagtccatcccccctctcagctcccaccgttctcactctttaggaaccccatggtgaccgggacctcagtcctcggcgttaagttcgagggcggagtggtgattgccgcagacatgctgggatcctacggctccttggctcgtttccgcaacatctctcgcattatgcgagtcaacaacagtaccatgctgggtgcctctggcgactacgctgatttccagtatttgaagcaagttctcggccagatggtgtaagtcatccagagaacaggagagtggttcccaagtagagaggggagtcccctgttttttattcccttcgatgggatggggggacttgttgcagcgggggactggaagagttgttggaggtgggcgatctgtgtttgcaataaagtttttggcattaggtgtaaaatgggggaaggtgtggtaacttcttttggggatgggtggagaccccgacttaattctctcccttttctcacaaccaattccttttaaggattgatgaggagcttctgggagatggacacagctatagtcctagagctattcattcatggctgaccagggccatgtacagccggcgctcgaagatgaaccctttgtggaacaccatggtcatcggaggctatgctgatggagagaggttcatatgaatacaaataacttatttcctttaccacccaacctagtacctgtgtagtatctcttctgtctcttctccccaagtgaatcccactttaactcagaccccatggtccccttcttcagctaagatgaatctaaggtgaaatgagttttga

SEQ ID NO: 34843 - DNA, 2369 bp, Homo sapiens
ggcgacaagagtgaaacttcgtctcaaaaaaaaaaaaaaaagtaaaaccccatttctgtggagttttgagcggcggtaagaggtgtctacgggcttggaaggacgggctacaccgcttgcatcaagacggcggctgctgtgagatagtccaactgcatcttagtttccatttcgaaaatgagactggccactaaatgactctaaggactcatcagcactacctttttctgaactaagaatgtctaagacaagtgctactagcagtttgagagaatcccacatctggagaggaaggaaataagaacaacacgcagaaagacggaaaacaaatagatcaatgacagtactcctttgcaaaaggtgccaagaatctaaataaaatagtccccgggataaacatggcgcccaccgcggcaggacataatcaccagaaaataaagattccccgcctcattccattttataaatcacggcgccatcccaaaagaaatttggggaccgagggaggagacttcgtaaactagctgcagtgcactaaggcttaggatgtactattagaccaagcagagattacataacacaagggatcggctcagcaatcactcattttcctcctcccgctcaaaacgagcgccccactccttctcggagcgggaatggggcggggagggccgcgcacccccacccccaggggccgctccgccgccgcccgcccctccgccgcacggcctcgccccctcgccggcccctcccgccgcgccccgccgtctcgccaccgcccgcgcccccgcccccgccccttccccagcgggccaccgcccgcgcccgcgccgcccactcctccgagacgcctcgcgccgagcgtgcgtgtggacgtcgggctgtgtgcggggccgtggggcgcgagtgcgcgcgcgcgcgccgcggcgggcgccggggggcgggggcggccggccagccggcaggcagggacctccgccgccggcccttcgcgcggctcccgcggcccggggcgcacgcacacacactcgcgctcgcgcgccgcaccccgcggccgcccctgccgcgggccgcgccgccactcgcggtgggcgggggcgcgcaccgccggccccccgcccccacccccgcgcgtaccggccccatccccctctcattgtctcgcctctgaacgcctcgccgagcgaaaagataacggaacccccgggagcagggggtggggagagagaaggctcgctcgctcactcacctcctgtggtcgtcgccgccggtagtctgacccgaggaaggcgccgtcgccttaaagggaccttacacccggcgccagaagggggtgggagcagggggaggggacgggggcttggggggagacgaagaagaggtaaccgttgaaagctcgtctccccaagggtgaaaggaagcctccctcgggttcgagtgattcggggtggatttttttcccgaggggggcgggggggccccgagggaggggggtgggggggccaaggaatgcggctccgtgtacgggagctggcgcgggggagagagacgccgactccccccaccgaccctctcgccccgcggagggatacggctcgtcacttccgccctcccctttttcacggcctcccaattggtcggagcgcgctgcacgtcatgggctcatccaaacccctgcccgggcttcttttctagtcaagtttggctgggcctgcaaataaataaataaaggaaaacattttttgtaatgaaaaaagaataattagcttcagaagctatatctaaattttggtgagaaaaatgagacttccaaagaaaatattccccaatttacttgccaagagtttccaaggaagtgttgggaggctcccccactttccactcaaggcttagacccagtcaagagggagacttcatgacacaggccaggtggtgaggcccagtggcaccaacaactgtcattggaacaaagaacaaaatggcactcactctttctcaagagacactcggccaagtaaccttgtggctgcggccttgtttaagtgaagaacttttaaaagccattttgatcctcaagcccttctggatcctggaaagaagtggcacacgattgttaaagcgattattgtgatggaaactgctttgctcccattgtgagtagattcagcagagatccccagttccaagaaaccacacacactccacatccttatgctttttgctccaatcaaggctgagatgggttggctcaaagaaattggttagtccactcaaacgaccatccacctgtttattcttccccagacaaaaactacctcttttcaggtagctaagaaattttgtcctttattgccttctgagattataaa

SEQ ID NO: 34844 - DNA, 1311 bp, Homo sapiens
tccttcttaatactgcttgtcaaactgattttgccacccagtttgaaaaagaaggtctagaggattatcccaatcattaactatttctgcaggttagcttacctttccagaatacagaatagaattcagcaaactgcctcaaagagcagtttctagatttgacttcttcctctagggtttatgaagtcatcatactgaagtgacctggatttccctatacgtgaacctcatgacgtgggagcccggggtagggagggacagataacatgagaatcaatagaaagaactgcaaggtctgaagacaagaaccatttgtctagtggagtctattttatatccattttttaaaaatctccatttaagatatttagcttcaacgtgcaccttgaccaattaatccaacaaacaaaactctggcttgggggcccagttactcactttcatggaaagagacctctgtttttagaaccagggatcttgtgagtccctcccacgtccccagcccttctctggcctcgggtaacttttccctccagtttggtggaaggttacattagaagaaaatagtccctaccgtctagaaagttttcggggggggaaaaaagggcgttggacgtgcgggtgggtgggtataccgggaggggacagctggagccgcgaaggcgcgggggcccgcggcgcgtgggtgtggaggccgcggggcggcaggaggcactgggaagcggggtgaagagcaccgaagtccagaaaagggcagtgtccgccctgcgctcctctgctggcgcccgcaacccgggagggagcggcgaggctccgaagggtgggattcgaggtctgaaccctcgagtgggcttgggttttcaggagccgccttttcttattgatcatttctcttttgtcatcataatctcttggcctcagactgagttaagggagccatagtaggagtgcagaaaatgaagtggaggaaaaaaaaatgtgatatttaaaatatagtttttcctactttctttttctctctcaaattaatttagatgtaaataacattttaacagggcccaacatcaggctcctaggctctggctgctggtctcacttgacaccagaataagattttggtgtgctagtaattttgccaaatggaggcctactccccaaaacatcaccgtggtgcatgatgaacatttctgtaggtgatgacgtggagtttttgttttacttcattctaatacatgtccctgcttcaagtgggtaaaattatacctagctcagcccaggtttaattcagattatttaaaaaatttcagtggc

SEQ ID NO: 34845 - DNA, 1471 bp, Homo sapiens
actaaaaacattttttatctatataattttcttttttttgaaatagagtctcactctgttgtgcagtggcacgatcttggctcactgcaacctctgcctccgagttcaggtgattctcccacctcagcctcctgagtagctgggattacaggtgcacgccaccatgtccagctaatttttgtagttttagtatacagggttttgccatgttggccaggctggtctcgaactcctgacctcaagtgatccacctgcctcagcctcccaaagtgctgggattacaggcataagccaccacatctggcaaatatatttttaaaaaatagaattagggataagtatctctttcttttagaccatgaggaagatttatgagctagaggtaaggaagagacttaggcctgctagctctgggctgaatgctatggtacccagtgagtttagactattggagggcaggcctgttaggggactgaggtcagaaatcccctcctgcttccatataggcagccaagagctggcctgggacaccagctgggtgcttttcccagccgtttgcattccagcctgtatacaatgaagaaagagtgacagtgtggtgacatgatttaggttaatgagctactgatcacctgccaagtgggtgggaagtttttttttttttctgcccacttctgtagaaaaaattttttatgaatgactcatcttgtctcattactcagagtacaaatttgtgagctggtaataagaggtcaaaacctaaggagaacatatccacccccactctccaacacccagtttctggtagatggatatgctcattatcttgattgtggtaaaaatttcatggatgcatacatatgtcagaactatcaaattgcacactttacatttgtgcagtttactgtttgtcagttacacctcagtagggctgtttatgaaaaggaaaaatcttatatgtaaactttttataatcacagagtttggatacttaatttattaacttgcacatataaatttatctaattcatctttgcagtcaaagagaaagtcatttctagaaaaaaaaaaactgaataatcattttggggaaaacaaaggacagcctagggagactagatacaaagagtgtcattgtagaatttctagccacacaccagaataaactagcctctcccactcctgaggggagaaatgaggaaaaagtctttgcttagctggagtgagaatgttgcattcttttgtaagctttttgtaattctttgtttatctagttgactttctccttgagaccagcctttccttctccgcttcaatctacaggaaatcctccctctcctatagagagaaagacaactttctcctagggaagccagttgttctgccactctgctggcccgaggcttctatttcttagtccccctgatgtgctacaaaacttgagagacacaaatctatcaagtctctcaac

SEQ ID NO: 34846 - DNA, 1188 bp, Homo sapiens
ggtgggaggatcgcttgagctttggaggctgaggctgcagtaagcagagattgcaccactgcactccagcccgggtgacagagtgagactccgtctcaatgaaaaaaacaaaactaaagcaaaaacaaaaacaaaaaaacccaaaacaggctgggtgtggtggctcacgcctgtaatcctagccctttgggaggccaaggtgggcagatcacttaaggacaggagttcaagaccagcctggtgaaaccctgtctttattaaaaaatacaaaatattagccggaaatcaattgaatctgggaggcggaggttgcagtgagccgagattgcgccactggactttagcctgggcgatagagcaagactccgtcttaaaaaaaaaaaacaacaaaaaaaacccaaaccaaaaaccatcccatgggagtgtctctgaacctattctggttcaggaggctgcacaataaaagaaaaataagaaaaaattttttaaaaaaaagtcttttaaaagccacccagtgttcaggaggtgcgctcctggaaggacatttcctcttctgtccccacccccactacatgttttttgctgttcctccccagggaacaggccggtttgatggccctaatccttatatacagcttgctctggaatgcagagactttgcatcccagctgaggagctggtaagtggactttactctgtaggacccacacctagcttttgaaggcttggggaggggcggaaaccagctcccgagaatacaccggaatctgtgctgcatcgaagattcctcttctactccaatagatacagggtaaatatttgttgtaactaaatgagaacaaaatccggagcccagcaacgtaaacgaagtcaatctcttttttacatatctcaacggttaacagctaggatgccagctttaatgttgttttaactgcagctggtatgagcggtcctgcagtttgcagagcccctagtttttactcttttctaggaactgggatcagcatccctactttttgagaggctaactctgaggtaaatttacaactgagtccctttcagtttagaacgaaggtcattcctattttggtaaatttgcgtccccggtttccattcattcagtcaacaaatatttattaagcatgtagtatgtaccagtccctgttgtaggcgtttggggtgaag

SEQ ID NO: 34847 - DNA, 4016 bp, Homo sapiens
aagtgacgaaagagcattctggttcctgcagaggtaggtgaaggacagaaagggccctggccggcgattcccttggagtaaacgggaggcaggaggctgttttctagcagagcccagaagatgctctggccgacggctcccgggatcttggccggcggtcactcgcgaccatccgcgacgcccccaaaatggcctccgcgcccctcgccgccccgccccgacgctccgcagcccgtgggtccacgtgacctggcccgcccttcgcggctggagaccccgggtcccggtccccgcaccggaggccccgccccctacgggaagcggaccaaccggagcggggaaaggcggggcgggcactgacggcccgcgggggtggagctccgcagcggagtaacaggttggtgggagggagagaaaggagggagctccgaggacgagggggagggccggagctgcgcgtgctgctttgcccgagcccgagcccgagcccgagcccgagcccgagcccgagcccgaacgcaagcctgggagcgcggagcccggctagggtgagtggacccggtgcgggccagggcacccgagaggaaagcgagccttcaggggtacctttgaggggcaggcatcgaggcggtgtgagatgcccctctccagggcaccggtgccgagtgggagacgggaggaggggagattggggcggggtggggtactgattaagagccgacccctaccctgaggtgccagatgcaggtggctaggaaggtgccaggcgaggggcacctggggcgaaggctgttcccagcgcatgaaagcgtttcagcgccagatgtctctggaggtcagacgccagccctaggggcagaatttctcttggagacagcggtggcgcggggaaggagttagttccagctgagtcgggaactgctgctgcctgaggtgcagactcgccaggggagggcatctgcaggtgctgctcgcctgagggtctttcctgcgtcctgcggtctcagctggccgttgtcagcaccctggtggctttgagatgactctgaggtgtgggattttttccccagcccttcacctccggccgaaggcagttgcgaatcagagacactgaggggcagatgagagggcaccctcatctcttcaccaggtgtacaaccattaggctttcactttgtgtcctttgctttcgtgccagggagaatcgttccttcttcctcttgagagagagagagagtactccccaagagagggatatgaggaagcaaagagccctgcctggtcctgcaaaatattgataaatattaatacttatttctcaggaggcccctttctgggggcggatgtcaaaccctttctccaagtacccacatattttttctgtggttctagatggggaccattggatgaggtttgggagcccaaccaatttccttgatgtctggaggaatccccattactccctgaacgccctccaggcatccctgactcctgaactgcggtggctgtcagaatggcagcaggcactattggggcaggaaataggcaggactcatcaggagaccacgagactagggaaattacaactccaaatccccaggacagatgaaaggtgcaccttggggcccagacaagactggaggcaaatttctttgccttaggcaggtaaaggaactagagtcaaccttagcttggcccctttgaagccctgcctgaggaaggttgttgtaattgggaaataattagcaaccgctatgtttgtagatgggctgcctacacatgcctatgcatctcttctttcatcctggatgtttgggagtctgggggctggctctgggggactgctaatccagagatttgcccgactctaagaggattctggcttcctagaacccttcctgtgtttcccaggctggcctgcatgccattccccttgtgggaggtgatgggggtgtagggctcttctctttgtgccagggaggggcggactgaggaccagggaggtggccaaagcaagtgtgggatcaggaatgcaactttgggaacctcaaagggaggggtggagggagacaaagtctccctgtcacatactggcctgtcaccaggttcctgttcatctgctcctcctgcctgttccctccctgccctctgtcctctccttcagagctttggctttgccatcaaggctggagagcccctgcctgtggtcttgcccctctgcctcctccgtggtgtggaatttctctggtctgctttacaagctgccagtgtagtttccccggccctccccttccccttgcctctcaaaccagtccagccagtttgcaggggcccagttcctcattgtgtttttttccctactggccaagcagctgtagcctggctctcaggtttctgctctttcagcggacctgggcaggagtccacttgggggattctttttggatccacggggaaccttcttatctctaactatgagaaaaagggtgccaaatcatcaaggtcactgagctgtccttttctatttcgaccatttgctttccttgtttcctctgaggggattctaatctctatacctcaagttctcccgttttctaaatctgccaattatttagcatcaagcatattgcctggccctatgtgaatcagtccttcctccacacacccgaaaccaccccacccccacttcctgccagaagtccagataccctgtcactcctagttggaaaccagatgcatatggctgggccagaggtgatggaattggggcagggcaggctaatgagtaactcagggagaagtggctgtctggtacaggtgtagagtgttctcccactccttgcaggcaggaaaggcagaagcagacagatgcacctgaatcaacttgtggtctggtctcttcctggagtacagttggtgaggagagccctggacatgtgataggggagagaaaagtagggtcaggcattggtgagggcgcaggccctggactccatgttgcctggcccttgatcactgtttacctgcctgtctctggggcttacgcaaggcctcagagctgccctgctgccttggtcccgccccactgtcctctgtaaccaaaggcgggtaggtttcgggttttccatgttgaatcatttagagccctgctttctgacccaccccaaagatcccttcagccctcctggcccctgatccacatgtccttggactgaaggtgattgaggttagggagttaacctaacctgggacctgggggagtgttcaacactgcctctgaataatttagtgctgttgctcaagggtctgtgccctctgctgggcctaggctgggaactccttgacctggatctggaagatcagtagatgtactgacagggtagactgcatcatgaataaatcatatggcttctgagagctggcaatctaggcacttctggttctaagatcatgactacatagggcagcaagtctggaccaggaggaggtcctgttgctaagaggtcctgttactgaggcaaagtagatttgtcctgggcaaatctccccactgctgtgcaagtgggctttagttcaggatacagcctttaacaaatatttgttgacatctaccacgtgtccaaacacctggggacacagtggttagctgctagccatggtctttgccctccaggagcttattatctcgtaggggagacagacaggaaataattactccaataaatgtataaatataaactggagtaaacctgctgaaggacaactatagagcgtataacgtggatctgacctggtttgtgggaggctgatttgtgagaactgaccttgtttgtgggagtggtggtcagggaaggcttctctgaagaagtgacatctttctatgaaccaggtgaagccaaaagtgcctgttggacaaagtagcatgtgtgaaggatgatatttgttgtcagctttgtgatagtcacatgctaaatgttttcatgtttaatatcttgtttttctctcctttttattaa

SEQ ID NO: 34848 - DNA, 708 bp, Homo sapiens
agatgaagaacaattcctaataaagggctcttctctccctgttcctttctcttgagaattgctgggaattctaagaatgctcttcttcagatagaccttccccaccaagccctttgtcacctgtagctctgcctctcccatcccttcccctcccttctcatctcaccctggcttgctagcactttacagtccctgaaaggggccttgccaagtttccttggcccagaactccatggggaggttgagttgggtatgtttgtgtttctgtctggcacgttagaggctcatcctccagtttggtgctaggctctggtggagactagcagaaggggtggggaagctgaatttttttatttgcttggaagacaatctctcccccaagttcctggagccagagcatacctggaatacattccatttgctgactctgagctttagcaatgtggacctgggaagctggcctatggatggtgttggctctggctctcagctgagacaagtttacctgacctggggccccttaaagtggcactttttttttttttttttgagatagagtttcactcttgttgcccaggctggagtgcaatggcgtgatcttgggtcactgtaacctccgtctcccaggttcaagcgattctcctgcctcagcctcccgagcagctgggattacaggcccccgctaccacgcccggctgattttgtatt

SEQ ID NO: 34849 - DNA, 2870 bp, Homo sapiens
tttttgagacggagtctcactctgtcacccaggctggagtgtaatggcatgatctcagctcactgcaacctctgcctcccgggttcaagcgattctcctgcctcagcctcctgagtagctgggattacaggcgcgtgcctccacacccagctaatttttgtatttttagtagagatggcgtttcactgtgttggtcaggctggtctcaaactcctgaccttgtgatccgcccacctcggcctcccaaagtggtgggattacaggcataagccactgcgcctggccagcagtaaatgcctttttgagggttagagtagaacagaccagaactgggttttattcccttgggtcatagtgataaccccagcattcacttcccaggtagaaaaatcctcattcattcctaactgacataggacccagtccctaactgggaggtagggacatttctgctgttcctgccctagtgttgccttgaagagggagctggcccttcactagagcctattgccaggtataggagtactatcccttcaggagtgggtcagacctcctcctaaagtattctgtctgctgtctctgtggaccacagccaagtgaagaagccatctgccaagagcagctgggcggggacgaagctccagggtcctgcttggccaaccctctcttctaggccctcaagatcccagcctaggcttggggagaaaatgcaactggaaaagtcaaggctcatcctttctcacgaacacaaattccttttaaggcaatgtgtcccgcctctcccaactatataagggcagcgtcagtaaaagagcttctgcaaaacaagccccacccagagcctaagctgactgggcctcctgggcctcttgccaaggaagtgcacctgccagactggcttaggccagtctgagtgagctggaccttggtgcctgcctttctgcggtggaggaaaggtttactcagctccacaaagcctacaggtggcttacgtatagggagaggagcatgtatggaaggaagcttttgcaggttccaactcctcatccactaggagcaggcagggtgattccctctgaccaacactgatcttggaaagatggaaagcgacaagattaatgaagaatgtgcaaccacatactccagataaagctgttcagttaaagcagccccatgtcgctcccaagccccacctttgtgtaaatctatgcgagcaccgatggggcatgtcccagacccattggctccgcccacctcacctcctcgcctatcgttagttctctgcgaaaccgcgaactgggggcgcggcctatcttcagccccgcccctgatgggcctatacaagggggcggttccgcgcgcgcccgcccagttggagccagacagcggggtggacaagtggcgtgtgtgctgcgaccccgagggaagatgaacgggacgcggaactggtgtaccctggtggacgtgcacccagaggaccaggcggcggtaagaaaaagcgctctcgctgtcttctccgttttgtattcccggtttctaagtccgccccttccgtgccccgcgccgtgttggctgacatcacctggtgcccggctcgcgcggtcagccctgcgcggcgcttctctctttttattcttttgcctgcgacgggcagtgggagtcgcggggtgaagactcctttgaggctggagggttcggggcgtccctgccctttggtaggacactgcggctcctgcctgggactcggcgccggcgagcccgtgcttgggccgcgggtctcaggcgtcttttgggcagccacattgggtcataagagaatgagctcaagcgactgggtccctgagcgcctttggacgttgtgtcctgccgaggaggcttaggctttcccgtgggtcgagggtcctggtgacctccgaggccctccaaagaatttcatcatggtgctttggatgatcagtaacaagaaaaatggtagagtaaattacagggcttggactggagggcggggggcaagtaggggacggtaggactcaaactattccgagattggctagggactctacctttcgctaagggatagggctttccgcccgggggtcacctcttgtcttggatttctccttcttcccccttgtagttctcttgttttcctccctctatctgcctgccgatagcttcctgggacggtgtgttagttttgcttccgtctccagccgccaggccctgggatagtggaggaaggggatgcagaacccgggccgagaaggggagggaagtgacccaagcgaaggcttctggacggggagagggttgcggagaaagggggcgttctccagtgcaggctggtctacccctctctcctctttctctggctcccagtcccagttctccccaccctagctgaccatatggtttttcctctccagaggctgaggagggtaatttgtggctgagtgtttctaggctcttttggggaacttaacccagattaggtgtgtactatttcatcaatttccaagctattgtgggtgggagtgaaatgaaaactaaggtgatggggaacttgtgtatcatcccccctcccacatctgactcccttactctctgcctgcctcatcctgctcttgaggtagagctaacccaactgcagctagattatggctcttcttcaaactcatttcaggtttagaatacagatggtcatttagttcttttcccagtcccctctccatttctgcctgggctatgagtgtttttgccacattaaaatacagatgttgctattggccaaccccagttgcccaaaccccattcttctgtagcctgccacatccccagctatgagactctgaagagatggaagaaatcta

SEQ ID NO: 34850 - DNA, 3003 bp, Homo sapiens
ctctcttttattttttaaattagaattgtgatttattgaagccttaccatgagcttcatataattttttatgaacagctttattgagatataattcatataccccatttaaagtatgtaactcagtggtttttagtacattcacagagttgtgcaatcatcaataaatcaattttagaacatttccttaccttataaagaaatcctgacccattagcagtcactccccatttccccccaatctctctcagccctaggcagccaccagtctactttttttctctatggatttacctattgtggatatttaatataaatgtaatcatcggtatgtgatcctttgtgactggcatcttttattagaatgatgttttcaaggttcatccatgttgtaatgtgaatcagtacttcattcctttttatggctgaataatattccattatttagatgtattacaactgtgttcgtcatggataaatgttggtggacatttgggttctttctactttttggctatcatttataatgctgctacgaactttggtgtacaagtttttgtgtggaaatatattttcatttctcttggagaggaatacctaggagtgggattgctgggtcagaatatttgcattttaaaggaggattcatctgtagccattgctgcttactccagaggactgaatgtattctaaaatgtggaagtcctggttctgtgacatctgagtgtggggaaaaactgctgggcagaggagcctttcaagtttggtggctgcctgttccttctactcatgaaacttgtcctaaactcagcccataaatttctcctcacaccatcccatctctcccatttattgccaggttcttactttcaggagcactgcatttttctgatgtcaccaaggctgccaggaatttggggaatgctgggctttgccagagaaggagggatctcctctgagcgaggagagttacctcatcatcaggcatttggcactaacatttgcccatagttctccagggtggaggggggcgtgcacccagatggtttcagttccagacacgtgtgctcagagaggtgggatgagcttccttgcctgctagtaattatggtgcatgcctctttgggtcaaggtgcagaggcttgtgaaatacctttgttttctaggggttgggaaggttcagttgcggaaataggtatgtgccaggaaggctggtggcccagatttaagcctggccagcagaggcaggaagtggaggagacaatatagggtaagaaggggatgagtcgatgaaggaagaaaagagacgtggttttcttgggtctgggagcacagaagcaaaaatcactaagcaggtagtcagagactagagagggcagagccactccctttgatgcagagggggcactgaggaacttgccctttcattccaggtttgctggtcgctaggcaggtgtcctagagtgagactggcttagcaagtgggtgtctccttcagagttggttcaggagctcacttccctctacagacacactgtcactgctaggccctagtgttttcctttgttagggctccaagtaatgagaaaggctgccccatgtagggtgccacctcaaatcctttttctcatttcacctcacagtaaccctggtgagccctctacatagtgcctgtccagcccatgcctctgggtaggcagccacataaaaatcaaacacctgttttgttggctaatctggggaggaagaaagggagtgattctttgtgtcatactccacaaagggccatctctggcctaggcagcactgcagaaggcaggaccatgtacctgagactgatgagctgagtcgggtgcgagcctcactcaaggagagggtagagagggtaggtacccacctatcccatccggctctgttctttgagtttatgggacttccttcatcctgatcacttgggtgccattgttacaaggggctggctattcctacttttcttttttctttttcttttcttttttttttttttttgagacggagtcttgctctgtcaccaggctggagtacagtggcccaatcttggctcactgcagcctccacctcccaggttcaagtgattctcctgcctcagcctcccaagtagctggagctacaggcgtgcgccaccacgcccagctaatttttgtatttttagtagagatggggtttcatcctgttggccaggatgatctcaatctcttaacctcgtgattcgcctgccttggcctcccaaagtgctgggattacaggcttgagcctccgtgcccagcctcccatttttcaaagtggggaaactgaagtgactgctcctccagcagcttgagaggccatgtacacttggggtgggaaagtgggtgggattgaggggcaaagtgagggaagagtgggatacagggtgaagatgaattaaggttgctggtttccagctcaggggcaatctccacttcctttacttcctcttagaaagaaccttacacttgactcctacccagtcctagtgacccctgtaaaacctggggagtgagagctgggggaacgcaggcttttccctattcacatgagcctgtggtgtgagaactctgcacctctctccttatttccctggggcctccctgtttatctccttatctctgctgtggcgtcttgatctctaacccctcagctatgtgtttaccccctccctgctttgaggagtgagtcagggttggagatttgtttgaacagagtggtgaggctgcctataatttggaggtagctgggcttctcccaaaaatgtttatgaggttagaggctgcttaccttgtgattagtactgctcctttttccctagagaagaaggctccacttctcatcttgccttttagagtacccagtagagacccccctgccggatatttttggggtgttcctaaagctccctggagcctgctcatagtcctgaggaaatgcaagcctgctctagaaaaca

SEQ ID NO: 34851 - DNA, 2473 bp, Homo sapiens
gatctatctacattgctgtattaaaatctagttcattgcttctgcctcctacatgtacttttataacttacttttttgcttcatgttatatcatatgatgaaataatattttcatgaaagttttccatgtcattaaacagtcttatgagaacactctttgaaataagtgcataatagctgtgttccaggaaccttttaaaggccattggctcaggtgaggatttagggaaattgactggataactcatgacatctagatttggaatgctgtgattctaaccacttgctttagatgggcagcttggactttctccttcttttgaatcaccatatttggcaaatacattgttggcaacaaattataataacacctggtaatatctgtttggcctctttcttctcacaagctcaaagctgtaccggatgttatcttacctagttttgaggcagcctgtaaggcagggtgtggtagggagtgtactgactgcctcacagataaagaaatgaaggcccacaggacttcacttcttcattatcacccacaggatgatgatgcagagactgggacactgtcttcctccagtgtctggtgcctgtgcagcagagacgggggtgagaccctacatgttagctcatctctaaccaccagcccacagttgggtgtgtctgggagagactgagcagttacctcgatgagacacctttttccacatcgaatcagattcgtggactcattgcatgcttttgccctaaacctgtccatccatcagtaaccctttatatgctgctgtcagtgccaaaagctgagaatggtaaaggatgtgcttttggaccactccctttgtgatgggcgcgacatagtccctgtcctgtgggaactctagtccaaaggggaacatggtctctgctctcagagagctgtaggcagatagagggaagcaggatgcacacctacagacagcatccacatattcaccaagaaatcgattagtggatacatacatgaaatattactgagcatgtcctaaaataattgggtgttttgaggctagcagggttctttagggtatgaagggacaatgtttcattgaataactcagaattcctggctgcctaaggtaactctccccttgtgtgatgacagttcttttttgagggtggtctggacgagatggtccaaaccagtgtgtgcctgggaggggggaccttttcttactgagtcagaaacttgagggcttccccttcccttccttgttctggctgtaggtggacacctgtataaatgaggatgttgagagcttgaggaagacggtgcaggacttgctggccaagcttcaggaggccaagcggcaacaccagtcagactgtgtggcttttgaggtgagatttgggatttggggagaaggtgccctaagggatgggctactgaacacaggtgccagtgatgtctcagcttggacttcctgtctttctggctgagtgccacaaactggaaaggcaaggctgtgaagcctggaacgcttgtctgcttttccctctcctggacgtttacactgtttactgtccaaggccagcccatagttcaaaggtcagctcgggattctctgctctgatgagtttgagggtggtgcccatctggggcagccggtgattcagaagtcatttctgtctgtgtcgtggtaagaatccctgggctcttgagactccgtgcaggcaaggactgctgctgacatgtcacccccgagtctccagtgtctggtgcaatacctggtattagataggtgcttcataaacgtggactggatgagtgactaaatctgtgttgttgtagaaagaactgtacccatcgagttggaggatttgggctctaaactcagctttgctatgcagagctttgtggtctggaatgagtatctttttttcactctgctgccaagctggagtgcagtggcgcaatcttggctcactgcaacttctgcctcccggattcaagcaattctcctgcctcagcctcccgagtagctggtactacaggcatgcgccaccatgcccaactaatttttgtgtttttagaagagacggggtttcaccatgttggccaggatggtctcgatctcctgaccttgtgatccacctgcctcagcctcccaaagtgctgggattacaggcacgagccaccatgcccggcctggaatgagtatattaattattgttataatacagaaatctataaatggagagtaaaagccccctactatatgtgaggtcttccatattttctagaaaattctttgagtataaaacaaggtacatgggcagttttctttctgtctttggagacagggtctcactctattgccaggcttgagtgcagtggcatgatcttggctcaatgcaacctccatctcccggactcaagccatctcccacttcagcctcctgagtagctgggacaacaggtgcacaccaccat

SEQ ID NO: 34852 - DNA, 1991 bp, Homo sapiens
tgcactccagcctggatgacagagggagactctgtctcaaaaaaaaaaaaaaaaggtaggacaggaagctcagtgagggtggcaaggagggctgggtgctggcctggctcatcctaccatgatgaggtcaagtggccccttcacctctctgagtctcggttccctcctctgtcaaatggcaggttcttcagagctccaatcagcaataatgacatttcaaatcaacgcagcttcccaaaagattccagatgacctgtccaatggcctttccaaatgtagaaggcctggatcccttgagaagacagttctcactagcagattataatcttgtagaagatctagaacactcatggaacaaagagttaaggatatcatcttcatctagaaaaatagtgttgcttactcagcagcaataggactagaacttcaatttgtttttgccttccttctccctgggccacggaggggtcatggtcgggattaagctgcctgtggctttactcgttcagtctcatttctggacctctgctaccttgccagttgtttctgagacacaccatgtccttcttcacctctctgcctttccatgtgtgcttccttcggcctgaaattcttttccctgccttatccttctgagaagctcctagtcatccttcaaaaccccactcaaatgacatctgtttggtgaagtcttctctgactccccagagaatccccagacagagttaatcatcccttatcagggctcccacagcagctggcacaaaacttatcacaatgtacactacttgtttgttttcatgtctgcctctcccccaggcctgagaattcctaagggaaggggttgattattcatcttcatgtctgcagccctggcccagtgcctggcaggtagtagggacccagtcagtgctggcagaactgaagtaagttctccttcctgtaaccagcagagtgtttttccaggtggctgaccaggatcactgagcaaaagacaatcactccatgaggcagccctggggcacttgcctggcatcaggagctcaacgcagagaactgaatgctaatgtttaatgtttgtgcactggagggcacacatcattcaaaatttgatggaggctgtttagaatctattttaatcccagaagatgacatgtaaggagaaattttctgatagtgtgattaagctctgggacatgagttaaaggggtggtgggtgttgcaatgttgaaggtctttatagtctctgattttttcagaaaagactgtgtggagtgagtagctgaaatgtgaatagatgacctctgattttaaggttatgtaatgggattggataggtctcttgctcgctctgggcattggacatggtgtggggctttggtagcttcaggtggaatgacctggccctccatgaatgagtgttgaggttggacacacggctgccacttctctgtactgctccccacagcttagcctcatctgcaaacttcggagggatcagtccatatgagtacatatgtgttgtcagtaaatagacttttccagagctgccagtatcagctggtgctctgtgcttgtgcttctctttggctctctctgcctcctggtcccaaaggctcttggcgtggatatggggatagccagctgtattgaaaaaggatgactacacaacaaaagaagaaaggtgagggtcaccttcaaggggaaaggtaagtgggtgtcatggttgattccattccgtgctggggactcccttgcagggcgttccttgggggtggaattttttgacttgtgctttagtcaaaacaaccatgggtctgaggaaagaggagaggatggcacatgagtaggacagaagtgatcgctaaggctgggaaatggctgtcactcacatattaaaatagcccaaaagcccaacattagggttattagtgaaaattttttcaagtttagcacaatttttttgctctatatcttaaatagcctcacca

SEQ ID NO: 34853 - DNA, 818 bp, Homo sapiens
gtgtggccctctccacaggcacttcacaacatggcagcttgcttcctcaaggctggcacaagtctcctgctctagtctgctaagaagtgttatataatgtcatataatcatgggagtgacacatcctcacctttgccatattctattgcctagaagcaagtcacaggttctacccacactcaagaggaagggattacacaagagcatgactcactgagggggatcacctgaaggtatatttgcctcaggaatttagaaaagagggatgtcagagtgaactggagtccccaggggaggctttatggaaggacttcagccaggtcttaaaggaagagtagaatttagttcagcaaagggaaataaagaggcagaacatctaggaccaaagaactccatgagcaaaagtatggaggtgggattctcacctaagtaattcctacacaaaaaggtaacagaaacctgacgaccttgcagatcacaaggggtaggaggaactttttcttattgaaccaaagggaagctgggtaggggaaggagaatgtcctggcttagtgtcagaaaatttgggttcaaggttcaggtctggtattaactagcagtgtgactgggacctgctggttatctgagcctagcttcttgtgaccatttcgattgactttgttattgtgagaacgagacaagctcttggatgcaaagtgctctgtcaatggtccagatcctatttctgaaagcagcatcattgactcccactctctctgggtcccccagccccctggctcctctttcactggatgctctccctctttcagtctcctaaa

SEQ ID NO: 34854 - DNA, 552 bp, Homo sapiens
gttctttcaaatctctgtgtgtttgaatatgctgtttcctttgtcagaaatgcccttccaccactatccttctctgccgcaattgctaactcttctcatctgtaatcacttagctcagctctcccatttcgtgagtcatcttccctaactcctccctctggatacgtggaagtccctccgatgtgcaatcctagcagcttgtgcaggactctcctcacagctctcatcatgctctattgcaatggttttttgttttctctcctgctagattgtgaattctcaccagcagtaatggtgtcttattttcttttgttattttaatgctctgatcatcttttcttccaacctgatcctttctaaatatttttaaatttattttttgaataggcaacactcatgtgactgaaaattcagaagttacataaaggtataaagtgaaaagtctctctcctacccctgtccccgcctctgacaccctagctatccagtctccctccccagcagcaatcagtgttatcaatttcttgtgaatacttctaaagatataaaaat

SEQ ID NO: 34855 - DNA, 1842 bp, Homo sapiens
tgctttacagttaacttaaaaaaaaaagtagaaggagtacactctaaaatagtgataaaaactacagtgaattcataaactagtaacatagttcttaccattatcaagtattatgtactgtacataatcatatgtgctatactttcacatgactggcagtgcaggtttgttaacaccagcatcactccaaacatgtgagtaatgcttgtgctatgaccttatggtggctactgtgccactaggtgatagacatttttcagctccattatcatcttagggggcctccctcgtgtttgcagtccattgtagaccaaaatgtccttatgtggcacatgactgtagttgcaatacaggacaagaaagttgcacaataactgggccttagttcctgatacttagtagctggatgactttgagcactctaaggttgtttcctaataacgtaaaatagggaagctaatcgtgatccggttgcctcacaggttgttgggccctggtcaacatataagttactgtgccaaaaaatgagttgatataatttaagactgtgttgaatcacaaacgttaagttattctaacattattgttttttagaggttatgaaatgaaaggggggggggcgaaaaacttggtccgcatcaagaactgaatcattttaccacgctgggtgctgggttatactctccccacccagcagatcaaactcctaacccagcatgaaagataaactacaactcccggcaggccttgcttccgaactgcgtcttataacctcggctcaggcccaggcccagaccgctccccgcccccgccacccataaactacatctcccaggaggccccacggtgcccgattgtccgcttttcgcccgccccctgcctcctcttcaccccgcgccagcagctcggtggccgagtcggtcccgcggccggcggatcgggcgcgcgcgtcgggggtcgtccggctgccaggcagggcgagcacgcgccgggaggccttggaggcgtagggggcgggggtacggctcgcctgctcgcaagatggcggacgaggacggggaagggattcatccctcagcccctcacaggaacggaggtggcggcggcggcggggggtctgggctccactgcgccgggaacggcggcgggggaggcggcggcccgcgggtcgtgcgcatcgtcaagtccgagtccggctacggcttcaacgtgcggggccaagtgagcgagggcgggcaactgcggagcatcaacggggagctgtacgcgccgctgcagcatgtgagcgccgtgctgcccgggggggcggccgatcgggccggggtgcgcaagggggaccgcatcctggaggtgtgagtatcggggctacccgccgccccatcctccccgcgcccctcctgcccctgcactcctcgctacccttgtcacccccaggccgcacctcccccgagctccgagccggcctccggacccccgcccctcaggcctccgcagccgggcccctccttgtgggctgccctcccaccacccgccccggggcttctgcgacgccggtctcccaccccgtcgtctccagctgatgcccttgcgcccccagtgctcctccctgtgccccgattactctgggctcttctccgcccctttgccttcccgtttggcgtgctgcattctgctcctcactccccctcgtcttgctcagaaggaacctcatctgctccttactgacggcgtttcgttttctgatccagccagtaccgtgtcccccccaagttctcatcttcagcatcgcagtttcgttctccaccactcccctccgcccccgtggactgccccttctgccct

SEQ ID NO: 34856 - DNA, 1231 bp, Homo sapiens
tgcgttcctgaagctatgtgtgggatattagtatagaggaaggggaggtcttctcacctctttccatttttccccccgccataagttcacaaagtttttcacattagaaactgttaaaacataaacaacttttctggaaccaaattaatcttttgacttcatggttcataccgtgtgacactggagtttgggcaggagggtggagatacaaggtgtttggacccttctggtttatgggattgtctttttccctttttccccttaggaaccacgtgaatgttgagggggcgacacacaagcaggtggtggacctgattcgagcaggcgagaaggaattgatcttgacagtgttatctgtacctcctcatgaggcagataacctagatcccagtgacgactcgttgggacaatcattttatgattacacagaaaagcaagcagtgcccatatcggtccccagatacaaacatgtggagcagaatggtgagaagtttgtggtgagtgtcagcccaactcgatcctcgaacatctagctttgtttcccctagtcttataattatgaaactattatagtggtagataaaaggctgcaacctaggtcagtttgtctaccaggaggatgagttcacacataaataaaagacactgaccctgatttattgcagggggtgaattacagtagtggaaaagagtcctactcagcttgagtataattccattttatttttagatagtttcaagtttgcattctggtttgtcgtaaacgtgtgagtttttgtttagtttcttttttgtttgttcttttgttggttgccgtatctctttgctaatagtatcttatttactgttgattctgtggtgctatagggcaagattaatgtaaaaggatggtgtccttcaagatatttgggtaatagagaggttcacccatttcagaacttagatgtctctactcttctttccacatcatgttctttttcattttctttggagatatccgtgtgaatgattaactgtggtttttcccacgagtttcctgaatgcaattcccatgagctgtttcacacatttctaatctgttgctgttgtagctatgcaggaaagcccatcttgaatttttagtgatgtgtgctagcccctttgctgaatgcctttgttcttcagagcctaattgccactgatagctcagtctacttaatttttcttttggttgcaatatgctttatttgcc

SEQ ID NO: 34857 - DNA, 2036 bp, Homo sapiens
tcaattagaacagagacaggggaattagaaccatctaggagtccctaaagaaaagatgtcaaaaagagaagcacctcttagtttctcacagtgcttatttttcctaaaagaaatgctaattcatattcactaggaacaagatttaagagactgctaattagtttctttagaacttgatgtataaatttaatatcccctgtatagagggagttgtcgtcccatggaggatttcagtatctgtggcacaaattgtcaggctcctctccccacacactgttaatgatgttgctgcctttatgttttaattttcaatgctggaggccagtgtcacaatcacaatagtttttatggcttcctcttctcacatatagagttggattgtttccacaaagaaaaagcaaggcaaatagttgagggggacgggctagaaaaagctgatgccaaaccggaccagcctgagaggaagcgcctcggcccgggccttactctccaccgactgcgtcaggatgagctccaggttttctttgggccgatgcttcgtgtcctccaccagcttatagacgcgatgtcgccggtgcaggcgcggcttccggccctccccggccagcggtaccttccaccagcgctccacgatgaccgtgccctggcggccaggaaagcgacggtaagctagtctccacaaggaacaccctctccctccaccacggccgccagcccctcaaggaaagcccgccacccccacatcggccccctccaggtcccagtgcgcctccagaaacaatactcgagcgtatctaccccctaccccagactcagccctcacccgattttgagaaaggctgaagttgcaggccaggtcaggggcgttcccttcatgtcgcggccgcagtagctcctggacgcctccccgaagcagccgtccagcgcccgcccgcagcagagctctgcccggggccgtgacaacgggcgccgccatgttcacaggcacagaatgagacctgagggaggaccccggcgtcggcggcaggaaaggcccccgccagtgctgcctgcggcgcgccggtacggctgagcgaaagtatggggagcgggccggggaacagatggcaccgcggcttgcctatttttgctttttggcagaggtgacggacgcctagaattactgactgataatggaatgagtgttaggtggactgacgccggaaaagacgctcttcctcttgaaagtgtgggctttgctgtagctccagttgctgggctaacttttaattctaacgttctgtgatgactggatactgaccggagaatgaatgatgctctcacttttccttacttcaaatctacctaaaagtggtaaaggatgggatcccttggaaaactctgccagctccaggaggagcctgacccttaatcattatactgcagtatttaagctaataaaggagaattctaaatcacaagctatgtaaaccgtagaaaaaaaagcaactatggtaaggccgcgacagttccctctggggagggtctcagtactggacagaagaccataaaaactggatgaaagaaggtccatttggcagagattatggaaagactggcccttaaacatactgaccagtcctccttcctcctaaatacactacttggcctcctggacaccggtcttcttcagtctcgtttgctgatttctccttttctccccgcttcttagaatgccctcgggactccgtttttgaacctttactcttctcagtatacactcactgttgatctcatccagtctcgtggcttacaataccatttataagccaatgactcccaaatttctagttccatcctagacatctcccaaactcgtctcaaatattcaactgtttattcgtcattttcctcttacgtatccaaaggacacctcaaagttaactgtcccaaactaatttatttattcccccctcgcccccaaaactgccccatctgcagcctttttcctctcagttgacagaaactccattctttccattctaactcttttctct

SEQ ID NO: 34858 - DNA, 1865 bp, Homo sapiens
aaacaaaaaccccaatgtattattctgacgactgtaaacagccatcctattagcgataactaaagaaaaagctggggaaagttaaaggcaaagtgatatacggatggcagctctcagtctcaaaaaggcccagtggaagagtctgaactgactcagggcaaacacaaacgctcccgcaccgggtccgttgtggcgtaagcgggtgactggagcatcttcctcagatacagttacgagttcccagtgggtcaagttgcccccgagcggcgtctcacagcccagggctctgactcccccgctgcgccccacatccttccctcgccccggggcacgccagacccctcccttccctcgctcccgcatttccgtctcctagtggccagggctgcccatgaccctgtctttcccactccccaaaccttcggtctccatcctcgcctttaccgctgctccagtcagccgtcgagtgcgccgcctcgcgcctcaccccagctgcagccaccagcgccgccgcctcccactcacaccaccacagtgagccccgccggcggcgcttcagccgccacttccccgcccccgcagcccgacagcaccaatcaacaccctgctcgcagtccgaccaatcgccttctcccgtcacaaccaatccttccgcgggctgcccctgagcgacgtggctgctgctagccgctgcccaattacccggatggaatccaaagcaggcccaccctgtcagccaataagatccaggaaaagcagatgttgttaactgagaccgcacctgctgagaattaaacagccaattacaagcttcccggcgtcctcgcagaccacctctaggccaattaccgaggagttttctatcttctaacccttggaggaaaatctgcgctccagcagctgggaccgaggcatgagagcgttgaatcatgagtggcaccgttcgcaaaaattggtgtctttgtacaaagacagtgccacaacacaactcagtgaccatcgggagagcagcctcatgatgggcgatgctccatcagttttctcttgcgatcttttgcatagatcggtcccgccccgcatatggcgatgaggactcaagagacacggaaaacgttttctttctggaaaacatgaaataggctttgtagatggacaggaagtcaagggacaagcggtgcgccgcagagagcgaggacccactcttctattcctttgcggaggcacggacacacggtgtggcccgaaacagcggcaggagagtgagacccgggctccgaccgcggtggtaagggggcggcgggccataggggcgccaggggcccacccttccctggggattcgaggaaacgggtcgaggcgacagcgtgaaggcctacgccgggggagggggtggtggcggggggcgtttctgtgggggcgaggaagggagcgggtctccgcaggcggaagtttgctttggaagattttattccagacgctgtcctggtccctggacggttaggaacggttgggtcctgctactgcctccgtggggcagggagcctcgcgagaccagcactgcgccctactcggtccaccctgtccccgctccgcgctaggggctcaccctgggaacaggggtcgggcgatcctggtcattgggggatcttccgcactagcttccatcacaatacctggcaggtgatgagcaataaatatttgctgaaagaacgcaaggttgtatcttttgtcaattaggcagatgcctttgggcctcaggttttgctttctattaatataaaaatgtgtatgcgttttgaataagtaatacatttacattctacaaaattcagaagaaacaaggttattatagtgaataaattttc

SEQ ID NO: 34859 - DNA, 2377 bp, Homo sapiens
gaggcagtagctgaccctgacggggacagggcacatgggtatctgaaatcccttcattagcactcaattcctcacccaacccccagccacacgtgcctgcccagcagcaagcttccagtgctcacactgtaagctgtggtccccccaggaccaggcggtaagtgagttttccaggttctttccagtaaattaagagcagattttaatacatggaggggaagagagaataagagggcactgggtgtctggaacaggggcagaaaacgttggggcccccatacttctagtcacttagattctccctctagacctacgttttcttgtcagcaagatcaggataaaagtattattgcctgtccatggggtgattgtaggtaacagagagtaatgaaatgatatcaccaatggaaagcactgtgtattcaagttactcctgagcagaggtcaggctgagaagaccagtgggcctggcaaggctgagaggagcactcgggccctgtggactctgttcttgcccaacacctccccctccaacactgtggcatctctcttttcagtggcctaagaccagagatgggagaaaccaacgtgggccacccaaaaaagtaagcgggagggagattaggccaagccgcagtgggaactcgggctctggcccagcagtcaaccacaggcctccctgcctcttcccttctccaagagccacatccgcgtgcgtgtgtgtgctgaccacatggtgaccccagacacatctccctgccccatgcttgacccactgcttctcctggccctaggaacctcacaacagtgtcaccaagaccttgaccttctcataggaagatgcggccagtcaaggacccccttcgcaaatacccatgtttgggcgacaccaaagccttggactccagccacctggtcagcccatcctccatcctcccagtccaagacagaagtacccagtgagacagacacacaaggccaaagactctgagctagaatgtcagaccccctagcctcactgagctggagagaccaagaggtttgggtccaggaaaaacagagacatagatctagggatggagagacggctgcggaaacactgaaacacagaaaatccacgcttgtatcctggcctttgcccaacccatggccccctcagcacttcaggccctctagtcctgctcccccctccttcccctgccacctgcactcccttcaatgccatccacccaaacctcagaaagaaagtaccagtgctgtgtacatgagggtgtgtgttacttgtagagaaggggtgggggagaacgggaagggggctggtagacttgggggttggtgagaggagctgaaaacacctctgatgataactcaccttcaaaagctacccctgggagacacgtccctgaagcagcaggtggtgggaactcagattggggagaaggagctgagtaatcacaggattactcaaactgttgccctggagccaggcctgccaggaacttaccatctaagggcctgccagtgccaggaactagagccaagcaaaggtcaggaacctcgaaccagcccctgcaccactgctcccatggcagccctaactctaccctcgcctgctgtcttggaaagatctttgcatctcacctgcagctctctcactgtagctctctcctgagagagagctttctccaaaagaaaactccaattccacatcttccaaaaggagagacaaatgcccaaatgcacccgccagctccttaagtcatctaatgactgaatgactatggctttctgcatctcaaacaagattacctggggatctgaggtgggactcaagattctgcactttggtcagctcttagttggtgcctaagcttactggtcttcagcttatactttgagtagcaagaacttagtccctattcctgcctttttgccaggctgctccttccagggagtggggctggggttggcgatcttttcctgagctcattcttgcatcttttctgccatccagtgtgacctctaagacttcattctgagacaatactagaaaaagaaactgaatctcctctgaattgctttagagactgaagtacccccaggagcatcctagtagctcctcctatgaggggaaatacggtagaggcaaagtcctccatcctcctctaatcgagcctctcacagctgtgagattcaatgatagtgctttgagtacttccagagcctggccctgtgccagcttaggaagccaaccctgggccctgtccaggtgccctatgccacagagaggaagtggtaggagcaggggaggggctgcaacccagggggatctctcctctcaaaccccagaaccaccacccccccaccatcatggtag

SEQ ID NO: 34860 - DNA, 1673 bp, Homo sapiens
catgccctataccccctatagcttccctaacctctgactctattctgttatttttttccttctgctgttcagtcttgacacctgacatacacacacacacacacacacacacacacacacacacacacagtgcccttctgcccgggagatgctccccactggcaggccgtggtcactaggctgtgtggaggcgagtggcctgatggcctgggctctgctggggtgagggaggagaaaagactgccccgaggtggcaaggccccacccagccccgcccacctccccttgctcctgcctggccccacccagcttcctccctgacgtggcaccggctcctggcctctagccttgcacctcagagcagtcctgtggtgggggtgctccccttgctcacccaggcagccagttcttcctccaccaggtggccctggagcttggtggctctggccctcaaactttcctcctccatgctcacagctgaccaagcctgtggccctgcgatcctgctctgagggggttcctgacttggaccatgggtggggccaaggacggcctgacattctgtccttccctgctgatggcccagtgccccacattctctgcagagatgaaatcccacatccctgggtgagtggcgaggaaaggaccaggctacgtggtcatgggcagctgacagggtgtggttccccctgccacactccccaagtctgtcactccttaaaggacaggtttctccactggtgaatgaacagaaggtggagcagccagcctcccggccactgctgtctggggtcctggccagatcaaggaagcagtgtccctgtgcctcctggggggtaagcccacacctgggagggcctgtccacattctgacccctcgctgggtctagatctggctcccctgacttggctcttccctccccatctaccctccaacctgtttcttccttctcccgcttctccctttctttcctgtttctctccttttgcgatttcttctcctctgtcatctccccagcccctcctcctgtttctcctccagtttcactccctgccaacccagggctttctcctctgcactcttgtccctccctcccctcctcacttcttgcccagtctcttgccatttctgccctcctctgaacctccagcagtctcttccacctgcaggcagggccatgggcctcttaccccgtgaggctcggtgctgtctctgtggggccctgtccatggggcagctcccttggtgccgtcctggctgccctggctgcccaggagggcagggagcagggcccaggggagggaggagggcggagggtggaaggcgggagcacctggccctccagcaggcagggaaaaggagtggctggcagagtgtcctggcaccaggaggggacatgaggagagaccagtggaccagtgcatggagccttgaggagaaacaggacaggagaaaggaagggaactagcatttattaatcacttactgtgtgctgggccctttgcaggacactttatgtaaatccatgcttttactttgtgtaaatattcacagcacccaccacagggaaacattattattccagattgatcagtgagtggagggattctcagagatattaatgattttgcccaaggactcacacaagaacaataaatgggtgagctatgat

SEQ ID NO: 34861 - DNA, 698 bp, Homo sapiens
ctgaccccctgatgcttctacgtgctcctcatctgttggggcaaggggcaggcctggaggagtgcctggaggcagagaagccatggtggggaagaggagaggagagatgctgcactggactcattgggagaaggagaggctcccagacctagtggcccacactgaggcctgcagtgaaggctctgaagggggccaagaggacgaggcttctggggatcctggtgctgcttttctcctgcatggcctgggcccagagtttgattagctgggcctgactctcctggttacccaacaagcaactggccaggggccaggctgcagcaagaggctccctggcacctcctcctgctctcgttcccagctggtaaacagcagagcaggagtcagccatgccacagcctcgtgactcgcccactcccccccacctggtgcacgtggcacctggcatggagagggcaagcagctgtcccttccctcttctgccgtctcgtctcgccatcctccactcctgcccaaccctggagcttcacactctgctaccatcagcacctctgttcttaggtagctcccagagtctccccatggctgcagattgagagataaaggtagaagtggagaaggacttttcaactcctagggtcattgacagtggatgagtagtgagaaagaggaggggaagttttggggaccttctgcac

SEQ ID NO: 34862 - DNA, 1659 bp, Homo sapiens
tattagcaaaaataaatacaagccgggcagggtggaaagaatgtggactgcagacacagtggagacgtcctgaggaagccaggggctcaggctacaggctgagatgggtgggcgccagggatgacccgggacctagtcccccacccagcgggggcagcagcgcaatgaggggcgtctcgcactcccccagcagcacatccctgcgaagtcccgcgcccctgtctagcaccttggctctcaggctgcgggcggccaggtccggggggccgagcccgtcgaaaaagaaatcctcgttgaagatggggttggcgctgcacttgaccacgcggctctgctgctcccgcggccggacgcggggccgcagcctcagcaccacacagcagccgccgccgccgctcccggggcgggaccgcggccggggcaggccctcggcgctcactaggcgcagccgcagccgcccgggcccggcctgatattcggtggagagccgcagctgcccgccgcggggccccaggcgcagcacgctctcgcgcgtgggccgcagctggcagcacaggaagtccaggtggaagagcggcggcgtgggcggcccggcgcggcgcggcgagtgcgggctggtatcggccgagctcgctttttctggggacagagagtgaggcctggacacccggcgccggcccaggcctggccgcggggagccgaagggcgacgagtccggcgacgaggccgtgtcgctgtcgggggcccggcagaggcgcaggtccggggcggagacgtgcagccgggactgcgccgcggggagtcccccggccggggcaggtggcggcccgtggaacagggattcccgccggcgcgtgtgcgggctctcgggcaggaaggcccagccttcgcggcccgccaggtgaggcagcgagcaggtcgcggggaggccgcgccccgccacgtgccgccgggccgcgggcactgcgccgcccgggtccgggagccgaggcgggatgaagaactgcgggatgcgatccggggtgaggacgttggggcaggcgcttgtgggcgggcccggggcgcgacgcttggagaacaggccggaaggcgcccaacgggccgcaggctccgcggcccccaccttatagccagctttttccaagagccacatgcggtgggtggggtaatggaattccgaattccgcagggccgagagggtccaaatcccgtctcagatgggagtgctcggcggagcggggctgggcgaggagcgcagaggagtcagaggtgagtgatgctggcgtacaccgggcggtcagccaccgcgccccggtctccggacccactgggagcgcggacccctatttgagcagaaaaagaaagggcggcgcagtctggggggctggggagaaatggagggagcaaagggccagtcagtcacattttcatatacgggcctccgtcaccaagtacacagattctcccactggtactaaagatgccccattcaccttacagttagagggcccatatagtatccaccagaaccctagggtactattaggacaaataggataataaccgcattatagcaaaaggactcagatcccaacccccctgggacactgcgccctaggcgggctcacgccctcctcccccgcccatttcgaagacttg

SEQ ID NO: 34863 - DNA, 613 bp, Homo sapiens
accctacaactaacatcatgctgaatggtaaaagactaaaaccttttcatttaagatcagaaacaagacaaggatgcccacttttgccacttctattctacatggtactagaagtcctagccagagcaattaggcaagaaaaagaaatcaaaggtattcaaattggaaaggaagaagtacaaagatctgtttacaaatgacatgactttgtatatagaaaatcctaaagattccacaaaaacctgttagaatgaataaacaaattcagcaaagctgcaagatgtaaaatcaacacagaaaaagcagttgcatttctatacacaaacaatgactaatccaaaaaggaaattaagaaaacaattaaggccaggtgcagtgactcacatctgtaatcccagcactttggcaggccaaggcaggcggatcacttgaggccaggagtttgagatcagcctggccaacaaagtgaaacactgtctctactgaaaatacaaaaaattagccagctgtggtggtgcatgcctgtaataccagctacttggcaggctgaggcatgagaatagcttgaacctgggaagtggatgttgcaatgagctgagatcatgccaccaca

SEQ ID NO: 34864 - DNA, 1825 bp, Homo sapiens
tgctggaaaaagtgtttctttgcggtcgactgagttatttttctccattttgccttgccacttttaatgcctgcataagaggggcgatctctgttttcctcatggaaccccaggaattaaaagcagatagatccctctccctgtgatgaaagatcttatggcaactgggttttcttctgcctgtctgtgtagttatatatgtgttgtgtgtgatgtctataaaaagatctctaattaattgacctaaaggaagataagcgtttggatcaaatatttttttaaagggaagataaaagctgtggtatcttttagttcacgtcactttaatctttgaaaaataaaaacagcctcaaatattattggtaaaatacagatgttgtcaaaatataaatagacagactaaattatgcagttcaggtagcgccctgccgaccctgtctcttaaaaaacaaaaaaacggggtcacctttccatcccttttctaacggtttgaatctcaggactgtattcctaggcccctgttgcttatgctgccctgtggtgcccaggtgagcttttattctgagattggctggttggggtatggataacaatcgaaggctctgttaccgcaggcgtgtttctgagtcctgctcccgccccatgcccgagggtgcccagactcaccagctcgggtcgcggctcgcttcccggcaggcgccggcctactggcggcaggcacagagcccccagcgtgcggaggcgcgcggcgcagctcctcagcatggctccgggccgcggggccgcgcttgctctagccctggacggcgcactctacctccgccacaagagcgcgcgtgcgagttaacccctggggtggacgcagggcggggcttggggaggaggcggtgcgcactactggcggctggctggccggggtgtgaggccggcggggtccgggtagggcatcgctgttgagtctatcttctggttccggccttttctttccgaagacctcccgctgcggccaacagccgggccacttccggggcttctcaaaggcaagaggagcgcggccggagcggatcccggttatcgccttgggcccctcagcccctcagccccggaacccgcgcgccgactggaggctttgcggtcatccttcccacatgacccagggcgtacgcagtgctccgtgtccccaagtagttatccctcccccggaagactgaagtccctggggcgggtaggagcgcacgctaggagtagtatgaataaagtgttttcttggaggtcatgggcaagtctctggacagggttgatagtgctgatttatagagggcagtctgggcacaaagagcatttatacgatcgaaaagctgctttccctgccaacagccccataccctccccaggagcgcgcttacgccttaaaagactcttttgttatgtaaactgacagttaaattaaacgaaggtaatggatactaaaggcgtaacaggtattgtaactattttactgttatcgatgcttttgaggttacttacctcgcttgtattcgtatggtgggaatactaggcgcataccttctgagcttcgaattcagtaacctcactgggaccttgaaatcggactgggttggagtattcccattactcagataatgcaaatccgggccatcatacccctttatttttaaatgcttaccagtatgccatagccctagtccatcctaaggtgaagactctaatgggttttttttgagacagagtctcgcagagatactgctattgcacttcagcctgggcaacatactgatgccccatctcaaaaaagcaataaatt

SEQ ID NO: 34865 - DNA, 1100 bp, Homo sapiens
ataaaacaacagtcatgacagcagaaactctcacacctatacccttcatccattgctacccctctttccaccaaagacaacgttccaaaaaaaaaaaaaaagaaaagaaaaacccaaaccaacttacatttaaaaaactctttttgttctggccccaggtattattgaattgtcattcacaactgccaagtttagtgaatatttgtcaagccttgtcttacttaatgtcttcacagcaattaagagtataaatcacctttctttaaacttccttttcccttggtttccatacgaactcatctaagtttaattcctatatctctggaaatttgtttcttcatggaatcacctactttcttattaaatttgggaacatttgccctttggactctcttctcacattgtgtggccttctggcaacattagctactctttgcctagattctgatagaaagcttgggtttaaatttgactctgacccttcctggctgagggactggattttccaaataacaaccaattcttcagttctctgacaccaatggggtgttctacatttgaattaaaatctgacactaactacaccgggttagcacagaccccatgttaaccttgtgcttaatcccacaagactgccctcacttcagacaccacaaatgggattcccagactacctacacttttgcctaaccaactattaattctggggttcccatgacctctttcctctttagtaattccctatgtgaccagaaagaaaaaaatagatgccactttatcaactaatatggacccaaaggttaaggaaacaaaattacctatgggtcaagggttcagggcctggctggcatggcacattttgaaattcctatgactaaactccctaaaaataggagcaatcaggccgggtgcggtgactcatacctgtaaccccagcactctgggaggccgagatgggtggaccacctgaggtcaggagttcaagatcagtctggccaatacggtgaaaccccatctctactaaaaatacaaaaaattagtcaggtgtggtggtggttgcctgtaattccagctacttgggaggctgaggcaggagaatc

SEQ ID NO: 34866 - DNA, 1025 bp, Homo sapiens
aacactacccagaaaatgctggcagtgcctgccagtcattgtgacaaccaaaaaaaattaagactcattctagaagtgaaatcatcccggttgagaatcattggtcagtgggtcagcatttttgagttacctgggattttcattaggagagatgacaataataaagttgacatttgttgaccactagttatgtgttatatgctcttctaaacattttgtctgttttaactcatttaatcctcacaaaaaccctatagtctagagtctattattattcccaatttactgatgggggaattaaaactcattgaggttaagtaactcatccatgaaatcaaagctagtaagtaaagaaatcagaattcaaacctaggcagtttggtgccagagcctgtgtaagtaaccattgcaccccactctgttatggtagaagctgggcagtcctgaatcagttccccaaaaatacagtgatttaaataaaatttattagtgtatcctaagtgaatctgactaagcctgttgctggggaaatcggtcaaggtcatttgactccctttctagctgccctgcctgtctctctctctctctctctctctcacacacacacacgcacacatacacacacagtctttttcaaggtcatttgactccctttctagctgccctgcctgtttctcacttaaacacacacacacacacacacatacacacacacacacacacgcacacacagtctctctctctctctcatagtatttcttcccctgtctggctcactggaagaaatgacaatatcatagctgctccaggtctgtgaatgatgacagtaaggactggtgaaaatgagtcaggagccattcattggaaagattgtgtaagtgtatgtattgtattttcaccactaatatagtaacttggttacagttgcttggtaactatacactgttctaagtaatccttaaaaactggctctggtgaatgcccacagagatttttccacctctttttgcagcctctagttctca

SEQ ID NO: 34867 - DNA, 1047 bp, Homo sapiens
aagtaattatgttattttggctctcccctttttctctttacttcttgcactgctatgtgacagctctcgggtgccaaacagcctcttcctgtgattaaagtttccaatttataacaaacagaaacaaacaaacaaaaaagcggtagtacttactctagccacaccctacgtgagggcagatgctgggctgttgccatggtgatgcagagtattttgtaaaacacttggcccgggggcagttaatgagtcatactcagggatgggtggggaaagggcaactgctttcaattaaaagggacaggccaataatagttgaattgggagactgccttggttcctgcagtacatcagagacaccttggggctgagggttttgttatacacttggtccatttgttgtgtggacattttctatttccttcctctgggtagagggagcgatacagtagattcccttttgctcttccgcttatataaaaaacttccaactaagttctgataaaatcagttctgttttcctgtgaagcgttgacacaactaaagctagtgaaaggatttttgtgactttcttccatcccgtgtctttgcacatattcattgtccataagtaaggcatctgaaacatattattcagcattatcctaaacttttcagcaggaagtgtttgaacaactataggcaacgtaatttcaggatggaggatctataccttacatgactcctctgaaatttcgtgctggttgaagtcagtaaacctgcctcaagcatgctgagaagtggttacatgttgcctcctgaggtgtgtcatacacctcaagtggttagttatgattaatattgctcaattctcattgactactcatagcatattgggcaggagcagagtgtggacataccctctaggaaatgacatgctaataaatgtcaaccactcaatcacttaactaggtcttactgagctgttgccatgagaaaggcacaatgctaggatataatcaggagtttaaacatagtaaaacacagctctttcctactgagagcttataa

SEQ ID NO: 34868 - DNA, 7713 bp, Homo sapiens
gtgatccgcccacctcggcctcccaaagtgctgggattacaggcgtgagccactatgcccggcctatatgtattctttactaaagctctgaacttgttatttactgcaataaagacagttgcatctctggcagtaaaatacagttgctctacccaaacagaaaactactcaaagtccattgtctagttcacttgagaagcaacaagtaatactataacctaactcatttgagggcctcctatgtttttagtgacattagacagatgagctgctctcacagtctggggtacagtgggaaagcaagagctttcatcatgaagcgtttataagaaaggaaaggaaacatgtcagatcattacatttgggtataatgaactaggggtatatgtctcacaagacccagtacgtggtacttaatagaacctcagtgaattttggcttaattggaaggaatcatttggcgagaacagataagctttggctaatatcacctaaaatcactactggataggaaacaggtgaacgtgaatggagactgtaatatagcactaaaaaataaaaataaataatcacaagaataggctttgagcttagattgaagggctggcaaattcctctgctgaagagctctaatgggaacctgagacatgctttggtctggttcctatctctgagagatgcctgttcaacactgattctcaaatgctatcttttacagaggagaaggtggagtgggtaaacatgaggattgagcaattaacacttaagaattgtaaattctaccccttaatctccagaaaagtatgggaaccagcaggccaaagaatgctataaatcagaatctggcatgagtcatctgaaaggcagttagttatcttggagagagctgcaaattaatgcttcaaggtctgctgtgagatgaattccaggggaaccacacccttttccttctcttctgacacagctcagatctggctcatcccccatccctcatatgggtttcagatggcagtgggcttacagagagtctgccttgcctggactggtactccaagtccagcaatttaagagaactgaactgggcgagtcacctctgggagaaggacgtgggatcccaccccagttcttaaataactcaggaaaggagtcagacaccacagaggtttaaaaatacctgtgctcaagttcagagcagcagagcacttcaggatcaattcccaaagatcccagaaattggaactgggtggggtacctagtttacttttttcagatgacaggacagaaggaaagtgcagaattaagaaagggaatgcagcagggtaaggacctctaaattttaaaaaggctaattttaggaggttctaagaaatacaagttgtcagctgaggaaatcctggccacccttgagtatcttcttcaggagagcaaggtgagtctacctcacactgtgtgagtgcttaggtctgaagtcactcagtcgcatgcctctcttgcccacagccattacgaagtgacggagcttccttctctgaagttacatccttctcccacttggtcttcccctcccctcctcccccagcggttttattcagtggatggattgtgaatattgcagccagctgactccctgtgtgtccagtaggccttctgcaataaggatgcagaggagggagtagccaggaggtgaaaatagcattgaaaatcagtggagaagcccttgtctcctcagcaaccagtaccccaaagggcactgaccagggccacagcaaggaactctgttttggggaaggagttgcacactggctttaaaataagacaaaggaaagggggaaatgttgtgattaaaactctgttctcttggctagaggatgaatcatgtaactcttgtctgagtgcagccaatggttgcccaactgagtcagccctgcctggccctccgttcttgggtggggcttgcctgggcagggctgtctgcagcactgctagctgccaaaactgaagttcttcagggacttcaatctggcatttccaccctcacgtagccactctgcaagctctattcctggacagatgtgggcttcctgcatcctggttagacacattttgacaggagggccttggggctggggctgaggggctgcagtgtcctctctatccccaataacgtactcttgcacctgaaacattcaatttcatttaattgtttacttgtctgcctgagatttaagcttctcttgattaagaactacaaattattctgcttttattcatggagcactatataactgttatgtgcataaatgaaccacacaatcccttgggcagtagctgaggtgcaggtgtgattacccaggactaggctgaaagccttgtagctcagagctcaggaggacgatgtgagagctgggaagggccaggaaaggggccccaaaagtgttcaactatgaacggaacagtagatagagtacacaggagtgcacattccatacgcaaaaggaaaaatatgtgtcctgctaaacaggtctagtcagaatgacatgactgtgctccttctcttctaacacttgctattttctcgtgtttcattcatcccatcttctactttttgcttttctagtgctgctatctcactgctgagctccacaggataataacagccttgctgtccactcaccttttattgaagtattctaatctgatgcctatacatgccctctacatgtttgtctgagcaacaggtcttaagaagggaggcggagacatctttctctgcatagttttctctatggaaaacaattctggactccacaaatttagttaccttaggaggaattcaattttccatttttggttctccctccctgagcacctactttgaatgtcccagacatggtgttaggcatgagggtgttcacacacacatacacacatgcacacacacacaaagctctccatggtgcttgcctttgaggagttcaccagctaatggaatactattaaagcatttggcctgaattctagttatttgtgtttctgtttctttcctcactaggttgcaggttttttgagcagggtcccaatagccagtgccccagccctcatagagcctgctcgatgaattgttaagaaattgataatgatgtattttggttgtcctgcgagtagcagacaagcaggagtcctcctcagaaaagtgtctgctcctgaaaaatctcaaatgtttgctttggacctatgcccagatcccggctgcagtttcaaagaggacacttctgcagagtgagtcggacttgctttgctcctctgtgtcttgtccataccctagttttcttacagcccacccagaaaataaacggcagggtgtcagtaaaaacaaacatctgttatttaaaatatgtttgaggtttccttccttttgctttagaaattttggagtttttaaaattgaacccagaaggcattcttaaatttgatctctgaagggaattcagaaaaaatgagttgaagcaatggatctggatccaggctgtctctctcacctctcaccaactaaaacttgcccactaaagaactgggcagcaaaggaacgtttcagatgcaattcaataggaagaaagaacttggaagaaacctccttcaatctaaccaactacatcaatttttccttaaagaatgcttaggcatcagcctaatcagccaacatagctactgtcaaaactgcttttagttaaatcctttggtaggatgggtggtatttatttagtaaagggatagaaagtgctgaaaattgtttaaaagaagtacattctttctttttgcttttgatgtggattcctaaatttgttgagtccccagaaaaatgagaaacttaagatgttaaaattttagtccagctttctcagcactttgagtgctaatttatacattataatcctgaaagaattccattgtttctctcaactttacgctttaaaagactggactgtgtccaagggtataccaagtgggttgtgctctacaaaagtcacattttttgaactgtcagtagaaagcagggaggcacacagtctcagctccaccctgacctcactggagtggctgcttaggaggctggccagcacacgggaggaaaggggcctatatgatgtgtcggagaaaagctaggaagagcatcacccagaaagcagggtaagacccaaaaattgcttcatgcccagtagaccaaaaaaattgtaagaacctagataagaaactccaaatggtggatcaagggccacagtgaagaaactatcctctggctgtgaaggaacaaatacaccatttggaagggatgattaaagagaaactggataggaatctgtgggggcagggccgatgaagaaacttccaataagttatatgaactcattcccactccaacccctggcattatcttttgcaatttgctgaaacatgttggaggcaaagatcaccgactgggtgtttccatgagcctggcctcacctaaaacgcacaacataaaactccattcctggagactgaaactcaagcttctggggaaaaatatccgcaacaactgcaaacctcttagcgggaaaagctacctcccaagtaaggctgaggcaggctgccaggcgcatactggccgataacgaaaagcggtctcgccaaggccctgcagatctaattactgccctcaccggcagttcagtcgagaaacctctcctgcagactggcagccagaccaggtgtgactcacttcctcttggaaaatgccctctgagatggcacagttctccttttccttcagggagtgttctgtccaaaccatccaccgagagtatctgcaaccggccacacccacatggtctcacagctgagtcacaggcctcagaccactgggagaatcctggagccctttgtgctaaccacgccctgcagaagctcccgcagagacggaactgggtgggggcagaaaacggggtgggcttaatgcatcccagaatctggcttagggctcccctgtgctggcctggcttggagcgctctgcattccaccccagccaacaaggcagagctcctggtttcacttaggcagagctggactgaggctggacaggcagcagtgtccacggctaggggcagcgccattccttcggccaaagcacaggtggtgaaccaagtaccaaaggcacgtctgtctgtttcactgcaccgggccaaattaatctatgattggaagatccttcatcaagcctgctcttcctccatctctttctggttccacttattaagacagcaagggaaccctttcagtagagaaaccacgtcacacagggccctctcccacaaaccccagccaaactgctgtagaaagaaaacaagtggacctccctccctcagcaggaagaccctttccgtcgagcagacaacaggaagccccgaccagaaacgcctgtttggccgacggactaagggttacggaagggacgccccagctgcctactcgtcctacccgcgcctacttgggcggtacagccgggagcaggctacgaacatgcagacccggcctgcgagcggaacccaccaagaaacacgccagccagggcaggggcgtgtaggagggattcggtaacccgagagacgagtgggaaagtaggaaaggtgggagtaaagcaacgcaaacataaagggaggagggaagaggttcaggcgcaccaataccacggtcccctcctaaagaacaagtgccccctcctctggtccgcgtgggtctgggggcggccgcgcccgggccggggaggggcgctgctggcctcgtttgggtgtggcccggagcactgagcagcggattccccaccagccgctccccgcccagccccgcggtgctccggacgccccgcgaagccgggtgcagggttttccccgggcagcaggtccgggcctggggactacccaggaggggcgcgtgggccgggcggagctcaccttggccgaggcgcggcggacgctgggcgagctgggcgagctggacgcggggcggagaggcgagcgcggcgggctgtgcgccttccttagtacgtgcggcgggtgggtagagggaggcggcgcgggagcgggaggagcctggcgggcgctcggcagggcgctcccccagccctgtctcctccccctcttcctgcccccgactcccccgaccccgggcgcgcggcccacgccctgccctcgctcccggacccgcctcgcagaggcctcgcccgccccagacagagcgttcttgtaaacttctcttcagtagaaacggtcctgctctcgaatatttcagggcatccccaccctgagcctgcccttcctctcgggtttggttttagaaagtgtacaaatcaaagaacccggccgtcctgcgggtggggcacgctggcgcagaaccagaggtaaccggctctgcggccacctacgggtctaggaattacttgctggatgaccctgcagggagtggcacgtggagtcctatcgacctcagaggcactatcagattagccctaggaggtccgtctgggggtctcggcggcctgcgccagtggaggggcggcacctccccagaagccgggcttcccgccccaccggcccgcgaggtgccgcagggagggtgcggtttggcttgtcagcacccaggggcgtcacaaaccctttgttgaacaggggatttacccctttgtgtggcgtcacttgatcaatagttcagtttcagtgtggctaatagtgttaaaaactggccgggcgcggtggctcacgcctgtaatcccaacactttgggaggccgaggcgggcggatcacctcaggtcaggagttcaacaccagcttagccaacatggtgaaaccttgtctctactgatacaaaaattagccgggagtggtgatgcgcgcctgtaatcccaggagactgaggcatgagaatcgcttgaacctgggagacagaggttgcagtgagccgagatcgcaccactgcactccagcctgggtgacagagtgagactctgtctcaaaaaaaaaaaaaaaaaagaaaaaagaaaaaaagaaaagaaaaaggttaaaaactaagtttccaaggcagtatgctgtggtccttgaaaagtcctttagaagaattttctggaataaatttagagaaaacctaagtgtttcctaggggatgcttaccaactcctcgcccctcccccgcccgccctcttttattttaattgtgactcagggttaaatacaaactactagcagctgttggtggaaaagagcccaatcccaaactctggggttttcctttgttcccaagggaggccttgggaggaatgaatgatcctaaaggaatgagcagacctggggaatcctccaagtgccacctctgactaatattggctgttgccaggaaaacccaacttggatttcagctattactttccgtgcaaccctggtgctgactattcaaggggacagctcttcaagatcttcctgtatacagtacttcccagtccccaggtcacagtcaccagtggaggaaatctcggatcccttttgttgcagggattgcaatgcgactgggtttagaatgggaatgcctgggtttgcgtacccctactcatctgatttcttcatctggtccacagaccttaggagtgctttagtgtatgtggtaggcctgggaattcagggattag

SEQ ID NO: 34869 - DNA, 2105 bp, Homo sapiens
ctgcagggtttctaaaacattgtgctgagtactgggaatacagtgatgaaaatggtcagcacaccttgctcttcctggcctcatgtggtttcttaatgactctgtgtactagcaggtccataaagcttcaagtatcagccatgcttatagtctctctaggaaaaggggtcccaggcagttctttctccaggaagtagttataccttgtcaactacatgcattcagtgaagccagctctgcttccctagagaaaactgatggcatcagggaccagtgcctaagcctgagctgcccagcaaggatagtgtcttagcaggagggtagccaactgaatggccactggaggaatgagagcagaggccccatccatgtggtctctgaaatgatgagaaagcaatgttcaaatcttctaccagggctgaagtaggttccaatgtacaaaatgttgggagctggagagattgatccactagtgaggcagtattgggaattttaccacttctccatgtggcacagccacaaaatcctattaccctcaacttttttgggtttgtggctgtggcacagaaggtgggctatctaccagaaatgtgtgttcctcttttcattgtgtagagttttggccgctcagctagggattatatttctaccacctcatacccctaggtaggactatgtgactagccaccaacacaatgggactggaagtgatatgtgtcacttgcaggccaaggcagtaaagaggtgactttcccatattctttctctccacctgacaggactccaaggctctaaggatggaagagtcataattggaaagagcctgggtacctgaatcactgtatggaggaaaatcacttgctgagcaggaacatcctcattggactagctatgtgggtgagaaagaaccttggaatttgaatgtttatttgctacagcataaccttaacaaagtgctggtattgagtgctagtatttttggctgcacatttgaaaggattaatttgcatgtgtagtaattacactattatactgatgacacctcagcatagtgtcattgtttgagcagaactacttactgccctggtcactcttttagatacttatgaagcaaagttcacacaggtcttagcaaatgcatagtgtcattgtttcttgatgtgtatcaagctgtgccctgtaccacatggaaacctgtgaaaacccagctcaacattctgtctgcccagacaccatgtcaacagcatgaatcatagttgtataaactttacctaccaattgcaataccttgggaaggagtcttagcacttcttcctgcctcctcagttgagaatcactgatttacagtgatctggtcaagactttttgctggcaatccaaaaaggaagacaaaccaaccaacccaggtatggctgtattagtagcccctaaatagggaaatcctataatttgttaaacatttcccatatttttttgaacatttcggttgtttctaattttttactgtcaaagctaactatatatcagagactacttttgaataaatatatctgccctcatgtttgtttccttatgatatgtttctatcaggacctatcttttttcacttatttatgtggattttaagggacaagtaggaataagccccattgtgtgggggcagacaggagggaaaggcatgtgcctgatggagttgtgaggtactatgtctgtgccaggaactacctgctgttctgcatgaggagagtgcagcgtcctttagagtcttggatggggatgagtcttgagagaaggtgtctttcctggggtgcctgagatattctgctaaggagtttcctaaggtaataagagccgctaaagaatgtgaaaaagggcattattagctgcatggctctgggcaattcatttcaccactatgaacctgggtctccacctatcttctgggatgatggaaaagactgaaccatctaatgaacttgaagccatccagctcagcaagcagcaggttctggaaggcagatccccacctcctctgtgtgatctcccactctgtggaggggcagttgtcaggaagccaaacagggctcttctgtcacccagggttt

SEQ ID NO: 34870 - DNA, 761 bp, Homo sapiens
cagtgtttggcactcggggagaactctgcaagacatgacctgcctatcatggactgtggtctgccagactgatagggtgcatttctcctctcttcattaaaacttgagagcaagtggtgttccaggcaaacatttggatgctgtgtcaaagggaaacagttactgaagccacagatactctttgttcattgatgatactggaatgtggctggggagagctcagacccacagaaattggactctgtggggccccagtgactcaaaccccttgtgaaatgctggctgcttggtatgaactgacgcctcaacaatgttagcagcagctagctctggggtttctgggcagtcctattggctgaaagctggggaggctgccataaggctttctggaaatatttaaaatggacaatttactgggaaagggtgtgttcttgctttgtagctaatgctgtgggaccctctggtggccacagtgggaatagcttgacagtggggtttactttctcttgagtggcccaggcaggaaatccttggctggaaaccagaggattgaatatggggctggaaagattacctagttggcttgagatggaggctgtgatttaggttgacatcctaccccattttctcttgcttttggcagcatttctctgggcttgagcagtgagaaaagtaatgctctgtgtacaagacgccaaaaaaaaatatatatatatatatatatataggtgaaaataggttgttaagttgaactagtgtct

SEQ ID NO: 34871 - DNA, 1438 bp, Homo sapiens
gctttctgtccctgctgtagcaggactgcaaccccagacagtatggaagggaatgggcgtggctctgttccaatacttcatttatggacgctgaagtttgatttccacataattttcacatgtcagaaagtatttttcttcttttgatttctttcaatcatttacaaatgtaaactttattcttagcttgtgggcagaacagaaaacccgacttggcccgcgggccagtttgctgactctccactaaggagaggtaaagaaagagattttggaggtggaattatggaaaatatgagttcaactgggagatgaaaggagataagaagagaaaaataagttacggagtgagtgcctaaatagatggtggggtaaaaggaagaggaaggaggagagggctcagctgggaccgggttcctcccacattcttggccgcggcgctgcgggcggcgacgggctaaagtttcagtcccgttgggtcttggccgtctgccgggtgcttactgaaactttgattttccctggggctagacgaccaagttctaaaatgtcccttttctggtgtacagaaataactagtgacccctcgcagctttccagccccctgccttaaacttgctcctaggcgtctctgggctcccgggagaccgcgggcgaggggctggaggcagtgacccacgacgggtcccccccccgcgcggtgagcggccagcacttcctcttccccagccctgggccttgtcgtgactgggaaggctaaagaacctccgctgctaccctaggcggccaccccaaggatgattttagggcttcatccttccatcccttcttccccagttccctcccacgaggctgatttttcctgctgtttcctgccacgtccacacataagtcaaagataaagtctgctgggaagtatgtgggttttttttcttttctttttcttttcatgtaagaagaagaagaagaaaagtgaggcttaccatgttggagctgagcgaggcgcgggaggctgtggctgggagcggcgctgagagctctgtgcgcgcggcgtgcgggtctggagcctctcctcaacccacgcccttcccggcccagccttgcccaagccttactcagacagcttccgcgcctgccccgcccctccccgcctcccgggctgggcctgggaccgcggccggcgctaaccacagaactgagctttaagactcaaataaacccaccgtcctctccagcgatttaagcagtctcactctccctcctttccctcttttccctcctctttccccccggccccctccaccccgtcctgtgattcctgaagatttttgactttttagaattataagttttgcacagtagtcttcgggaagtctgtccatgtccgtgggtctttcccatgtatgagctcattctgggcatttaggttagataggcaaaa

SEQ ID NO: 34872 - DNA, 2059 bp, Homo sapiens
tctcactctctcacctaggctggagtgcagtggcacgatctcgggtcactgcaacctctgcctcctaggctcaagtgatcctcccatctcagcctacgagtagctgagaccataggtgtgtgccacaatacctggctaattttttgtatttttagtagagacagggtttccccatgttgtccaggctggtctcaaattcctgagctcaagtgatccgcccgcctcagcctcttaaagtgctgggattacaggtgtgagccactgcacccagccaaatagtgggttcttgatgaaagacaattagatggcatcattttttccctaatcaatgatccagaaatcctgtgtatgtctgggcatatctgaggaaaaacccctgaaagtaggcagaatcaatggtgtccagattatgaacattgaaaatgttgacagctatcgcgaaattgcccctcaagggttagtaatttttgatagggaaagccagttacctcccaagtttgtgagtcagcaagagacacaaaacatcaaagccagggcattgaatgttgtggcaagaggcggttctggagctgttggctttggaggggtctctgttctggggctggctccttgtgcctcatttcccagctgagcccatggaactctctcgctccaatccgagtctctggggcctggtaaaattcccctctgtgtttagtcacctcttgattgggagccaaagcagaaaaccagtcagccccacgagcaggaattacctgtttctcatcaactccacttgccagaacggtctgtgactttccagttacttttcagggcctctccttgtgttttggtgggtgtgtctagaggaagagaggaaagcaaatgcccttctagagcaagttgccttttaaacggcaaacttgaaacaaataaagcaggttgaagatcacagtgtgtgctgctgggcctgtgggggcgctgggcagcagaaaggcacactctgcctgcagcctcgggatctggtcgcctgtgtgggagtagggaggagtcctgacgtaccctctctaagactggctgctctgcacctccctccaagccaggctggccagtaaagaaatctagctgtggacaggaaacgagtggtttttgtgatctgagcagaaagggcgttttaggcctggagcagagtggaggccctgagccacggcccaggaagtgactcacccaccctgatgtctgagttgctgcttcctttatcttgcaggagggcgtggcggtgggtccctgggctgtgcctgtgactggagtggctagaggctgctggctcctgggtctcagtcagggtccagccccggtctcagtcctgctacctcagcagccagaactctgatttagagatatgaacaccgcctgttacagatatttgggggagatagaaatgccagaaaacccagtcccaggagctgctagagggaaatactgttgtggtgcctcattccctccacccaccttcattgccccacaatgcccgagggtggcagttctggtgacttcaccagctggtggcagggggagggaggagctggctggagttgccatggagcggcagagcctggtgggcagggtggggcagtgcctcacaaaggccaccgaattcttaatctctttcaggtttactcaactaataagtaacttgtagagttacaggaatcatgtgaggccttaaccctcagaataccaggaaaaataatcaccttttaccatttaggtccaatggacgcttttaattatctatctgtatctgtctatttatctatcatctatcttttgattcatcttgtaaataacttgtagaagtaagaatagtaaaaaaaaaaacaaaaaaaaaactgtattagaaataataggctgggtgtggtggctcacgcctgtaatcccagaaatttgggatgctgaagtgggtatatcacttgaggtcaggagttcaagaccagcctggccaacatggtgaaatcccagctctactaaaaatacaaaaattaggtaggcatggtggtacacgtctgtaatcccagct

SEQ ID NO: 34873 - DNA, 1926 bp, Homo sapiens
cccggcctaatatttttgaaccaatgttaactactcacttaagaatttagccttacactaatatttgagataaccggtttgttgggctggttttagtattttctaacacaaataagaataaatactcaaacattcttaaaaagtgcatgtagcacttaagactatcttggtactccatttgggaaaccatgtagccaaggctgttggggcgaaccaaggtggtgggagtccgacgggccagcagggggcgcacttgcaggtcacctgaagtccttatttacgggataaggtggaggctgaggaaagtctttcagaggccggacgctggcactggacggagtagggaaccctagccgttatcccaccaaagggtcccagcgcctagaggggctgcggaaagctcctacaatacgaggagcccttggagcccagagcgggatcctgcgagccgaggccccgttctctgttaggatcacggggactgccccaggcagctgctgggcccggtcgcggacctcggccagaacatcctcccagaacacagaggaatctgacatcagtggcctcccttggtagaggtggggagccgaggggcggcagtgtggaagggccatcggcctaggtctttcgtatcccctccggcctctcggggctgtgcgttcggaaacagcgaaaggaacggcctcaggaatctggcctcagccggagcactggtgaacacaggctcccgtcgcgccaagggaagtaggaaaagctgcttccgggcggaggggctgcacttccggggcccgcgtcccccggcggcttcgccgagaaggggctttgggagcttaagggcgccggcacgcgttcccctggcgcagagctcgctagccggggcgcgggctgcctccttgttctggtgtgatccgaatgtaacggagcggactttgggatccagaaccccggactgaggttgtgcttggcttgaggggcgggctggtaggtcagcccccttggggcgtcgttggtcctctccaggcgtgtcacattctgcccgcacatggtgccttggtactccccaaaagtcatgccttgatttttcttactaataatagtttacactgttttaccgcttcactgcttcacgtaagtaaagtaattatttcaaaaggaaatgttggtcatttataaaatggtggtaaagatggtacagcggattaatgtgaggattaaatgagatgatacatgaaagtgcttaaaacagtacagggtacttaccgttattattgttaagtagaaagtgagttctgggaaacagtgggtgtatggtccttcacagcaggttttggaaacgtctgatttccagcctaccctccttcctcctgttgccgtctgttgcctgattgttctcactggctgaaaggagataatccctgccactccattcatcactgaaaattcttgtcagtttggttgcttaggtacctactaagagttgccagcaggtggccccagagcacgcggttatgtttgtctttttgggtcccatgtttaattagtaatttagtagggacgtattgaatacttattccacactatggtacactgtaccaggggatatagggatgcctgagggtgtgggaggccgaccctggtctcagggagaatataaatgatttattattctggtctttcacaagattttggcctttttaaagatcgattcatgtattcattcaacaaatatttattggatgtttactctgttccagtttccactcagagatgtgaagtatatcaatgaatagaatagacaaagatctttgccttcatagagatcacattctagcacacaacaataaagataataaattatgtaaaatgttagaagtgttatgaaaaagaaaaaatgtagaccagtgtttgtgtgtgtgggtagggttg

SEQ ID NO: 34874 - DNA, 1580 bp, Homo sapiens
agaacaatatcctctgcatggtgtctgctgggttcagaaggaagagataatcatggtaataataatagtaacactagttaccatttatttggcactatatttcaggcacaagtcaaggcactttacctatattatctcacttaatcctcacagtaatctaaaaatatagacattcacttccccactttttatacgtgagcacatgggtttagacagttccagtggtttggctgaaatcacagagctagtgaatgtccccttgagtgagggagatgagattgaaactggaacctgtgtgactccaaagtcatgccctcacactcaaagagtcatgctctactgtcttagaaatcaccaccacacagggaagagacactcgggtctctggacacacccaggctctcagaaaattgcagctcggcttcttggctgctgctcccttggtgacccaatgagtggggagctctgtcatggcatccacccagcagctggcggctgagggtgtctgctcaaaggtgaggtcggaaatgctctactgattcatccaggatgtttgaccttgcggccaaatgaccccttgccagggaggctctggagggcagtcctgctctgcctgggagtggcccttccttccatgtctgagattctgtgatttccagtgggaggtgatttgtggaagctgtttacaaacagatgatatcacccgtggacctgcctccccacactagtaatgtgtgctgaaacagcaagccctgggacttggtgggcagtgggtgggaaggaagaactgcctgactcagaacagacacactacgcagctaatctgagggtgagggctcaacctggagcaggaagctgaggcctgagctctgggaaagagaggtggtgactcacggagagatattagagtccaaataggagcacatgccctgtacaccaggcatttgggtctcatgtcaaatggctggccctgatggtggtggtacctccaggcccacatgctgctgaaacccagcaggtcagcacacatggactttgatgagagacatttgagtattttaagaatagtttcattttagaaatctagcaagcgactttggaaggtctagagctctctgctcatggtccttcaggcttttctgatttccagcagtaggtaaagctgtatgtgtggcccaggcactctctgtgaggtgatggtggtggatgctgagcctgtgggaaatttggcaaagtgaagtcctactcagaggttgtcacctggtacacgtgacaggcagaatcaggtttcgtattatctctggaataaatggacattattgttaaatatattttattcatgatggctccaatttcagcttaaattatattattatactggtaataataacaactgatacttatgtagcatttagtgtttatgaggcgtttccacatatattatctctttcataattctgtaacataagtattaccatctctgtttaacagatcagggagggactcctacagtttaaacaacccacctgaggttatccagctgatacgtgtggtctctgtctggaccaggccttctaatg

SEQ ID NO: 34875 - DNA, 612 bp, Homo sapiens
ctaacttccaggagcaatcagagcaacatttctcaaacaaaactcagatcaagtcactacaagctcagatctctccacagcccccataccctgggggagtggtccctgcttggctttgggaagtccctgctcttcatccaccctgctgtagtcatacagtccttgctgaacacaccaagacctgcctgtcttagggcctttgcacttgctcttcctctgcctttgtcctcagacctttgtgtgaccatatcccatcattcaggccctgcttctgtgtctttgtttcacagagtccttgttgaccatcctagttaaacattaccacatcgtagtttcttcatagccctcattactcatctgaaattacgttatttagttttttgttacttgatcgtgtatgtgcttatcatctgtttttcccccaccaggatgtaagctctgggagaaaaaagaccatgtgggttttataacatgtaccttgtgttctctgtgcctagaaagtgctcaatatgacgtagttccatttgtctattttcacttttgttgcttgtgtttttggtgtcatatccaaaaaataatttcaaagaccaatgtcatgaagctttccccttt

SEQ ID NO: 34876 - DNA, 535 bp, Homo sapiens
ccgagagggtcaggcccccataggtcctcagcctgcttcaacctcaaaggggatggggggctgagtggtgccagaggagcagcaggctcgctcggggagagtagggccttaggatagaagggaaatgaactaaacaaccagcttcctcccaaaccagtttcaggccagggctgggaatttcacaaaaaagcagaaggcgctctgtgaacatttcctgccccgccccagcccccttcctggcagcattaccacactgctcacctgtgaagcaatcttccggagacagggccaaagggccaagtgccccagtcaggagctgcctataaatgccgagcctgcacagctctggcaaacactctgtgtggctcctcggctttggtaagtgagctgccagcttccccaggcagaagcctgcctgccgattccttctttccttccctgacccaacttccttccaaatcctcctcctagaagccctccttggttggccctgcctactttaaagcttctttcacattttcttaggtcatgttcc

SEQ ID NO: 34877 - DNA, 435 bp, Homo sapiens
ctccaggcctacctggtcctggagctggacagggcccatccaagagtcccaccctgagggcgggagccgccacctgttgtcaagtctgaaaagccaccatctgggcttccttcccagggattgattcatccttacgtctgtcctggcagccttcgcagattacaaaaccctctttatcccatttagtttttatgacagcagtcagaatggtgacttcatctgagccccagccaacctcacggtgtaatatgaatccctcctaatgacgaaacgagacattatcccttttgctttgatttttcactgttgctgctgctgctgttaggccctgcacctggcaaaagtaagtgcaatactcatctggaagtgagtgattgaaaactctagacaaaaactctgcaagcaaaccaaagaggttaatttgtctgaagacac

SEQ ID NO: 34878 - DNA, 1755 bp, Homo sapiens
gatctcgtgagacttattcactatcatgagaatagcatgggaaagaccggcccccacgattcaattacctccccctgggtccctcccacaacacatgggaattctgggagatacaattcaagttgagatttgggtgggtgcacagtcaaaccatatcacatggtctctaaactgtctttaggaaaccatatcacctggatccaacctctgggttccaaattcaatttcttctcagctacaaaatccttcttgctacatcacccctgtacgcacagccacatggcacccaggtccacatgggcagtgagccaccacctctcatctgcttcctctgtcacaggactacaaggggctgagcaaggtaggcatggtcagggtgccaggcatcaagggacagggctatcggatcagccgggcctgtgctgtgacaggtaggagtgaggcagtatgattgggagcaccaccagcaccactaaaaatggggagagaaagttccgctaggaatggggttatcagaaatgggaagagacggtggtcagacctgtgtgggtgaaaatgaatgcaggaatgacaccaaagaccggctagcttccacagccctttgcaggatgctctgaacttgctgagccctttcacacccgccacctggtccctgttgacccaccagctgtatgcagctgactatcttcaccagctccttgaacaagaatttccatttccaaggccagggtgggggaggctgcaacattttttgccagagaatccaaagagcacatgagtcagctgcctgggtcaaggcccagatccctgtggcgggtcagccagagagcaggagctggccctgaagaggggaagggggaagaaagaaacccagagggctcagagagcacaggaccctgcccacgtgggccactctgcagaggccaggcccaaggctgagttgggcctcccacacagacatggaatgagaaggctgtcagtgcaggacagggtgaggacacactcagcgggcacggctttctcccctaacagccactccacccaggggccagaaactgacttcacctctgcactgaattcctccccccatgtctccctcctcccacccatcttcctcctggtgcttccagcagagccaagaaggcttcgccccacctactcccctcctgctgacacggaccccccacacacacacccaaggaacaggaataccaaaaatgatactaccagagtgaagcgtgtcctgcagacattatctctttaatcctaactataatagtccctatttcagagatgaggcaaatgtgagagaacaagtaactttcccaagaacacacaaccaagaaaaaagaaagccaagattcaagtgcaagtctgcctgggggtctggagccggctcccctgctgccccctgccatccctcccttccactcccacagccccattttccacccagaagccctcctggaagcaaccctcacccccgggccccgttattctaagtccagttgttcacaattcattctacaagccctcatgtaatggaatgctaaaatagaactttgtcaccagctccttttttatgttggtctcaaagctggggacaaagggcattaagtttctatatattcttaagagaggcttttgaccatctatggagaaatttctaggtgggaggtgaaccaaaaacacagttcagtgactttatctacccctcacctcaaggaagggaaaggctggggactgctcagagag

SEQ ID NO: 34879 - DNA, 2916 bp, Homo sapiens
ctcttcccttctgcctgaaaacactaatccagatgatggacaatgattcaattagtcatcttctctgatgggggctgagatccaggctgggatcccgtggaagtgccgggtgagtcattacgctgaggctgcagggataccccgccccattactgaacaccccgtggttcacgtgttggtgcagctgccagctcctcagaccaccgttccaacaaaaagccctcaccctgaatgcagggacacactccaagagtgtgcctcccccactccacctgggacctgggcagccgcagtagactcagtcacacagcgtcctcactggtgtaggaaactccctgagccaagcctcaggcatctcagatgtgccctatctaacccctgcgctgtgatgagaaaggggacttgccccaccccagggcccctcttgccacacccagagcaaaacacatctgggagcctctgggactatctctgcctcacttccaggcccccaaaccccatcacatcccggcccagggaccatttccatctccaagctcatcccaggactctctctactggaaaccacttgagcctttccttaggatggcgttgccaagaggggcatctctcctcattcacataaaggcaccttatgtgctagaggcagccttgtcagggtgggtcctctggcctggcgagtcaatgagtcattttcagaggttgaccgtgagcaaatcttccaatggctggtgtcccactaagccaaggaggaacagaaatcattcggaagccaggacgcaagggtaaatttgaccaaaaaaaatttattgtacaattacccaccactggatttgactcagagaggacccccagagggtgtctccatcttccctatttattttcagcccttgagggcttcattgtagatcaaagccaaggcccccaggaaggtgacatactcctggaagttcacctcctggtccttgttccggtccaagtcttccatcagccttgcaatttcagcatcctgcagcttctaatgtgttagaatgtgaaatccatactcagtggtgatgacaaccctggattcttccccttccccctcccaggcaatcctctctgcaagtggctctgtgctccctcatcaccaaggacccatgtcactttggcattgcttctcctcagctacttctcagttactggtcctcatttggagagatggatatccggctggaagcatcccctacccgctgggagagtgggtctacagctcagggtctacatgtggaccagggcctcagaatgtgggtaaatgtgagtcagatgcacctggcacctctctctcccctaatcctgcttccaaaggacaagggtgggaaaaggggtcctggggaggaggccactcaccgagccaatggtgagctccttctggatcagctccttcagctccttcttgctcagggtgtgcttgtcaccctccctgccggagtacttgtggaagatggccacgaggaggccaatggcctgatccagggggcatgccatggctgagggctgggcttggagctggcagcagagggcctagtcagtgccatgggagcaaggacttctcacccacacaccccaataatgctgcctgcactagccccgcctcctttggaaccacccagtctcaggccacacacaatggcatcaggagacagcccagggcttgaaggggaaggagagagcacactagggccaaggcaagagaggtggcttaaggattctaagaagcatataggaacagtagctttgggcacagctgagaactgtccttcaggggatccagaagttgaggagtatggctgggcaggggaggggaatggaggctgcaaaggcagcttaaacacagcttcacagggccacacatggtggcaatgacacacccagggcactcccttccgcaccccaaaagagcacaccccattgcgatcccttagcccaaggcctgcctggcacagcactgctgctcctgactatccctccagcgggggagcgccacagatggccccagtctggatccagcggctgaactgggcaggggatggctggacccccagcgtgagggcagctggccctggaaagtacccagggctcctggagagaactcaccggtagggaggcggccaaatgcgacgcgagcggtcgaggggatgggctgtgtcgcagtccgactggccttatagcggtcggtgccccggaggccagctcggccaagcccaccccgcccgcccaagtcccgcccgcgccccaccctgcgccgtggcttacacaacgcacattcgcggtttaccccctcgactttccacgcctcctgcccggggctgttccgggttaggacgggatgggggagcccagcagtgcccactgcacgcctggtgacgagtctcccctcatctgcgcagctcagtttgctcagtttgctcttcgtgacacgtgactcggcaaggggagcaggaggaggactgcggcggtcacccctgcttcctctgccagaccgtgaatgtgaccctcgagccagcgcagcgtcaatgtgggcaaggagggcgcctcacaggatgccggtgtcccacagaggatactcagggtcaccccagaggagatagggggagtagccagtggtgtaaaggatatctacggcgcccatcccccaccagcaacaagttcctaccaacacctccactccttcccctcagtgccccaaattccattcactacagcacctttggtgttaatgtgcatgcacgtgggagcccagccctgtaagcaccattcgttatttacgggggagtgaaggccttttcagaccctcccctgagaaaagattttgatggaggaggcagggagagaagaaagcactgtcccccatagatgatgagagtggtgctattg

SEQ ID NO: 34880 - DNA, 773 bp, Homo sapiens
ccagctgtgcaaccttggtgagccatttgtctctctgggtctcaggggcggggcctgatctgtaagttggggttcatctcacctcgctggcccagtcaggaacctgaaccagatggtctcttgagagttgaccagttcgggtgtttaccaatctgagactggcctcccctgaggttaccctcccgacccctgggggttttgagcagggaggttctgtatagggatactctgttctattggaggggaagcccttcctggaattgctcacctccccccacttccactgtccccttccaccgcccttctgggatgatgcctccagcctgggaaaacccgaaggcagccaggaaggcaagagttttttccatgctagcccagtgactcactcctgattcccccacgggacaagagtcctgcagcacagggcggccagggccaagactctccctgaagatttgcccactgctgggccccctgctgggagcaaatggctggcatggttgtggctggcaggaaagtaggggaaggggagtggggagtgccaagcactgccaggatttaattcattgtaaacaccccaggattagagcaaggtgtccaggttcccaggagaggaaagggccatgatcctcagaaatgaggagactcagaggtgaagcaaggaggcaaggagcaggtgaggggcctgatcaaggggaagaccagagccttgagcccagtgctcccaccccaaggcagaccttagctctacacacctccctgcccaaacttcc

SEQ ID NO: 34881 - DNA, 4469 bp, Homo sapiens
aggagatcgagaccatcctggctaacatggtgaaaccccatctctactaaaaatacaaaaaaattagccgggcatggtggtgggcgcctgcagtcccagctactcgggaggctgaggcaggagaatggcgtgaacctgggagggggagtttgcagtgagctgagatcacaccactgtactccagcctgggcgacagagcgagactccatctcaaaaaaaaaaaaaaaaaaaaaaaacccttcagtcaacacttcagcacttcacagagagttcttccaagggggaaggcccagagaggcccaggttgatcccaccagggaagctggaatgagagaactgtggagacaaagacagagacccacggggatcctccccaccctgccctcagcaggacagaggtactcaccagaccaggtggcagagacagacccaggaaggagagcaaggcagccaggctcccagggtgaggatttatatgtgggccccactggcccccaacttggcattttaaggaaaccaaacctgcctcaacctgatcccaccaaaccctggcctcttgccattcccactcattccctcccagccccctccctcccagagagtgccagctccaccaccagctgggggagggctctaggccaggtcaagggcagcccctgagcccacccaggccacagtgggaagtgggaggtgtcgtggggactgggcatcctggaccggggtgaggggaggcaacccctgctctggggcctggagactggtgccaggcctcattctcatgacatgcctgtgagtcacagcccactcctgtgtgagaggctgtgagcacacgctgagacttcatggtccagtgctcgtgtacatacatgcgcccgtgtgtgtgagagagaagcaacctggggccacccttaggaagctgggggccagaggaggcagctgggggacatcaggaggagaaggacaggactgacttcagggcatggatgaagtggagtgacttttaatggccagcaccagaatacctcttaatgaggtaatgaggtaactaagtgtgcttagaaatacctgggaaggtccctctgtgtaggaaggtgtctggaaggatggggaagcagtgagaaatggggttgctctacacacagccgcagttgggctgggccacagtctgtggggagcataaggaagtcccgagtagttaaaggctgaacaggaaaactttggcctcctcttctccagcttgagggctgggtgggtgggtaggggtacatccctacccaaggctgaaaacaccagctggacagcttcccaagccagaatccaggcctgaagcacagccctcagccacagccctctctcactgccccccacacacatgtcctccccagacccggagaaaggcaaacactgtggccattcagagcccagcccaagggagggctgccccctcccagggccccttcctccttggccctttgtctatcccggcccgtctgggcatcagggcaccgcccttcctgtggccccagctcccctccctgctccagctgtcgagtagcttcttcccctcccccagcccctctacctcagccctaagtgactcacccgaggttccaggcccagatgcccaggcagtgactcagcggcacaccctcctcccccagggccagggcagcagcagtcccagagcagtaggtggaagccccagcccagcctggcagggaaagcactggcacagagaccccaaacaggccctgccaggaggagctttggataatgacatggcaggaggatcagactgagaacaggctggtcccttcctagcggtcaccgtgtgacttgggggccagcctgagcagtgtacatgaagtcaggccttggggcccccagtgtcctcttctacaccttggcacagccaccgagtgtcccttgctcccctcagtacttgaacccctcatgctacttgtcttcccatcgaggcctacttcaagtagaactcggaataaaaacccttcacactgagggtgagggacaagggagcgcaatgcatcgattttcacagccattctttccttttaactaagggcctccacagggccttccctgctcagaaactgcagtgcatccccatggctgtcccttaaagccaggcggtatgttctcactcataagtgggagttgaacaatgagaacatatggacacagggaagggaacaccacataccagggcctgtgggcagttgcggggagaaggatgggggcaaggggagggagagcattaggactaatacctgatgcatgcggggcttaaaacctagatgatgggttgataggtgcagcaaaccaccatggcacatgtatacctatgtaacaaaccacattctgcacatgtatgccagaacttaaagtaaaaataaaataaaattaaattaaaattaaaaatttttaaaaagcctggcagtgaggcgctccagactcggcctgctgctgcgtgtcccttaaacacaccggcacatgcaactagtgtggccaagaccctcggcttgcgctgacccctctgttcagaacgtgcccacacatgcccatgccctctatcctgctgaaatccaacccccccttcaaaggccactgcagggagccttcccagggcccaaccggattcagtgtctacctgttctgtcctgtacaaagcgccccttttgcccttttcgtgtgtacttagagaattctgattttgactgaatcacctgtgtacttgttttctctcagcctcacccccacatggtgagctcaccggtcttactcatttctgcatgaggtaagggtctcgcccacaccaggtgccaaccagtgcttacggctaccacatggcaacaggggtcactggaggagtgcttaggagcaagggagtccttctcaccccgtgaaatcacaccactgactatgctacgaaataatcacctctcctctggatcccaagagtggaaccgagacaacgggtcggaaaagagcttcagagagctacaaatccctgaggagtgacagcaggaaactgcggctcccaggacccagtgagggagttgagcaaaccccccagcgggcagagacggagacaggcaggcagacgaagaagacaaagagtcagtcagatggaaaagccagggagaaaaacagagacagcagcagagccgcgggtcactagggtcagctcctgaaggcctgtccttaatcaggtgtctctgtctcaggaactgaggctgcgactgcgcccatcaaatggccatatacctgagactggtgataatcgtattcatttgccactaacttgctgcgtaaccttgggcaactccctcccccacggcagggcaggagagttgtacggaatggcccctagagtccgatcccaatcccactctcacattctccagctgtctacaaaggcagagtagtcaagacacaagcaggccctgcggacatccaaagcagtgactctgccccggcccagcctcaggaagctgggtcctcacattccgtccaccccatctccgggctccaggtgccagaaattttccaccagcggccccgcgggattttgcccagctgcttcgtgccctctggtggctaaggcgtgtcattgcagtgccggcctcctgtcatcctccctttcttgtccgccagaccctctggcgccctgcttacgactcaaacaggagacagtgctgattcatttccaagcggccttcctacacccacacctgcttcacatagatgaggtttcccggacagtccctgcccagaagcccaggtggatgtctgagacggcagccagatacctggaagccattttaaaagcctagggatatgggtactcgggagataggaggcggaaagaccacttgagcctaggagtttgaggctgcagtgagccatgatcgtgccactgcactccagcctggacgacagagcaagaccctgtctcaatcaatcaatcaatgcaagcctagagataagggcaggagaaaaccaggggacagaagtgagggattggccactgccaagttctgcccacccaccccctttccccaggccgttcaggggaaagagaaatggcctcattgtgggggccacaggtttagtttaagtcctgacattgcctctggcttactgtgtgactgtcgaccttggttgagtggtgccacgaacctgagcttaaacgttttcagcagaaggaccccctttattatgccccgccccacaaaataagttctgaggtattctgtcttagcaaaatgcattaaataatttatttcccctgttgtactaattggatccataagtgtctcccggcagcatgaccagcatgcgaggacccacgttatcacattgggttcaggtcatcctggatttgtcactcacaatgggcgtgtgcatatcctttgctggggggtgcagactgaaattttgaagcactc

SEQ ID NO: 34882 - DNA, 6655 bp, Homo sapiens
ggtccccagacagcattgagatctcacagaggggccccaagggcctgcgactccaggagctgagaccccccagggagggaggtacctctagactgagacactcacaaagggaccccagttcagcaagggtcagaggaaggtctggagggagaagagagtaaagggccctgggtgggcaggaggctgaggagggagcctggggagagcaccagggcggggcatcaggccagtgcctggaaggtgtggccaaaggggtctctagctgctgctctgctgctcctgctcatggatgagtttggcgatggggccggtgatgccgcctatcaaggtccagtactcatcgaagctgatgcgcccatcatgattggcatccaggttctggatgagcttatccgcagccttccggttccctgtgtcctggggaggaagcagggtcagcaatgctgatggtggaagccccagagagactccaggcaggaccctaggcagagacccaggatctggcctgcacagctgcttcccttgggaaatgcaaatatagccctcactggctaggcctaagcatcctgagaagacagaggcctgggggtgtagaagaccctggagttagcggggacactggaaggatagaggcctcagcagggaaagacaccctcagaggccagaggcttgcaggggagggaaggggagagggaggcaaggcccttgggtgagaggccttaccgacagcatgtggttcagctctttctggagcatctcgcggaagctgctcttgctgatcttgttcttgaccaggctgtacttagacacatatttgtagaagttttccaccaggacaatgactgccttctccagctccgtgtagcagtctgacatctccctgcttcgcctgctggcggggcctggacaccaggaggaggggagatgagaagagacacccacaggccatacctcctcctcctccacacccaccctaggccctgggtccctcctcctgccttgtttctggtccctggagaagaaggtggcaggaaaaggggaacagagtgggtgggggagagtgagccctggaatgagaactatgcggctcctctaatccaggtgctccccagctcaaccgcctcaacaggttctccaggccctgccccagccccaggcaccaggttccagccctagggagcaagatccctagtgtcagagccctacggggcaagaggctctcatgggaagagaagagtccacctgttctcccaccctgctccacagctggcccacctctcccggggccaagcatggctgggacagctgggatgagccatggaggttaggggcagaggctactgcctcccactcccaggactggctgagaccccagccccaggcaacaaagcagaaaggaagatgtaggccttccccaatcccttgccgggctccaggacagtgagtcccgggtctcagaacctggctgccccttatgggaaaggacaaggtccagatcaattggatcagattttgtgcagctctcccaacacaccccgccacaccctgctagcctctcctcccttattcccatccctaaatacacagcaggacccaagaacacccccacccacacatcgttacctaaggcgggggccaagcccagttacagcccagctggagtcggactctggacacagcagcagactgccagagggcacatgcgtcaccctctcaccccaggacaaaagacactttctaagcggatacagccttctgaataacaggatatgaggggagcaggcggatctggatctactctgtgagtcacggcccatgcccaaaacccccccacatcaaccccaggcaaatcagactcccttcccacccccaagcccaggaatgtgctccagtcaccctcacccggcgggtcctggtgaaaggagatggacaaaacagggtcacagccaccataggggcctgagcaagccacagtcagatttggaaggaaaggctgctcggtcaggccccaccacagcctcctgtcctgccacctgctttccgttggccacttgtggccattcctactcccatgccggctgccctgccctctccagccagcctgccaatcactctcgccccgcccaagccacgcctccgaaggaagcctgccttgacccctgcactgggtgccatcctccctgactcccacagacgtgtctgtcatcaccactcagctagcactggctggggcccactaactggtgaggccacggtgtctttctgggtcctgtcttgttccttgagacaagcatagtttttcttacacatggccaatgtattttctgaaccaagcggcgggactcagactttaggacagttttttcaatcctggatatacaccaccccctgcttttaatctctgcatctctccagcccacattgcctggtccagtgccttgctcaaggtacacgttctataaatattccacctccttccagccctgataacgggtattgcacgtccttgaccaccttttaagctttttctttcatgaagcctcttctgaaggaagggtgggaccaggagggaacaggccaggaagcaagaaggaaggagagttgagaggaagagtcaggctgcggcttctctgaagggaaatcctgcccttgtcttccctcctccgcctgcccaaaccctctggtccttggctgggaggatggagcagagtaccaggatggcaggaagccacacgcttttccatattcttttatttaagtgtgtaactgcgtggttccctgtctataccgctgcaagactttcatacaaacactttaacatttacagttgaagaggaagaccattgttcaacctgtggtctgtctgctgtgctgcccttgggttggaggtggctcaggttcatgaccagtgttccaggtgattctgaaaaccgtgcccatttctggaaggactgtgccaagtccactcccaaccaagacttggaagtgggaagataattcagagaaactccccacacttaaccatcccaatccttgttccctaaatgagggatcttgtgggaaacggtcagggagaggaagagggaaggaaatgggtggtgcacctccctctgccactctccccacaagctagcccacctctcccaccacctgcctccttggagtcatttctctgagctgtctcctcctggccttcctcaataccatgactcaacccctgcttggcctctggcagcagccaagtggccaagacacagatgagccccagagatgactctgccacctgctcccaggagtactgggagacccagagcgggagctccagtgcctcagggcttcagctcccagcccctcctcccaggaatccacccgctccccaccttcggtaaaatggacagtgctggagataaccatctgacaagtgcttttctggagctttttctgaaggaaggatagggtagcaggcaggcagggatcgttatcctcctctgcctccctcccctggaggccaggagacaggatctgccaccccacccaccccacaagccacctgctcctcccgcctgccccattcccccaccagccaggccccgggtctcctggttcaggggtcgggcagatgttctatcccatcagccgcttcctagaaaggtcaagcaggaggtcgttcctgcattggccctgccacaggtagatcctggcctgagtggacagtgtacacaggagccttccagaaatgtgggaatgggaggaccacgtgtcctccaatgggccctctcacctcaggcctccagccctaccccaatgttctcattgtcttccccttggctgattcatcattgagcaacaagcagtctcccacccccaccccacccacctcagcccagcttgctgacttctccaaaagcccaaattgccctgactccatgcccctggatcccagccactccagccccaccctcccacccccaggttctgggctccacgccctccaaatgcctcctaaccacccctagcatccccaggctccttccgtctggagctccaaacatccaccacaccgtcctaagtccaccttctcttctcaccccacagacacctctggagtcttaagttttttccaagtgttgggatgtgtccctagactcctgtccctcctggtcactgttctctccagagcctagcccactgtcaagcctaagtatggattctctgtgtcccttccatctacctggaattcatttgctcacttaggcaccatgagtttgcttactcattcatttattggctcattcattcactctcattcattcacttgctcattcaataatgcattcactctcttgcacattcattcattcattccctttttcatttactcatttgtcctctctaacttcaatatatagggaaggtgccatccgaactgggctgacaatgccacctctatcagcaaggctgtttcaaatgaaatttctccagcctcagctgttccattctctgctccttcctgtgttctttctccaattccacaaggccctctccaggaacagctcccggagcatagtggggcctgcttggccctgcctcaccccttaccatcctcacaggattctgcgtctaactctctttgtctctctctcacacacacacacacacacacacacacacacacaccgagcaaggacctcggccattcctgatcccctctgcttgggtgacccatcacccttccactcacttcagttcttggagcaagaagccagcctctgaaatttttccaggcaagtgaagttggaggagttcagtgtggatcttgcccccgcctcccccaacacacacacagctaccccagcctcaacaacacttactagaatgtggggaaaggcagagccagctccccagcacccctgccctcaccaccatccccactgggctgggcaggggaaggctcccatagtgcaggtggctctgccaagaaaagcagctcaagccggggcctgcctgggtcctgaggtggaggagctgccgaggttcagcccccctctctctatctttccctctcccagggagcttgcaggctccccacagcctcactcgggttcctcccagatctcatcatccctctcaaggaacagctcctggaacacagtggggtctgcttgggtcgtgaggtagaggggacgccacctcagcccccgcctcctcttctcggaatctcaggctccctggaaactgcctggttccttctggaccccatcacctcccctaggacacagctcccagagcccagcaaggcctgtgtccaagctctgaccacccccaacccagaccaacacgcatttgtcctctccttttggggaggatcgagtagctgtggtcaaagcttccaaatactctgcccctggagaggagctccgtcagctgctgcggcagggagggggtctcaccatcccatccatccctctaaaggcctcacccagcccccaaccccccaggactccccattcctaaactggcctgtgggagaaagttaataattaccaaaatcttcctgcctgctctctggcaggcccctctccccaggcccccttcactgccccttctcctggcctcccaatactgtggggccctccggcagccgaagacctcccaggccgggcccagggtgctcacctgctgcctcagtctgcctcctctccagcagggctctggggcctgggctctggcactgccaagcagctccctgcgctcagcccagccgggactcctccccgctgcactcccagaatctgtcccactccctcccagccctgcccgctgagctggctcggtggggagatagtggctgagctccttcttgacttggccctggggttgggcccttgttaaagggatacacaccttttttcacacccctctacccccatcccagagggagtggtgaaaactggcactcccccaaccccaccctcccagccccgcaggggctgagcagaacctgacagggtagagaaaggaagggaaggactatcacctgcctttctcacctgggtcactgggatcccagtttcaggggctcccaacagacaagttcagttaacattccaggccagcctaactggccacagaaacctccttgccactggggtttcaggagtaacgcccgacttctgtgctcaaatcagaaggcagatgccagggacctgtctggctccctggtcttctgtctctagtctgacccatcagctctactgagacccagccctaagatccctcatgtacaccagaagactcctctggaaactccccacaccccaccgtttccctaagatacccaaggaaactggccagctcgacctccctacactagggcagcagctgaaaccaaagaggggcccacttgcccactccagcgggaatgatattgggtcactgggcactcaccatgtgtcaggctctctgtaagtgctttacatgatgtgtggcattgtcctcctggcaatcctgtggaagtaatattcatatcccccattttacagatgaggaaactgatactaagagcatgcccaaaattccaatgataagtggcagatctgagattcaaactcaggccagtcagcctgtttctaaccgccccccacccccacccacc

SEQ ID NO: 34883 - DNA, 2068 bp, Homo sapiens
tgagctgaggagagagtctagcatttctttctcagctgccccctttggctccatctcagatattctgtgcctcaccaggggttcaaaaccaacaccacataggcccaggccccgcctgggcttcaggagccaaggtcatatcccccaggccaacgcatctagggggaatcccttggaactcaccttagcttaattctttccacctcctccaaccacccacctctgcttgaaacacacacaccaacctccaggatctgatcccccagctcttaccctaagtgtgccctctggacagcaggcagtatatttgggtgaaaagccttgggtttccttacctgttggcagccgctgagacaagacaggaggagccagctcacctgagctcagctcttatacctgggggaagggaggggaggcagggggctgggcctaagccacccctgctattgcagcagcctgggctatgagccagctttatgggccccaccctccgctggccagagttccagagcctaccatgaccctgccacgaggagggagccacagagggctggggctgggaaacccctggcctccgatcagcatgcagagtcacagagaaagagaagcgagaaggctggggagacagagaggacttcgagacctcatggggtcaccctaggaagtggaagggccctggcgaactgcagggcagggaaggagagggggtctgaatctgtgaccaggaaggagaagcaggagcctctgtaccctccatgtgtgtctgtctgtctctctctctctctcacgtgcacacacacacacacacacacgcacacgcacacttctcccagtcaggcccagcttggatactgacactcaagcctgcctggatcccagagcccagcctttaccagtcctggaggcagagagatgaatgtagagaacttggatcaggaggaagccagagaagggcagcctgatggagggaggcagattgagtgagtgtttgcctgacctcccttcagctcccctcagcggcccagagtgcacaaatgcaaggcccacttgagctgcttggcagctaacaccaactccaaactggtcgggccacgtgtttctctctccctccctcagagccccatgccttccctaacccagctgcagagcaacagccccccatccaggacccagaatgacatcccagagagcccaaccccagtggccctcctcacctgcccaggcccagacacctagaacctgaagtcactgggagggggtaggaagaagggcagagcagtaggcatgagtcagggcaaggatggggtgcggcccagagccaaagttcccaggatcctttcctaaacgctgagatcagagcacaccccactacatccctcctcatgtcaccttctcaacctggggccctgtgtgtctcaatggagaggaccttccaacaatgtctcattctgagagttcctctgaagggcttcaacctgcaggtccctctgagggtctctcagcctgtgggttcctctgagagtgacttagcctgggttcctcaggaggaggctcaggctagggggttcctcacagggcttctcacggtaagggagcccttcagtgcaggagcccctcttgaatgtctctgccaatggccctttggattcccagtctgggagtctctctgaggtctcagtctggggctctctaacggagggtcagggagctccctcagcctaaaggttcctctggactcatagctgccctgcatggatgcctgccagtgaggcagtgacagccctgggaggctggtcaccgagatgcccgcccctgctccctctggtggtggccgtgtacaccatatgcccctcaagccaggaaggcaaggcaagttctgcctccggtggcaccaccacaccctcaccccacggtccttgagcagaacatcgggcccctccttctggcttccccactgctccagagggtaaggggaggaggccctagtgttcctgagcacccagccagagaggatcctggttaatcagagctctgaaatccacctattcttgtctttatgactttaact

SEQ ID NO: 34884 - DNA, 1669 bp, Homo sapiens
taacaacaacaaatcagagagagaaaagagaaatccctatgtaggtctgcaacaaaataaacacggatggcaggtgtggggggaggacatggaaacgcaatcgaggacgcaaaggtgccccaccccaagaaggagtaaacagtatctaggccaagttggggaggggaggaagtgaggaggaaaacatggacgggcggtggtgttggccggtgcaggatgggagaggaatttgctcctaatactggcctcctgggccttggctggagcatttacggcacttcacaactctcagactgggcgagtggccatgaggggaaaaccagtgcaaattccccaggcccaattgtccggaagaagacgaggcaagtccgcgtaaagatttttagacggtgtaccttggctagggaacggaggggcgagggaattcgggacccaaatcccctctaaggcccacattaataactacccccaagaggttgcagcgcaaccactactggaacgtgaagtccccggcacgccccaacaacaggaccattggccacgcccctaggggcggggcactgcatggaaagccccgccttcgccctaaggctccgcctctgacctctgcgcaggcgtagctcaaatctttcccgccctctagtcgtgcgcggatctgacgcctgacgtaattgcgtagacgccattttagccggtcagacaagcactggacgtggcggccattttgttttggacaccgagcaggagctggcggccgctgcagacgaaaggcaggaaagggcaggccgggtgagcagacggatcggccgactagacagccaaccagcaacaacgaactgagctcgcatactaccgcttacgcatctaaccaaccgcccatctagctaacccgagcccctccaccgtcaactcaggttcggccggtccccggcccgcctgccggagccgtggtggcagccccgggaggagcactggcgtctgtttccttcggtgagtttcggtagtgagaaggagccgggggaggtgcggtcttgaggagcggaaggggccggcggacgcggaaagggggtggtggcatgtggacatagctacggtgttggagcgtggaggccccggggaggaggcggagcccctgcgaaggggcgggggaggggctgaactggaacctggtggcgggattgatggaggttggggtttgataggataaaaaggaaacttggcgggtagagcagaagtggaagtcttgacagggctttgaggatggtagggagattaagaagtacaagactttgaggaatgttggaaattaatggcggctttagggttaagttttgtggagggctctttgcgagctaattcccaggtgaatttagaaaacctttcctactcccccagatcgtcagtttcttgttaaagtccctacttgattctggagttgaaagccacttttgaaactaggcatgcatatatatatgtatatatatacatacatatatatatatatttttttttggggggggacggagtttcgctcttgttgcccaggctggagtgcaatggcacgatctcagctcactacaacttccgcctcccgggttcaagcgattctcctgcctcagcctccggagtagctgggattacagccatgcgccaccacgcccggctaatt

SEQ ID NO: 34885 - DNA, 1273 bp, Homo sapiens
accaaccacaataaactctttagaaatagaaaacgatactatgaatataatgtggctttctcataaagtgtttttgtttttggtttgtttttgtttggtttgggttgctttttttttttttttttttttttttgaggcggagtctctctgttgcccagactggagtgcagtggcgcgatctcggctcactgcaatctccgcctcccgggttcaagcggttctcctgcctcagtctcccaagtagctgggtgcccgccaccatgcccggctatctcataaagttaacatgggaaggctatggacaactgcaggtattcgcgtttattttcacctttaaagaaaacgaaaagtatccactccaaaaactggttcctttctacaacctgaactttggagattttcaagaccagccacaaggcctctactcctacggcctggccctcctccccgcccggttcgcgctagactccatttcccagaaaccccggtgtcttggtggagacagcatttcccgggcgccccctcacggggcggggcagtgcggcgcggctccggttcccggcggccctcgcggcaggtttcgggcttcaggacaattcgtgatggcgggggctggttccgccgctgtatcgggggcagggaccccggtggcggggcccacaggccgcgaccttttcgccgaagggctgctggagttcctgcgacccgctgtgcagcagctcgactctcacgtacacgccgtcaggtgcccgggagggaagttgggggcggggcctgtctctctggctttgtaggggcggggccaagaaagtgttctggctgggagtgggcataaatttaggaaactgattcgaggcggggaggacaggcgggaaggccgcaggtggagggttcagcggaggccggcttctctcagtacttggtaaatacgtaggggagttcgtttcctgagctccggtaactgcctgaccttgtaggccttgtacctctttgcagagagagccaggtagagctccgggaacaaattgacaacctagccacaggtgagtgagcatccctgtgtacccggaattcttcagcccactttcaggaccttaggtttttgccaacccctgggctgagtttctgtcacttgcttccagggcatcagggctgccaaaggactcctcctttcagggatgtcttaaatctctaatggctgtggcccgtttgggtgcaagtgttttccatcccattaccagcctgctttccctcagaacaagagataagccgt

SEQ ID NO: 34886 - DNA, 2113 bp, Homo sapiens
gacaagcagaaactaacaaccaagtgcagagatgctaaaagctggtactcaccctcctcctgggcctcctctggaaccaaagcgcccaccacgaccacggcctctgtcacccctagaaatgcagattttattttgacctcattgaaggaatacccaccggccatatcatcttaggttggctactttcatccctcggaacctcccaacggtaggcaagagaccccactcacacttacacttgtccccattccaaatggtgcccagttacacccccataacctcctctaagttaatccaacccccatcaagtaatgatggggctcagtgagccctacacttaataacccataatcctgggccacacgaatcctaatacttcggaggctaaagattgctcatttcttcactaaggtacacatttatcgggcgtgtcctaatgtcaaggccttcgcactgaggatgaatgcggctcgctccagcattctcagcccggatgacgggggcgggggaaaggtggggagctcctccaggggcttgaggacaccccctcatcgcaacccttcagagacaaaggtgtcgaacccccctccccactcctgggcccgaaccccatcccgggcccaagtttccccgcctctaccggcctccatctctcccactatcctagaccaggagttctcaggtttttggccagcccccggatacatggccctttctgatactccgacttctttcggcccacgttcacaaagttttccgtcgaatacctgaaacctttcgaccgcttcgacccacttacctcatggcgccttaaaacacgaacaatggaggccgcaccaaccgccccttcctctgagtagcagacaactgaagaggcgtcttgccggcgtgtcccaataaaacccggtgcgattggctcccgccttaccccatcgcttatgcctattggcttactttgtcaaaccgggcttatgaaccaataaaaaacgcctactgtgtcaggaactagccaataagaactggttctatagtaatgacgaatttttgatcagacattaggtggcactaaagaagtcaggacaacgactacgtagtgttctataacaatcatgagaaattttagttctagatagcagagtggcgcagcggaagcgtgctgggcccataacccagaggtcgatggatcgaaaccatcctctgctatcggagttttttcattgccctgtacggcatacgtaatctacgtttctttagtgaaggaaaatatcttgccaattttcctacctcaaaaatgcaaccaatatcagctatttttgccactagcagttgaagttgatggggaaaagggagtttaggcaactatgaacactgcacgtctacaaactcgaagcaggagaaacaggttttagataggagaggagtatattgattgaattagtgtggaaaacatggttttccatgtccatggaaacaggtgatccacccgcctcagcttccgaaagtgctgggattaccggcgtgagccacagcgcccagcttggttacataaattctttagtggtgatttgtgagattttggtgcactcatcacccgagcagtatacactgaacccaacttgtagacttttatccctcacctacctcccttccataagtactttttcgatatttaatttactacagcagaacgtaaacatcttaagtctaaacgtattctggccacgtaaccaccatccagattaaaataaatattattaatttttaaaaaacaagcaaacaaaaagcggaccgagtgcggtggcttgtggccacccagcactgtgggaggccgagacgggtggatcacccgaggtcaggagttcgagatcagcctggccaacatggtgaaactccgtctctactaaaaatacaaaaattagccggcgtgctggcgggcgcctgtaattccagttactcaggaggctgaggcaggagaatctcttgaatccgggaggcggaggttgcagtgagctgagatggcgccactgcaccccagcctgggcgatagagggagactccgtttaaaaaaaaaaaaatcttacttgaggtttgttgagcttcttgaatcaatggc

SEQ ID NO: 34887 - DNA, 526 bp, Homo sapiens
ttagagaagcagtgagagagtccagataggaaaagaccccagccatccacttccataccacatacactggcaccagtgagtcagaggataggctggttgccctttaagaacctttccaaagggaagattccataatcaggcatatctgctcatgacagtggcaccctgtctgaacttgatgcaatcatcccagtatgactatctgtctttggcttccaaatgtggactacatatggtatgccttggctattgcatgtccaatgatcaggtcagcccactaaacttcaggcagggaaaaactaggccaaaataccatgcagatctcagtgttcaaaactggcacaattacactcctctatcaaatgagaggcagtgcaaagttgggtaagaggctggactctggagatagcctgcctggatttagatcccagctctgtcactcataatcaatgtaaccttatgcaaactactcagcttctctctgccctgagttttctattctgtaactcaggaatgatcttaaaac

SEQ ID NO: 34888 - DNA, 1939 bp, Homo sapiens
tcaatgcacatttttttttttttttttttgagacggagtttttgctcttgtcgcccaggctggagtgcagtggcgcgatctcggctcactgcaacctccgcctcccgggtgcaagcgattctcctgcctcagcctcccatgtagctgggactacaggcgcccgccaccacgcctggctaatttttgtatttttagtagagacggggtttcaccacgttggccaggatcgtctcaatctcctgacctcgtgatccgcctgcctcggcctcccaaagtgctgggattacaggcgtcagccatcggactcggcctaaggggcaatgcactttttttgcaaagtctgataattgcacttatgtgagtgcatacacgtgcctgtgtgatgcactcttagctctggaagctggcttcataccacccgacggcatttgctctgtgactgcctacgggttggggtacgttccctcccccgccctgccacttcgtggcaggcttcgtgtctctcaaagccacgcagggacattgcccaggttcctgcacccacccaaattctaggaggaacagggcggaggctgacatcgcgcatgcgcctcagcgcacgccggcgcagcctctctccttcctcatcgcctcgcgctcccaccccaccccgagagcaaaggagggaagcgattgggcacgctagttgtccatcagaccaggctctcttctccctcaacaccattggcagacggagaaaaggccagtccgccgaggtcttcctaccccttggagactcagcgccaccgcggaagcagctattggcggaggccaggggccgcgactgctcacttccggcgcgggcctagacgatttctccccctcccccgccctccgccttcccaccccccgcccttccactatggccgcttctgtgtggtgtggggagacgctggtcctccccgtcctcccatagcgcttattgcctcaccctcaccccctaggggccggatccaaaggcgctgcactccccaagccttggggcatcagccaggaaggtttcctacctcctaattcaggggcaggactcctcttttccccccacggggaaaagaggcagaaacttaggggtttccctcctttcttagggtcagacgctcttagggtccacttcttcaggggcggaagcctctcctacccttcccatagggacacaggcctttaccccactgtacttcggagccaacgcctttccctcagcactgccaccccagagtcaggacccagaggactgtgccttcgcccccaacgcaggcgcggccttttggagaggagggaggagtggagaggacaggggcccttgctctcccctccccaacttgttcctcttgccccccagtccctggcaatccagagatcccgatatctaggactgtccatccatccactccctgaccttttcccggctcctggctgcagccatggagttgcagaagggaaaaggggcggcagcagcagcagctgcttcgggagcagcgggaggtggaggaggaggagcgggagcaggagccccaggaggggggaggctgctactttcaaccagtttggatgccaaggatgagttagaggaggtaggtgtggggggagggaagggagttaagaaattgggttttggagggatactggagcggataccgggtgggaggacggggggtgggggcgggggtggaggctttcaagttttttgtgaagtaacacaaacactgctccagcttcctgctcctgagggaagaaatgtgggccaacttcctggacaggttgtcatagtaacagcagccactagtatgaaaatgggtggggggtgttggtgaaggaagggatacaacatccaggtttaccgaatttatttttgacattcctttcgacatacacaccccagctatttttactatcaaccctg

SEQ ID NO: 34889 - DNA, 3307 bp, Homo sapiens
gcatctttcagtacagctttttatttttatagcaatgtggtctcgctatgttgcccaggctggaatgcagtgattgttcacaggcatgattatagtgcactatagccttgaacttctgggctcaagcgatccttctgcttcagcctctggagtagttgggactacaggtgtgcaccaccacacctgtcgtccttatctctcttctttttttaaaaatctcttttaagagaaggaaatcatcagatttaaaagttgattattctcctttgcatcttccttaggagtcccatgttttctgggagaaactgagtttgagaacttactgcctgtgagtgacaactagtttgttttcctttctcacattccaggtgtgcaaaggcctcccccagcatgaagaaatctgcctgggcctgtttactctcatcctcactgaacctgcccaagcccagaaggtaaggcaccctgctctggacccataaaccctcctcatatatgatctgggatatggtggaacttacagtttaactggggtagtatgaaactcttcgaccagagctggatcaccttgttctccaaatatagttacaagtccctttttactcagtgaattggtcatcctctgactaaagtcctttctctatctccagattctgaagctaaatggcagtcatgaaagtgaaaaaacagagttttaaattttaaatttatgaggcaaggctaaaagggttgggattaaatccagggaatagaagagaacaattgtaaccaagtccatgagagttcttatccagaagagcatggcctgtagtttgcagattctgccattggcaggtgaatagaaagcaggcttaaaattttagtaggtaggatttagatgagacagcttaatgttacatgattgatgcagtaaataatgtagtgattaggagaacactggagtatactggagtcagacttcctgaggaatattgtatgaaaacttgtctggggttcttcacaaactgaagagtcccctttatgtggaacggttcaagtaggttccctccttgaggtgagggactaggcagggtgatctctttgaattctgtgagataacttggatgtcagagatggtgtcatttgttcaaggggaaccaaaggaaaatcatttccggggataagaacaggatgctcatggttccttggcatagctgcttgaattaacctcaagggaaggatttatgggcatgggaaactgatctgtttgtacttctgatgccagctggaatagggtctggggtgagggtgggcagtgaggcagcaagtattcacaaattcttggtttcccaggaaagccaagcccattctgggctgggaccttgtcgagttaaattgctgtttcatttttatactgaatttatcatcaagatccttgaagacaaatgaatgtttccagttgggtggttttaaagagtgatatgatccagtccagcacatccattttaaagaaattgttggcaaagatgagagtagatgggatggagttaaagtttaacttcctcttgtgtgggttttttaatctctgtgtgtgtgtgtgtgtgtgtgtgtgtgtgcgtgcgcatcattggctgtgtgtgggtttttataaataccattcaaattccatttagtcatctcagtgcaaattagtcttgcctgctggaaagttttgtttgtttgtttcaggtgatctgaaccaacctgggtaaatcagtaaacctaagtgaagggggcagagtatgtgtggtatttctagctctttgcctggcctatcagtaagaggccactgggttctgcagtgtaaatgcttattatgtcatgaatttggccatccagacacagcaagagactagagtatctcctcttctttttgccctataacagccccatgtgggaggcccaggccctctggggaagtgaagcatttgcctcgggtctcatagctggttgacacctttgctagcattcatgttcacatgctaaaagtttccaagtaaatcccctacctgtgagccttcctgggccaagcctccaggtcaggcctcttcagacaaaggcagtaaagacagaattaggaggacacagttttaggcgggtgaggaactatcaagtagtgactcattcagagaccttgagccaggtcagagcatgatggaagaattagtgacgtatctccctagagctttgctccttctccctaaaagggtgattattttgtaaaaatacttctgtcctacagaagttttaggtgggagttactgatgaggactgattgtaatgcatcattttaggcttcagcttaaagcaatgggactgttttctaaggatttgtatttggggttaattctgcctttggaacagaaacctcaggatgtatttgagatttagttgttcttgaatcttcatgggctgagatgggaagtggatatggtggagaagtgtggaaactgagtcttgaacaaatagaatactgctataaggaaggttgagctgaggagcctctgttagtactggcaggcaggttcaaggagttagggccaactctctgggacttagtgggtgggattaggatggattgaacaggtgaacaagagaattcagttaaggagaaagcaggtcagtattgggaaagagtagaggatgcatggggtggattttgtctcacttgtaccttcttgatttgcatcagccctcttggcagcccttaggaatgtttatatcctttgagtttatttattttctatttggtgtctgaactaaacagctgggagcaggcctggctggggaactgtggcaaggagggaggctaaggtagagtcctaagctgtgcaggtgctggcagtcaatagataaaggtaatgggaaagggtctaatgtcaaggtctgtcttcatcaaagggtcaaggactcaggcccaggcagctcttggtctaggtatttctcccagcaggcagctctagaaagaagcttgggggctctggggcctaggctgacacatcactgctcttgacacattcaggatagatgccatccagtcaccagtcacttttacttttctttgagactctccacttctcttttcctcactgagggtgtgcatgtgcgtgtgtgtgtgtgtgtgtgtgtgtgtgtgtgtgtgtgtgtgtgtttcatctgctgcttttccaagctggtcagcaaaccgacacagaggtcggtaacacaactggcagccttaggtgtatgaaactctcggttctcatttgttaccagcagttgtggttagtaaagatcccagatggaacatgga

SEQ ID NO: 34890 - DNA, 1541 bp, Homo sapiens
gattgggccccatcatctggacccaggacagatcccacaaaccagatccatgttcatatgtcccaggccctcttgtcctctgatggctcacccttgcttggattctctctgatagttcctgatgaccagggcttctgtagtggagactcactttcatttcccctggttcactcacactctaggaactgggacataacaggtatcggccctttctcctcttggtagaagttcccaggaagagggaaataaggacccagggcatgacaggaggaactgtgatctcagccgagtactggagggaggaggggtgcagatcctggacacagggtactttcctcccccttctctagatgaggccctgcctaccccacacacctccagacataaactctctacaccacctctttggccaaaggtcagcacaggttggacttctttgctgccagggatgcaaatatttattctaccactgctcccacacagaatcagccaccatggccagtcctctcagctctggctttatctctagtagttccccattcctttctgtacacacatgctttgggaagtatcagagaaaacccacacccctgatggtgtgcacacataaataacaaaacttgggggcttcaagttcttgaagtcttccagcatcatagctgttggatctctgtttaggggtttattttagggcctgtgtctggctgacccagtcaaaccttgagatgtaataaggaaggagagtgggctatgggataaaagctgaggagcccatccaggactcttcccctctctttttccatttagtttccagatgaaaccttgaggagcggagagctgctgaacatgatcgtggctgttattgactctgcacaggtgaacattgagctctgacctccccagaagatctgggaggcagcattagggacatagggcctctgctctccctccaggcctgcagacagggagcccatgcctcccaggcaccctccctcctggctacagtggtgtgcgctttcagccatggggcctgggaaggaaaagtggaacacaagcaaggcaggctgaggttaggccaatcctgcctggagttccccttattctccatattctttgggcactcctgttccacagcaaaagctgagggggttgtgattttagctctcaactggcctttcctttggctcggaatgaaaatggtcagaccatttctacttgacctttttaccatgcataaggtccccaagaggctgtagctttgctcgggtccttctgaggcctgcactgggatcccatttctcctcctctccacttagttctcattcataaaagaggaagcttagcacccaagaatcctccttcctttgtctttaccctgcccaacctacatccagagcccagcctctcagggtcctttcctcctcaggcttagaccaaggctgtaactatttttgcccaaaatagtcctaaggttcccactcaggccttactttatcagccccttcatccttcagagatggcagcattcgttgtgtgccatc

SEQ ID NO: 34891 - DNA, 1100 bp, Homo sapiens
aaacgccctggctctcaggcctggactctagggcttagccagatgcctaaaccgcccaagccgagaaacaacttagaagacagacataaccctgggattcagggaaggcgcgagcaccgcccaggacctggtagggtgcgagccgcgagcagtccgggagggagcgcgcctagggcggagcgtaggctgtggggggagggctgggagtccggggccgccccacacccgcactcctcccgggtttctgctctccgcccgtgtggagtggtgggggcctgggtgggaatgggcgtgtgccagcgcacgcgcgctccctggaaggagaagtctcagctagaacgagcggccctaggttttcggaagggaggatcagggatgtttgcgagcggctggaaccagacggtgccgatagaggaagcgggctccatggctgccctcctgctgctgcccctgctgctgttgctaccgctgctgctgctgaagctacacctctggccgcagttgcgctggcttccggcggacttggcctttgcggtgcgagctctgtgctgcaaaagggctcttcgagctcgcgccctggccgcggctgccgccgacccggaaggtcccgaggggggctgcagcctggcctggcgcctcgcggaactggcccagcagcgcgccgcgcacacctttctcattcacggctcgcggcgctttagctactcagaggcggagcgcgagagtaacagggctgcacgcgccttcctacgtgcgctaggctgggactggggacccgacggcggcgacagcggcgaggggagcgctggagaaggcgagcgggcagcgccgggagccggagatgcagcggccggaagcggcgcggagtttgccggaggggacggtgccgccagaggtggaggagccgccgcccctctgtcacctggagcaactgtggcgctgctcctccccgctggcccagagtttctgtggctctggttcgggctggccaaggccggcctgcgcactgcctttgtgcccaccgccctgcgccggggccccctgctgcactgcctccgcagctgcggcgcgcgcgcgctggtgctggcgccaggtaaggc

SEQ ID NO: 34892 - DNA, 712 bp, Homo sapiens
cacgtactatggtgtgagtcctccagggtagataatctagaggacggatggggcagagccctactcaccaggagctctgtacaatagggcaatgtcacctgcctagacctacagactgaggaacggtgaggggggccatacagccacataactccaggctgcagggtcaaaggcagggaaggactgtgtcagtccaggaacaggcaagtaagagaagagggagagagagacaaggaagtgagagtgtggaggatgagatctttggggctgggaagtagggaaagggcattcacctcttctaaggctggggacaggggccgggggaggggaaagagggccagcacggcttcctgacggtgtgactcccacagtgggcccttcccagggaaagactacagtgatggctggggtctggaaagaggggcttgggctccccactctgctcctaatcttacctcccttcttcccccctgcccacttctggcaggggccacagtggtgctgaaatccaagttctcggctggtcagttctgggaagattgccagcagcacagggtgacggtgttccagtacattggggagctgtgccgataccttgtcaaccagcccccggtgcgtgggcacagatcctgggcagagctgctgacacagggctagctcacggggagcaggacagttgacaggagacagggagttggagggagaagcagca

SEQ ID NO: 34893 - DNA, 839 bp, Homo sapiens
accttgacctcacactccctttcccaagacttgctccttaacaaaattcaggcaactcccctgaaccacgtgggcagagtccccttccctccaaatccctgaccctcctgtccccaggagtctttggccaccacagagaccttcaaacagcagaaagttcggatggcaaatgagggcttcgaccccagcaccctgtctgacccactgtacgttctggaccaggctgtaggtgcctacctgcccctcacaactgcccggtacagcgccctcctggcaggaaaccttcgaatctgagaacttccacacctgaggcacctgagagaggaactctgtggggtgggggccgttgcaggtgtactgggctgtcagggatcttttctataccagaactgcggtcactattttgtaataaatgtggctggagctgatccagctgtctctgacctacagtatctgtcattatctctctgtggaactgctttttccttgagagttttctcctggcgtggagccacaggccccacattcctgccctgactggctgtgggccagagccccgtatctggaccttggtgttttcctctcaggagaccctgtgtgaccttcgtccttggagaacctctggtgactgatgtttgtctgtgctcctgtgtagctcgccccagttttactctccgagtgccaggctcccactgctctgtcttgggaactggaggacccgaggggtcggctcaaagggcagaggtggacagaagcacacagaaatgccacctccggcagccagcccaaactgctcccccagaatcaggtgtggccgggcctggggaagagtcttaacc

SEQ ID NO: 34894 - DNA, 1223 bp, Homo sapiens
gagattgcaccactgcaatccagcctaggcaacagagtgagaccctgtctcaaaaacaaaaacaaaacaaaaaaaaacagatgaactagggtggtcctcaggtggtgagtgccctttctcatcaggttggatagaggaggatgatggatgcagagaacctagtccacaaatcgtagcaatactctcagcctcgttgtgtctgcggaaccttccctgggggtaaaggggcccccttcccaaacctgcctcaaaggcaggagtcagcaaactatgctgcctgtttttgttacatacagcacactaaaaaatggtttttatatttttaggtggttgaaaaaaaaaagactatttcataacatgtaaaaattacacgggttcaaatttcagtgtccataaatagttctgctggcacacagccgcgctcgttcgttatgattgtctatgtccgctctcctgccacaacagcagggccgagtgtttatgagacccgatggcctgcaaagcagaaactacttctcgtgcggccctggactgaaagagtttgccgacgcctctatctgccccatccctcctgcgccgctgggctgcggctgcttccgtgagccccgggaaggggaggggaagtggaaggaagcccgcgagctgcgaggcacccggggcggccgcgcgcgaacccacaagcggggagatggcttggcagggagagtcgggaggcacccctcgcccggagacccccgtggggcttggcaaaaaaaaaaaaacccatctcgggcgctgctgggggcggaaaggcgtcaggcgcatggagccaacatactccctggcagcctccgcccggcgggcccctgcagggcggtgcttcgcgcctacgtaaacccgacctcgctgcgcaagcgcaaatcggtgcccgcccggcgcgcgagaggggcggggcaggctggggaggcgggcggagccattcttatggtggtacagaagctcctgacttccagccaaaaagacaaacggaggggcgaggccggagtacctggagttttcctcccagagcctctttaaaactcacccgtttaaagtgtaaaatttagtgtttttggtatattcgcaaagttgtgcatccatggccaccacctaatttagaacatttttgtcacctcacaaggaaatccctactcattagcagtcactgtccactcacccctcaccctaggccctggcaaccacta

SEQ ID NO: 34895 - DNA, 824 bp, Homo sapiens
aatccatctaacaaggaagtctctaaatagcattaaagaaagctgcatgagatgaggcataaaacagatcctggctcctaatattaagatagttgcctatcctgaatcaaaagcaccactcaaagaagaactggattctccactccaacaaataggtcagataaaggggataatctgaaacaaaagggaaagtaggagggaccataaaaacagaatggcttgaggtcctgtaagagtgaacagtaaaattttctttttttttttttttttttggaaatggagtttcgctcttgttgcccaggctggagtgcaatggcatgatctctgctcaccacaacctccacctcccgggttcaagcaattctcctgcctcagcctcctgagtagctgggattacaagcatgcaccaccacacccagctaattttgtatttttagtagacatggggtttctccatgttggtcaggctggactccaattcccaacctcaggtgatccgcctggctcggcctcccaaagtgctgggattacaggcatgagtcactgtgcccaaccatgaacaagaaaattttcaaggtcaatgaagcaactcctaatactgactgaaatattaactacagagagttcaggagatcatgctatattctgctaacacatccataaatttcttaagggaaaaaatgtcatcaaactacagattttatactcattgctttttatatccaaggcaacattagtaagacccatttttgaaggatcttttcaaaaagagaaattggttaaacaaatacttccagttaattaaaaaatactgtggttatggc

SEQ ID NO: 34896 - DNA, 2706 bp, Homo sapiens
atccacatgccacccaccaccaagcctccatctccacctcactgccagccctatgagctaacatcttgtgtttggaagttgatgctggggaagaatccaaagaggctaccatacctttatgaaacgggaaagctgtaccgggcgcgcgaatggcacctgaacctctgcactcgcatgagtggctcgctcctcaatgtaattgagagcagggaggccaaaagtactctaagtcccggtgtggttagggaagggtaagttccaccgaccctcaggaactgaactggaagacagatccagtgtgtcccacaagcccagtcgctgtagaagctaagtgcccacatagcctgagacaattctcttcccctacgggagggcgagcgaacggtggacgacgaaataaaggggtaaggttatgcgctcctgatccctttccctaaataaagataattatctggtgcttcctttacccttagattccccattcgtcccatccgcccgcaaacacaagactgagcagggagcggcccccgcaccctgagggcaccactgggggtggagagagttaaaaaaaaaaaggggggggcgcgctagagaggaaaggaggggagcatggcgggcatgaggcagggagtgaaagcggggatggcgggggaaacggggcgtgagggaggggagaaagagtacaaggagacgaaatgaagggacacgagctgggggcgcgcgaggccgaagtgaaagaccgggtcgcgcgcgccaaggggggagaggatgaggtgaagaaggagcgcgaggcgggggcgcgccgtgccggggtggggggagggggacgcaaggcgggggcgcgcgggcgggcgtcggctcgcgggcgcttcccctccccccgcccctccacctttcccttcccccacctccgccaccactgcctcctcccagcctccttcccttcctcgctcctcaccgcccccgggcgggcgggcggccaggctggcctaggccaaagctcctcacctggcggtggcggtgtaactcccggctagctcgcctcctcaggcggcggcggaggcgtcgaaaaaggaagaggcgacggcacaggggatccagaccctgctgacgggactagggacgggggtaggggaggggggcgggccggaccggggcgggcgggcggagcagacactgcggtacagacgggggcagcggcggcggcgacggctgcaccggcggcggcggcaccacacaaacaaggacgctgattgggcagctgccaagcgcctcggctccgccttacccacacgccacgacgcccattgggcgacctaagccggccaccccgccctcatcttctcggccatgccagtagaagactagatgccgggacttcaccccacccttgaagaatgagtggccggagaagtgatgattggcgtgcttaaaacccaatcataaacggaggaggggggatggtctagcgggggcgcgttaatgggtacctctgccagtcccagacacatccgggtcttcgacagcccattaagtgtcgggggtcaaaaaatcgcttcaggctgcaactttaccttagagacgttttggtccccaggcagccgccgtaccccagtctctccaaaccgggattcccctttggccatctctcattctttcaattctaaagatggagactggcgaacggcgatggggtctgcggtgggcggtgtttcgtcgcgacagactctaggaaatttcacgatagaactagctttaggcgcttgagccttgccgtctttttggggtgtggcctgtctccgtctgccaaaggctttgagcttcctggtgttcatcgtacctccgcttggtcctgtcgtgactaaaccacgacagcaggaaaaaaaaaaaagcagctagccaagttgctgaggaattacggtgtgcagagccctcgcagctccttctcttgggaactcctggtctggttaggttctcagcgaggaaacagcctcccaccccgcccgattccacctaattaactcaagggccagctccttttgctggcctccctgcttccacggagcagttaggcccgcctaaactcagcgagcgtttctggagcaccttgaggatagggaccaagtaacagagtccgggtgttaaggttatgatagtagttaacgtttttggaaagagactgtgtcaggctctgtgctaagaactttacatgaagtatttattcctcatgactgtgaggtaggtactgttatccctactttacaaatgaggaaaattaggatcaaaaaatttgtccagttacacgttaagtggtagagctgaaatttgaacccaagtagatgaggaaactaaggctcagagaggttaagtaacttgccaaaggtcagaccgctagttagtgactaagcagtggtttaaacccagaaacaactggttccacaggcattttgttattgttgttttctcactgtgtctcccaggctggagtgcagtggtacaatctcagttcctgcaacctccgcctcccaggttcaaacgatcctcctgcctcaacagcctcccgagtagctgggattacaggcgcgcggctaatttttgtgtttttagtagagacggggtttcgccatgttggccaggctggtctcgaactcctgacctcaggtgatcctcctgcctcagcctcccaaagtgctgggattacaggtg

SEQ ID NO: 34897 - DNA, 1903 bp, Homo sapiens
gaggggaagctgcaactcagaggaagtcagcctatgggtgtgtgtggtggcggtggcggtggtggggttaccattgaaggtgccagcacagcattacgccaagttggaatctcagactataggatcctgagcaaggcagaggaggctcagaatggttccaggatgtgcagtcctgctaacctcctgctgttcccccagagaacagggaataaggaatctcatagagccaggctggctttcttcatcacctggcctctggacacacacacacacacacacacgcacacacacacgcacacacgtacacacaccaaccccagctaaatttagactccacttctgggaggtaaagccaggagtcagcgtcagcctcttgatttaattctggggcacagacctgtccctcatccactgagggcgaatgggagccctatgcccaaggcagcaggcagaggccattaggtgggaccttctgaggggcaagtgggtggcacccatccgcaggacctgcgcaccggggcctcccctcaccaagccagggaagagtcctgcagaaagcagccctttctccctagggaagacaacgggcacagggcccactccgggtccccacgcccgcgtgccgggtgacgggaagttcgggttggggcagagggcgcgccgagggggaggaggctgaggaaggagcaggagggcagagaagcaggcgcgccggcggccgaggacgtgacggcagcagcgccggccgccgcgtgacccaagcgggagggagggcggctccgactccggcacccacgggagcagaagggggtgcaggaggccgggcacggcgagctaattgcgggaggtgccctcccctccactttcacttccccaggagagaggaaccggaaccagatgtgcagtgagggacagcagctgggggccatcccccaccccgcctgccgcccgcgctccctcctgcccgtccccgcctgccgcccagcccggtccagcccctacctgcctgtcccgcgcttcccggccggccggcccgctggcgggtggctcggagggcgagctggcgggccggcgggcggcggggctacccggccccagacatggcgcacccgacttgggcgccgctcccgcccgggcagtgagtgaaggaagaagaggcggccgaggaccgcagagcgcggggcgcagtggaaggagatccgggcggtccccgcgtccccgccgcgctgcgccacgcggggactgtgctgccgcgctgctcgctcggccggctcggtcctcccagctcccgcggcgccggggacccagcgttcctccgcgcgccccgctttctctactcccccaacccccgctccgggccgcgggcgccgccgctacccccacccctcctcctcggccggcggccgtgaccctggcaagcgtctgcccaaagcccagccgcctgcagcccgacccctggcggctgggagggccccctgcacccaggtagcttcccaccatccagcccgtgcctcaggacactgaccccaggcgacccagagggccgcggcgcgctcccttcccgcctgggtcctgcagtcagatgtggcaagcatgatgtgggcgcaggtgaagtcccgaaggtctagtctacggggacccaggtggctccccctacttccaggtttagggcacagggcattccctttggaccagaaccagaagctctcagttctcttttttgaaaatgacaagagctttggaaagaggaagagaggccaggactgcagggtgtggaatagagcagtggaggtgggggtaaggtaactgcggggctctacttttctcactatgcgggttgggggagtgaggggtgcagaggcccacacggctggtccaagggctggcaacccaatccagaaag

SEQ ID NO: 34898 - DNA, 1380 bp, Homo sapiens
aagactgcataccacctaggcggactcctaccccttggtccctctgacctccagccttggaaagcaagaaaccaagccaggggggcttcagaggcagcctggcagaggcctgaaagttctttcaagaactcctaggaatgaatattctcaacacatagaagaccctccaaggcaccctacacactaacccacaaagcagccaactccctagaaagctcagcaaaccatagagttccacacaacttatggtcggacggttacccagttgtcggattcaaaaccctacctctcctccaaggaggccaggacaaaacaccaagcaatggacctcaccttcattcacgtcaggaaaccacaagaagtatttgaaaaaggaagcaaaaggacgggacgcaggaggggacttcctgccccactatacacagcaccgctcgttcaaaccactcaaggggccctttcccgggggcaccaaagcgcagaaggcagagggaccagtttggaggagatcacaaactcagaggagccaggttacagacaagcagccctcctcccaggccataccccaataccaggcatgcttcagtagcgtcctcgaggggactccgtcagggatgcacaaggaccactcacctcctacctccgccggacttcatctcccctctccgcccactcccacctcacgtactcggcccccagtcgcctctacaccccgaacctctccggtgtttcggtctcccccggcaaaatccttcttcctgcccctcggccctcaacctgcgcctcccaaacggcggcgcccgcgtcccctgctctgttccgcctccttcgctgcggcgcccgcccccgccccgcctctccggtctccgctccgtaactgctcagctctgctccggctccccggcgcggcccctcacccgggtggagccgatgtccatcatcacctcctcgaaggccgccgtctcctcggcctgacgctgcttctgcagcgcaatcttctcactaaatttgcgcggattggaagccgaggccgtggccgaaccaggcccgttcgcccccgacgtcgccatcttccttccccgtccctccctgccaccctcccagtaccagccgcggcctccgccgcggcctcggcccggctcctccagccgtagccaccgccgcctcagcgagcaccgcgaacccggccccagcctagccctgacctgttgcgcgcgggggccgccgggaattgtagtttgtttacgagactccttcacatccccagtcacgcagcactaggaggaaacggactccacttcccagcagccctgctgactccggaaactggggacttggctccaccctctcggctactccctgagaggtgcaagctgggaagag

SEQ ID NO: 34899 - DNA, 2639 bp, Homo sapiens
cacatagaaagaattatgccccataaccaaaaatcacaattcataccacatgccaaaagtcttccacacagtcatggagtggcacatgaatcaatctccacaaaccaacactcccagaggtgtgtgattcccctcccgcaagtcacatgcccaggccagtgctcaccgtcacgtgcaaggctgccagggcctcatctatggcagccaggtagtcaggcagcaggtccaggagacaagtggccaaaaagacgccccccgcgaaacagcttactaggctcagggctttctggcgggaagctgggtaggggtgaagcacagaggggaataagcaaacaaaccccctccagggccgaccaccccaacccaaacaatggctacccttgcctttccctcctcctttggtcactccccgccagccccagagccctccctaagccaagcattcatagcagtgtggggaaaaggagaggcttacctgagccttcatggttagctcctggccggcgcagcacacagatgggcaccaggctgcagaggagggtgagcaccagcagcagcaccagggcccccaacttcacctccagccccacaggcactggaggctctgaagctaccgcctcggggcgccacaccaggagctctggctctccccagggccccatgatgcttctggtagctccagtgactctcagacctaggaagacagaccagagtggttgggaaaaatcatgcaaaggaagatggggcaaggaatggggaagcttggtcagcagagtgcagctccctggccccagccactttgtgaccttcccctacccagggtgactcatctactcctgtaccaggaacattcctctcttctcacactttctttcccaagtgacttattcagggagactgcacgggggaaaccgaggcatgagaaaggctgtatggatatctcatcaccctttcacctggtgcccccagaaaactaggaaactaggagccgcctccaaataggacctggagctggagttcccctaaggaatgtagaggccgggtccccaactcccgaacggagtgggtgaagccaaaaaggctagggctgtgcagagatgtcttgggtagcttcgtgggccacctggacagggtaagtttgggtgctggatcgctccatcgttccccttttcccagcgcagagaacaagcgcttcaggccccaggatgggacctagaggcagatggccaaagagaggggccctaagagtctgcggtcccgggacggactgaggcgacactgagggcggtgcctgaaagtccgggctccaggaggcggggtgcgaggccgccaagcgtcgcgggaagcagatgaagaatgcgtgagctgggactcctgttcccgggcccggggaggcctgggcagccgacatggaccccgctgccagacagcccgcactcacctcgcgagggtctcactacatggtctccgcgcgcttccggcctagagtcgggaattcccgccccctcccatagctcccccctcccccacaggagccgcgtacccacgaccgactgccaatggcagcaccgagtgggcggggacagaccgggagtgacgtcagttaggagcaatcagagatcgggagcgggagcgggcggagcaggcgacctgaggagagtgagcgagagcaagagcggatattaggaaaaggacctcggggctggggccctggggcgcatctgtggaggactgaggggccggagcgggccagtcaacaaaggctttgattatatggatatttttaaaagagggagaccccgcattgtcaagtcttccggcccacatctgaaaacatcttcctggccttgggccaaagtctcatctgtccctcagaaggctctgacacctcgtcagtgcctcttggcgcccaagggaaagcattcccctcttgggaccaacttccttgactgctttccctcaccagcacccacaacaaggaaaaagacaaggcagaattggaaaggggggaaagcaaagagagggtatgtcttgaaaatcatcccttctcgactacttatggcactcagtgcagcctccgccttctccaggtgggtggggacgtggtgggaccggaatgcggggtgctgaagccgcgcccagggaagagcccccagcgcattccaggatatctgcgtaccgcgcctgcgggcgtctggccggttctcccacctgatttccagcccagctcccgccaccctcgccggtcggtttgctgtttgctgttccttgaatgccccaaggtagttgtttcagctcaggactttcaccgtttcctcaacctggattcttgtggcccacaactctgtgccttgagaatcctcttctagcctcaagggacggtaagacaaaagaaaatttaaaaagggggctcagctgttcttttatgcaaaggtgaaaaaagcttcattgcctaaagaagggacagatgggatcttgcttcctacaggaaaattaattttaaaaaagaaaaaaaaaaggggggacagtgtaatgcttctcacaaggctccagaaacgaagcccagtaattccttaagtaaaagaggaatgtgaagacttcttaaggggccgggcgcggtggttcacgcctgtaatcca

SEQ ID NO: 34900 - DNA, 1504 bp, Homo sapiens
agcaaaagaaaaacaaacaaacaaacttgtcagctccatctgctgtaagaattatatgagtaacatggaaatgcctgactagaccctgttcccgtttttacccttagcccgttcaaatcttcataaggataattagtagcagtttgagttctgggattcacactccaaactactgttttactcacccagctacccttttctgaaatactactgaaaaccatacctgtatcagtttacctccattgttttacttgaagtgaattcctggaccatcagacattagaccaaggcaaaaaaataaaaataatcaatcaaccctgagttttggtattactactttctagtcatggatctgcctcctcataggtaaaatttgcaaaatattacccgccgtgtgtgcctcagaactgttatggattaaggaagagaacaatttttatgaaaacgttttgtaaattatacaagtgtgggacataatgttcccggtaactgtatgcaaacaataagacaacaaacgcaaaaggctttttaacttgttgcagttttcctgccccgtgtccctccgtgaatgagcagcgtgcagcgagcgtgtgcgcacagctgctgttctccattaacgccacactgctcggcttgcggacggggaaacccgccatcgcgctcctgccgcctgccgagcgaggatcaccgctccactggggtcagcgggctgttgactccccgcctgggtgaaaccggagcttccgagtcacgtggcgcgcgaagacaaacctggctgctcagggtttcccggagctttctcccagcttcccggcgattcatattctggcgcttacccctccctttaggctggcggaacccaatccccgcctgacaaataagtcccgccggccggacgcagtggctcgcgcctgtggtcctagctgctcgcggtgctgaggcgggagaatcacctgagcccgggaggtcgggggctgcatggaaccgtgatcgcaccaccgcactccagcctgggcaacagagcgagaccctgtctccaaaaataagaataaagaaaaaaaaaagaaagaactgcggccccattggcctgactctcctgaacagccaaactgtctccgaccagttacggaagaggcggccttgagagggtagtgtgccattggctcgatgtcctgcccctccgaaacctaagtcttcagcttccaatcaggactcagctttgggaagagcgccacgcggtgggcgaggggatgccctagtaaattcgcaggtctcttgactctttccgcctttgtttacaaccctgccatgatctccctcttgcaaaagcgagggctacagaacaggcattcaggagtcctgtgctccagtcacagccttttctgttcttcagctaggagacaccaaaccctcaggaagatttactatagctaagagaaaactgcagcagaaagggcgcggctacctacttcttaaattccgtttgtggaccctcagactctta

SEQ ID NO: 34901 - DNA, 2226 bp, Homo sapiens
ggggcacattttcaggggaaagacaagtacagatttggacatacactgagactgcaagaagaaagaaaaaaagatgatgcaaaggcagcttaataagacttggatgttaagatgttgcttaagtgtttgcttagatgtttaaaaaaaaaaagggtagagaaatagatactcacagcccggaaattagagcatggagagcactcttctgctaccacaaactcttccaccagccagcatggcaaatttgaggtgcttgctgaaaggaaagataaatgccagccccaggccattcagaaaacatttctcccaggctctgcccatccaacttcccggcacagcgcttgccctcattccatgtggtgccggccttttccacctgtgctcttggtatatggggaagatactaaaaccaaaaacaaacgacgggacgtgtcgggttcccagacaatcacccacctgacagcttctcttcctgcacgggagcctctgcttggctgtagcggagttgggggaagggacaaaagtcaaaacccagaaaatagggcaccccctcctgcgctgtccatggataagatctcccccagccccgaggccgggaacgatcctgtcctccagtgacctccttttccctccccttacctcctccttaccagagctttaaggtgaaagcacagagcaaccagcagaggtggcggccctgggggaggccaggcctcccggcacccgcaagcatggagcgccaagtgtcgcacctgtcggaacagagggacctactccacaggcctcgtgcctccgtcggagcgcagaggcggcacttactctgcagccctcccagaggttccaggtcagggcagggaaggccggagttgcctattggagcagaggatctatcaggacgtccccgttgccacagcgagaaaaatcgatatgtttttgcgggctagggaggcgagcgccttctgcggggtccgcagggcgctggaggaagggccggcgggggctcgcggccctagcgcccgctcacctccgctcccgcccccgacgcagccatctagccccgtggaggatcctcgggcgcgggaccgagctcggggcccggtgttcccgggggcgttcggtcgtcgcccgctggggcttatagtcttccgcgtcggtggcgcctcgcctgctgctcactgggaattagctcggcgccccgttgcattgtggtcttggtagtctttgcgagaacggcaaatggcggttgcagaggctcgtccgaattctcggctcgctgctccctggctggcgcgtgtttgttcattctgggctaggtgagcagggacaatacgtcgccctctcaggactttgctctctccttaaaacccgaggattcaccgtcaagcttctggtttctctgacatccttccccagccgccccttcatcgccaccgatgatccagtggagaagctgtgttggaggtcaagggatggaggcgaaactgcgcgttctcgtccctgcagaaaccggaatatccgagacacatgacgaacatgaaactttctccttgtctcttggctcccactccgctacacagatgaacggtgttaccttccctcatgttactttgctaagcctactcctcagagctggtcctttgcataacctcttcaaatgctctcaactctcccttgctcctacataatggagtaatcataagtgcaatgagaaaagcatgagatttgaagttccataagtattgagtctaggttctggtggttattaactccatgatcttaggaaagtatctgtcagtgttctgtgtaaaacggaaatgctaatgtgtatttaccaggactttttcttgcgagaggcagatgaaatgtatctccgtttcatgagtaagttcagagaatataagtgacttgtccaaggtcagcaagctaatgagtgggaaagctgaggcttgagcctagactgtcaacacccaggccaaagattcattgcctgcttttcatcttatggagttaaaccttgatacacactcagatctgcagtgacttgaccagcactgtgggttcatgctttactgtctgataacgaattttcatttaattttattttttttcttagacagggtctagctctgtcacctaaacctgatgagggctgagccttcatttcgccgttttttgtttgtttgtttttgtttttgaacgagatggactctggctatgttgccagac

SEQ ID NO: 34902 - DNA, 1846 bp, Homo sapiens
ccaccacgcctggctaattttcgtatttttagtagagacggggtttcactatgttggccaggctggtcttgaactgctgacctcaggtgatccacccgccttggcctccctaagtgctgggattacaggcatgagccactgcgcccggcctaaactgttaaattaaaccaatagaaaaagagttaagaatataggtatttaaaaaataggacggaagtcctggatatggctccttctccctggtgttttcctcaacctttcctatttattaggctccaactgtcaaggtatggcacaaaattttaaaagtgtccatttatccctggatagtgatcaaacgctgacctcaaattagcaaggtaaccctctcaacatggtgacgcatatgtgtcacaactaacagttaaagaccttccgaaaatggcagctcccttgtctccccactgcggcggatcaaagtaagacgttccaaacatggtggcacaagatccttgcgtcatttcctgtagtgtgctctatataaggggcaggatttccgctttcgctcctttccggcggtgacgacctacgcacacgagaacatgcctgtgagtgctttggtccaggtttcggcggagatctcgctgttctgtccgaactctcccctcacgctgatttcggatcgtagagggtcctcatttaccctctgcacttcttaggacattaactccagggaccgcagcggcccacgggccacccgcatagacgggagcggagaggagataagatggcggcccagctgcgcagacaccaggggcggcgaggggcgagctctccccggtgtgtgacagtgggggctattttcgaccatcccattttcgctgttggtttctaaatctctgcatttctgtccctcttagctcgcaaaggatctccttcatccctctccagaagaggagaagaggaaacacaagaagaaacgcctggtgcagagccccaattcctacttcatggatgtgaaatgcccaggtgaggagacggcttgctgtagtggggaaagcactggacctcaacagttggaaaatgttgtagtgttagctgtctcgtatccttgaagctgtgcagcagcttcagtttcttcgcctgtggaaaatattttccctgatactcttaaaatttgaatgtatgagactggcaaagttttgcatcttaggaggagtgattcatttcaccgtgatctctcatcacatttcacatacaacccctacgtttttttgtgttgggaaacaatgtaatggatgatgagttgggcataagtgcaggaaagacgggtgtaatagaggaaaaaaatgttatctgcttttctttcaggatgctataaaatcaccacggtctttagccatgcacaaacggtagttttgtgtgttggctgctccactgtcctctgccagcctacaggaggaaaagcaaggcttacagaaggtaaatggtttactaatgtgatttggggctttgagtttgatttttagaaatggaaacatttcttaggatttttcggtcttaacagtgacagggatcatctataatgtaaatttttagacaagaagtgttggatttggttgttttaactagatactaccaaaagctatgtattaatctcaaagcactactgtctaaagcggggataaatgggtgataaaagggcttaagttgataggaagtaaccagtgatacaaatgcgcaggtagctaagagttgagaaaaaagatgtagctttctgtgggtggatcatcatgcatctgcttttttgggagaggtgggcagaatacctgtactgatgacagctaatctctgaatctttttcctc

SEQ ID NO: 34903 - DNA, 402 bp, Homo sapiens
aaaactgccttcatttttattttattcatttatttatttagacagagtcttgctctgtcaccaaggctagggtgtagtagcattatcatggctcactgcagcctcaacctcctgggcccaagtgatttcatcttatttttggaaaaaaaaacaaactaaaccaaaactaaaacaaacttctctagggccctatattgcctggaatgtcctgttctcttcacatctagttcactcttagtcatacttctaaaggtcattccctctgtaaaaccttacttaatttggctctaggtttcatatagatactcctcctttctttctgctttatttttatttatttatttatttctctgagatggagtctcactcttaccgcccaggctggagtgaagtggcacgatc

SEQ ID NO: 34904 - DNA, 1823 bp, Homo sapiens
aaaaaaagaaaggaagaaagaaatcactagaatcactgttcactccaccaacattttatgtttccactttcagttgaacaaatattccactagagtcacctggaattcattattgtctccaccaaattgcccaagtcaatcagaaaccttgagactggcacaccatctgattctctgccatacactcgcttatcagctctgctcggaagaaatgttcttaaccagttcggcttgcactgatcacacttcagcaataaaggcctgaatctgacagaagttcctgccttccaggtcattgtgggtagggccaggcaagtttggttggctcctacatttgcactaacgttgagagaagtactatcccctcccctgccgtttcacgtagattcagagagtgggtgtagcagctgcaagagcaccccgtaagaggaaagggcccctggccagaggatgagaggcggtcctgtggcctcgagctcctccagggagggagggcaccgcgcttcctctcagccaactgctgcctcatttcctgagcaggaggagggagcggaaaagctgccagcaggcaggccggggtctttccgacggttcccaccccaaaaccctcaccatttcacagaaggttcagtactgcccctccccgaacagagaagcacccacccactcttaccccttgggcaggaaacctcaagccagagcaaagttctcccaccctccatggggaagtgggggagggagaagccgctgagcccctcccacggccgcgcccggatcggaggcactgaatgaatgaggtggagaaaaaaagaggaggaaagccacaccccaaaccccgtaaggctcaatttcttcaaaggtcaagcctgctcgcccgagcactgtttccccctcgtccgcttggtgtcctactggtgctgagccccacccatcctccgagatcccaacttcatctccgagcccgccggccttcagaggaccgtgctccacggcaaaagggaccttattccgcttgccggatactccagcgcctgcccctccctcatgagcctcaccatctccgtacctgttcccgggcccgcctttctccctcaacttctcgctggaggcgctcagctcgctcctctgcatcatctgcctgctgctgcagaacctggatcttgcgcttcaccgcctcgatggtggtgatcccagccatggtgcccacccagctactgctcgcgctccggttcctgcctcctccgctcggcgttgcagcctcctctcacccttacttccgcctgctacgccctgaaataccggaactcaccaacccgcccggatgtgacgtccctctgccgcgccctcccaccgccaggcaggcgggaaggcagtccactggagggagagccgcggcagggagtggatcctcccagtcgccctggagtacggctcccggccttaccttgggccagtaaactgggacggggttgggacgagggagtgttaccatggtaactgggcggcgcttcgtgccctagcctctcccgccaggctggctgcccacaatggttggcccctttgcaggtagtcggctgaccttacactcccgcaattgacccctcactcccgcaatgccgatacccgtcacccctcactgtatttgctccacaatataaacatcctacaagtctctgcttccactcaccccacgacaaactccaaaaccaagttataagaaaagtctaaaagactttctgggcctcaggttcaaaagagccccactcagtctcctttcaaagtcggctcaggtaggtaggttctctctcccgtctcctggaagt

SEQ ID NO: 34905 - DNA, 2915 bp, Homo sapiens
tgggcttcttggtaacatgaatggtggaattagatgatttatggagctcctcttaagtctaaaattatgtaaaggtaacccttctcattgctcttgggttaaccttaatgatctcaaccccatcctaatcaaacaaaaaacactgggtagtttaagatgagctgggaaatattttactacaaacagttgggaacttcgacccaagcccttcattctgcagatacaaaaacagaagttccaggatgagccacatgcttgccacagcactgagcaggtaagccaagttccaaagcgcacagtgcctgctcaacttagtaagtacaaggacaagtgcacgcaaagaaacatgagaattaaagtcatcactaaaggcagaggaaatctcattcttgaccctaaaagatctggagaagtatgtttaacttgtgccctaaggacctaccttgggggcattgtgtcccacagggacatgaggtccccttcgagatttcattgcaaagcgcatgatttgcctcttcacaaaaataaatagcagtacaaacacctgtccaaaaagatgtaaaaatcctttaataaaaagtcagttttgttttgttttttttttaaaaaagcatgccttcattccaaatccccagattccggctctcaggaatgtttcagggtaaaacttggggcaaagcaaggccgttatgatgggggtggatctaagaagccagcagcagggaggcgtggggtctgtgctctagcgttaaagggagggttctagactaacgagggcgggtcggcccgactaagtgacttaaactcccacctactcctggaataaggagtcaaagcccggataggcgcaggtgagtgggtggagaatgcagacggggtacagctcaaaaggagggtctctactgggtaagatgcgacagcaggaatggggtggggtaatctcctcaccaggctcccgtaggccatcaccagcacgacattcaccccggagagccagttactgccggacgccatggcctccctacctcgcgcagaattgttcgggtttaccccgctgtcctggctggtcagcccaggctccgccgaagcgacggcgcctgggtcccctggagctccccggccatttccttacgggggaagaccaagccagacccggcctgaaaacatggcggacaggcaggagagctgggaaaggagaacgacgccttccagcttccccctgacacgtgactcaggcaggcaatggcacccaggagcgtcgagcgctcagacgcggaactacgacagtaagaggaagcggcggccatccgtgcgtcacgtggtggaggcagggccgccgtgaaggaggcggggtggactcgcggagccggaaagaggtgtctcgtggcgaggcggcacgcgcacgcttgcgtgcgcgccccttttagcgtcacgcgctgagggacgcaggaaggcaagtgggcgggggaaggcgcgagagcgagcgcgagagggaaaaggagggagggggtggggaagagggaatcttatatcacgtgacaggggcggcgcggcccggggtgtcagtgtggaggagactgaggtaaagttgggagcgcagcggcgttggcggcggcggcggcggcagcggcagcgcggcggggccgggtattgtccgcggcccctttaaatccgcgatcccccttttaccctccctcttttctcccctgcccccgccgtatcccctccctcggtaggcccccccacaccgtgtgttcccccactgtacacccccccccgagtcatgcgagccctggcgccccccacctcgagtcggcccccggaggttttgtttatggttgggttcgcggcctagtgggccgcgccagagccggggcctcgatttgggagcgtggccggggcggggcttggagcagccgtaggaagggggggccatgcggctagagcctgagaggggagagcgagaaagagcgcgagcgagcgaggcctgggccttgcctgaggtagggctctctcttcaccccggccggtgcctgcggaggagagggcctcctccctttccacccactgcgggcctcctctgatccggatccggcctggtttgggggtggcgtgggggagggagggcgatggggtggagctcccccaaactcccccatgtggccctcagtttggtgtgcgaaggattaatttgttccggctgggaggtagggaggagattggccccgtgggctctcgatgtggcgctgaggggggtgagcctcccatcctccacccgtgggcttgcgtcccctctccgtttccaggctctttgtcagctcctcttattaccctcccttctttctcaccaacccagttcttggaatatgtttttgctgctgtctttagcttcctgtttatactgtagtttgggtaccccaaacaattgtgttatttgggaagctggacatggaggcccccatagggtgtatttacgcttaagggacgtcactagagcactggggtatttgttcactcttctcataatggtacaggaatgcccagtttcttcaaacccttaaccttgtggacagcccttaaattgctttgcaaactgatgtcacaaactggagactgctccttttccaccattcttgaaatgtagccacctctggtgtaggatgttgtggaaagaaaaacaccacagtaacaggcgtttttgttattattgttaacgtttttgcctttgactctccctgattattaaatggagaaatcctttttttttgtcttctctcccatcctaccttcctccgccgcatatcctgttttggggatacctgatgtgacttgctgggaggtgatggacattactagtaaccagcgtttctagagaattaaaacattttggctgtgtatcagttgataaaactgct

SEQ ID NO: 34906 - DNA, 1401 bp, Homo sapiens
tcagagactcttaagttttattttttccagaacctttaacccagctgattatgcagagccagccaatactgatgataactatggcaatagcagcggcaatacgtggaacaacactggccactttgaaccagatgatgggacgagtgagtgaccatttatcattcatttcttgtctctgggaatctaaggaaatagttttttctgattatacttacattaaaacgtggaagaatagtgtttggttatggagatagggtgagaaagggctggcagttgtattactgtgtgtactgtttatgtaacgtgcatatgggcacattacacatgttatttcgcttaatgctgcttgatattgtatgaaataatcattatttatcatcactttccagatgacaaaactaaggccgaaagagaggttataaatttgctagtatttgaactcagcattgtttgaccctgaaagtccatgccctttcaactatgctatgtcactgctattaggtccaagtgtattttctagtgtttatgttagggtagtgttgccttttgaaaagatagccagaattaatcaagccactgcttgtaaagatgaacaaggcctagaatcaaagtccacactatccatttatttgttttctgttactgagataagaatatcctttttttccctttatttttgggacatgtcagtatctgaacaagaagatttcgaaatctctctagcctttctggtgccctgttgaacagccttcttggtgtgatggagtattcagggtttgaataagattacttttttgttaactgactttggtgcctgcgtctgggctggatataaatgtttaaggatatgttaagctgtggtatacacctaagatgtgtttgggggtggatacgtgtgccactttcaataagagcagttcattttagtaagaaaactctggagtgctttcttgaacagctgcctcattctggctgagctaacacatgagagcctaaggctttttttcctcttacaaagggggatgagtagggcctgaaatgtttgactccttacctgtttaaatttgccttgtcacctttcacagatacgtgatctctgggcctttaggagagcctttggcacaaatagttttccacctttttcctacaatatattattcctgaggctctgaatgtcgtctgctttttgttcgccaagttgctatcttataaattcatttttaacacatttcatgggtggaggctgaagttgagttacaagataggtatctttgaatttctgcatcatttagttacgaaatgtcctgttatagtttaacttactatacttcggaggcattagaactgttcttcattcatctcttgatggctttgtagaggcagtggtagcagtctcaataa

SEQ ID NO: 34907 - DNA, 1466 bp, Homo sapiens
aaaaaaagataccaaagggatatttctttataacccccaatttgttccttctcaggactcaactagcttcccttcccttgctttcttaaaaatcctttgtcttgctggttgcagagcctgcttagaaaaaagaattctatatagttataacaaactccctagtagctagagaggtggaggaagttaagtccatgcgtctcttatgtcttgatctcttctctgggaaattcaatactagaaggagcttggaaaagcattttgttcatccctctaacagcagacatcgcccaggtcagtcaaaaagaacgcccgagtaaggagcgaggtggcttctgctgtgaggctggccagccccgcgggtggggtggttgagggacgccctcaagccggtccatttgtgcggctgggctgccctctggcggctttatccgggtgccatccagagtcaaaccctcgaaatcgcttttcgtactgagttggtctgcagaaagaagaacagatttaggaggaaggcggtcataggaaactgaaagtgcgtcacgcccactcccgtcacggaaactggtctctgaaaggtggggtaaagataaagcctttcaaatttgaggaagaccttcggtcccgcctccatttcacgtccggcttaccgtcgtttacgacagtgtcaggatcgcgggcttgctttccggtagcgtgggctgacgcctcgctcaatttctcacagggctgcgcaggtttcccccgtctgcgaatggaccactggaggggttcaaaggttcgcgtcccagtacgggaatgagcctctttgatctcttccggggctttttcggctttcctggacctcggaggtgagagtaggtccggctcggacaagggtgggggtcgtctgaggggagcttgacccctacgtcttatttttggaaaaacatcctctgtcccactccttcaactcctgcagagaggacagaagtcgcaacattgaacactcaccccgccacagtaaccaaggcggtcattaagaggagaaacagcaaactaagcctttctccaacctggggtgatgcaacagggacccgggcggggaagaccgtgagggtctggggaataagacagtgagcaagtgagcaggaccttgggagagagaggagggactggggcacactgaagaaaaactgggggaaggtgtatgaagggagctgcgagctgaggtctgactttgattaaaaaaaaaaaaaaaaaaaaagaactgtcagccattgtattaatgttttgatgtggcagccagtcctccgaccctctccctagcttcccagaccccttgctcttgtcccactttgccacccatgagttgatttaatggcttaaatagtgctgaaatattggtggccaatctgcctccactctcagccacagagatcccttttttggagggatgactcgagatgaagatgatgatgaggaagaag

SEQ ID NO: 34908 - DNA, 1485 bp, Homo sapiens
gctcattttctctttgttttattgtcttgtggttaggctgtagactggaccttaagcagtggaattcttgtctcctgttcaggtgaagtgatctgtgaacctcccaacaacaaactggacaaattcagcggaaccctctactggaaggaaaataagttccctctgagcaaccagaacatgctgctgcggggctgtgtgctgcgaaacaccgagtggtgcttcgggctggtcatctttgcaggtgagcctcctagcatccaaagaaagaagggtaagagtgactcagccagccctcactcaggagtatgggatgaggtgggagaatacctaaggtaaaaaacctccagctgtgtatacaggcttcttatctagccagtatctctattccaccctggtgtcctgcagtctggggatcagggcagaagcccagaggcagatgtgttatttggctttcccagcccttcccattcttttccaggtcccgacactaagctgatgcaaaacagcggcagaacaaagttcaaaagaacgagtatcgatcgcctaatgaataccctggtgctctgggtgaggcgccccacatctggctccctgcccctgccctctcttctccttgggtgctccttttcctttcctctttcttctttggtcagtagacttcaggtttggctttaaagctgctagcaggtcagctacacaaaggcagtgtttattttaggctccttttagttggaagatgttatttaaaaaaacttcaggaacgtgcatgaatcaacaacttaaagctaaaacaaatcatcccttctctgattccagttatgatgatgactttgtgaagcatgtgaccttctgtttgcttttgccagggacaaggaggccttcatggggatggagagggaattaaaagaaaaatttccatttggaagaggttggcagggtcttttccccccaacttctaagaacgaaggatcccaaaggaaaagtttctgtttaagtttttggcagttcctgaatccttctcttgtttagctagaaatctgaactccttgttgggctctcctccccttcctgtgccccgactgtctgctgcctgcccgccacatgccagcttgtgaaggctggggctagcctctggtgagcttgtttccgccctggctttaaagagtgtgcggaaacccagcctggtgggcgaggttgtctatcacataagggctccagtcgccccctggtggccattgggcaccaatctcctattttgtttcaaagcctaaacagcggaggcagctttggaaatagatgtaggaaattggacagtggcctggttttttaccagtctctccagagactccaaaatttataagatttttgactaatcaggaaatctagaccaggagtggtggctcacacctgtaatcccagcactttgggagaccaaggtgggaggatcatttgagcctaggagttcgaaaacagcctggacaccat

SEQ ID NO: 34909 - DNA, 1989 bp, Homo sapiens
tgggcaacatggggagaccccgcctgtattaaaaaaaaaaaaaaaaagggtgggggagcggagggtgtatggggggaagatgtgaagataagatctgtttccctcttcaggagaaacggcccctggcgggaatcccgccacagaccgccaggaacaccacctgacacccacctccacccagggagaggctgtccagtccacacaagcctttctttggggtctgtctggaaccctgagctttgggcagcaagtggcatctggcttcagtgcccccacccccgaaacacagaaagaagccttaatcccttgaggctggtgaggccccaagtccacccctcccacaagacaggtcttcagcactgcgctggcctcccgttgggggtctgttcagccactgggaatgtcttccttggctcctctcgctgaccctggctctcctgcacccaggatcctattatgtgtgtctgaggggcagggccaatgtcattttaactttcattgcctcttggggacgcgttttctccgtcgcgatatagacacacgcctccacggaggctccgggcactcgggctccccgttttctcccctctgccgcaggcatccctggtcttccttccctgcgctgactgagcacctgggctcctgtgggagtggcttccagcccctaggtccccatcgtcctagtgccttttctgagtgcgtggaggtgaagtctgtccgataccgcagctttgttccactgagcctgcttatctccaagggcgttcctctccactccactaaagcagcacacacccatgggcgcccactgccgtcgggaggagctccacctctgaactctcacaattcattcagcatttggccatccatattcttcagttcttcccgcttccatctgtgctcccagcgaaaactacggcccctccctttcctcctggtcgcttgcttccatatgtgaacccttacttgcttcccaatccagcccggagcccgtggtctggtactcgtcgctttgccccggaacattccagccttgggtcagcccagcgtctcccagggtgagctgtggaatgctgaagggcagcacacaaccacggagcaagaggagcggcagctgcccgggctccctccgcaggcgcctctgcacggcgaggagacgctgggaacctcattctcctgcccctccctcaactcctgccaccgcctcccaccctgccctcagcagatggtgctgcctcctacttcacggagcaaataacttctgcggctttcctctcaactacaaatctcactgcgcacaggcacgccggccttcccctttcctttcccctgcctggggaggctggactctcctgtcccgctccctgtggccccgcccctcccctcctcccaccactgcaccttccattgtccttcaccaggaccttctcttgaccctgccttcatttccctctccgttgattctttccttccccaaattagcctgctcagttttcttccccctcacctgacccctaacccctatcaactctgttgtggtctgtgtccctcccattagcctctctgttatctcttccactgcctgtaatctggcatctccttcaccagtccctgaaatgctttcactaaaatcacctttgaccttcatgttggccaagtccagaaggcatttccaggtctgatctgacttgcaatctcttagtcatttgactgtgttggctgccttctccttgaaactctgccctctgctgactttgttccactttctcttggtttaactgctgcctctctggttgatccttctgtctccttccttggagctccttcctctgttcttcttcccaccatgccccaggactccatacttggctctaagcttttctcttctgtgcagggtccttgaaggtccccatgcaaacccatggtttaaataagatttgtttaaacaagtaagatttaacaattaaatggagagtcaccattgttcac

SEQ ID NO: 34910 - DNA, 7035 bp, Homo sapiens
attcagctatgaggccatcctatcagctttaggctctgtgggggtccttgagagagttcccctccaagggacggacagatggtccccttcaaggtccttgtggttgctcaaaagccaggtgcttgtttctttctttttttctctccttcctttccttccttcccctctatccctccttccctccctccctccctcctcccttccttttctttctttcttttctttttttttttttctttccagacagggtctcactgtcatccaggctggagtagcagcccccaatcacggctcactgtaccctggatctcccggactcaagcaattttcccacctcagcttccctagtagctgggactataggtgtgtaccaccacacccagctaatttttaaatttttttatagaaatgggggtctcactttgttacacaggctggtctagaattcctggactgaagcaatccacccacccggctctcccaaagtgttggggttacaggcgtgagccactgcccctggtgttagtgtctgtctgtcaagtcaggagggcagccatgaacgttctgatgtctactgagcacgtgtggcccagaccgtgtgtcaggtgtttaggtgccatccacagaaccttcctaataaccctgggcagcataggctttcttatctctgacagatgaggaaatggagactcagattctgaaccgaagtcacagacacagtagatggtaggtctaaatggggacccaggtctatctgactgcaaagtccaaaccgtttccttgcctctgctgcagcctgcgaggagcagctgggcagaaagactgtgcctttacggtggtgagtcttccgatgcccaagcctcaccccagaccgatgaaatcagaatctctggagacccgacccagacattggtgggttttagggctcctggctgattccagtgggcaaccgggctaccaagcactgttttaccctaagggtaagaggaacatcgcctcctcgagggctctccaggtgtgcctttcacagcgtaatcccgttcacgaaaccaaaaatcaaaactaggccactgcccactggtggctgatacgcccttttctcatcaacagaaccgggaggaagggctctggtggggctggcggtcccctgttctccccgctcaggtgcggcgctgtggcaggaagccaccccctcggtcggccggtgcgcggggctgttgcgccatccgctccggctttcgtaaccgcaccctgggacggcccagagacgctccagcgcgagttcctcaaatgttttcctgcgttgccaggaccgtccgccgctctgagtcatgtgcgagtgggaagtcgcactgacactgagccgggccagagggagaggagccgagcgcggcgcggggccgagggactcgcagtgtgtgtagagagccgggctcctgcggatgggggctgcccccggggcctgagcccgcctgcccgcccaccgccccgccccgcccctgccacccctgccgcccggttcccattagcctgtccgcctctgcgggaccatggagtggtagccgaggaggaagcatgctggccgtcggctgcgcgctgctggctgccctgctggccgcgccgggagcggcgctggccccaaggcgctgccctgcgcagggtaagggcttcgggcgcacctggagggctggggcagctagcggctgggggaaaccgccttggtcaccgcagtctgtgggaggctggagggaggaaaggaggtgcgacggatccccttttctgtggctgccttgaggccccgcgggtacctagctgtgtggtcgcgggtagtggctcttgcgccccctgctgcgcttgctcccttggtccggagcgctccccggaatgcccggtgaagctgtgcgggaaccctgcggtctgtgtacaggactgtgtccttgcaaacctgactctcgagcttccttcccagtgcccccaggagcctttacacaaccgcgtcccaggttactctaaggggagactgcccgagagggcgcgccccagcggggtgatgtacccgcctggggagtcctttgtaccagcgcccctcttctccctctgcattgggggtccacctcgcctggtcctccccccacccccgcgggtgcatgtgtggatgacagtgccctgactatgaagggactgacatcacgggcgctgagtcacggatcttcccgctgcacggagtcactttggcagccaccaactctgggaagccaagtgccccagtcctgggaattgagtcgggaggctggcaagggagtgagacctcctggggctggcacgtgctggactcccctctagaaaagagaaggacccgtgagggagagggcagaggcacttactgctcccgttgactgtaatctgcccctggcaaaccaggcttttcttgggctctggccgcatgcccagctgcgtgtctagtctctcttctggaagagttgggcaactggctctccagaggtttattttagggtcccagtgcttctttgaggacacagcagaaaactaaggggcagctgacaggcttctggaacagctgacaggctggggaggctgaaggctaagactttcaaccactagatcacactgaattccagtcctaggtgaacactgatctctccctttgaggaggtgactttctgcaactagaggctgagctggagtgtctgaggctctctttgctttttggatggttgtggtccttatgattggaagaaaaaaagaagggattccattttcaatacacatttataactcctgccagtaacagacactgttgattggggcacccattcaatgttttctaatcctccactgtatctacatataactttgtttgaaagaggagactgaggttcagggaggttgggatggcgggatggcaggttgtcaggccccggtgatggaggccaacccctcccgtggctctgtgctccagtgtggtagatgtctaagactctcaaatatagaactagatcagcaggcagagctgggggcattggggcaagctgagagtcactcttgtctggctgagtgctgggacagaaaaggctgagggagggaagtggaggcccaggcttgcccatggtggtgttagagggatgcaagacaggttccagggctcggatggcctcaggagcaagcagggctcccttggctgcctctgctgctgtcacgccagcccaaggctcctgccccagggaggttactgttactgctgtagttgccaccacctgttgctcctgagtggatgctaggcccttccagggcagccagttacagtcagttttccatttccctggtgctcaggaaggattaggagaggtggtctcatggcctgaacagcccatgaaaggcagaactgagagactggggaggaagtgaaagtcctcccagctcagaaggaaaatgcagagaagtagaaatacccagcccctctcccacacccacacagactcagcccacaaactggagagtaaaaataaagaaatcgtacaggaagcatggagcaaatgactgtgagatgtttcgctttagagaagtgaggagcagagggggagcagaggctggagttggctgagaggggaaatccgcaggtacagcctgcggggctcttagagcccagaggtttgttttcctcgggatcagctgccgcccacacaccctggagctgccaggacttctcaggtgtactcgttgtctaagggcctggactagctgggacttaggcttctgccggttccaacactctggtgctggaaggctggacttgggtgactcaagttccctcttcctactgcaatgcaagaaaatacacaaaagaagtatgtatacctttaagtatctcaaagagctatctcagcttctgaatttccttctagggcacctcttcctgcccccattacccacacacgtgcctagcctcaccctaaatcagtatttctcaaaagcttagttctgagcctagcatcagatctggtgtgtgtgctgggtgggagggctttggtaaacatgatgatttttgaaccctaacccagatttattaaataagaacacctaggagtgaggcctggggcatgtccttttaaacaaactgccccttgtgattcttaggcactgtcaggtttgaggacggctgcctaaatggtgtcattgaggaactgaatgaaggccctcccgcttcgggctctctgttgccagaaatctctccttgctttggcttgctgcttgtttattcattgcagcaaacatttcttgagtcggtgtagagcctgtgaggcctgtgtaggatcagctatgcagactccaccctaaaaggagcctgaaaatggtcatgggtaaatcctgagaagggctgagaaaccccagactctgaccgggccactgggtaccaactacccgtgaacagattgtctggcttggggtagggggtggttagagagaggaagttcctctgactgaggaccaagatcccaaggcagcaggcacactgatcctgaccctgaccctcatctccagccctcagcagccagggtaaacaaatactcccctcactgggtatttgtagattacacaaagtaacctaggtgctgactgctgaaaatatacactcccttcccccgtctcctgaatcctggtcccaccaggcctggaagccacagacccagcaagcaaaagagtttccagtcaatgaatctagtctggattgaagctgtgctctgtaatacggtagccactagccacgtgtacctatttaaatttaaattatgccagcgcagtgactcacgcctgtaatcccagtactttgggaggctgaggcaggaggatctcttgagctcaggagttggagaccagcctgggcaacagggtgagatgccgtctctacaaaaagatttaaaaaattagctgggcacagtgacatgagcctgtagtccctgctactgagaaggctgaggtgggagaatcacttgagtccagtctgcatggagccatgtttgcactaccgaattccagtctgggcgacaggagaccctgtctccaaaaaattaatttaaatgaaatcaaataaaaacttagtttcttagttgcactagtcacattttaagtgctcaacactcacattgctagtggctactgtactgaacagtgcagatacagatctcttccatcatcgtggaaagccctactggacggtgctgggctagagtgttaaccagtttcttccagaggttttctgttctcttttcctttatccccctctgccttctgctctcctccacctgaacacagctcattttgcataggtgatggctaaggtcttcaagccaggcacatctctgccctgcactgccaagtaaaaatgataacaccttgggcaagtgatttaacttctttgacagccagtgttctagaaaatagaaataattgtattacctcgaagggtggttatgaagatgagatgagctaagtaaggtattaaatagagtgtttacagaagtccctaacacacagcaagtgcttaaataagtgtaggtgatcattcattcactccaaaaatatatttttggagtgaacacctcctactctgttccaggcactattctaagagctggagatacaccatgaataaaagagacaaaaaccccaggcttagttgagtttcattctagtgtgggagactattaacaggatgtaaattaagtatgtggtatgctagcgactagtgctaaggagaaaaactaaagccgagagggagacagaccccatgtgtgtttgtggcagggtggggtggcatggtgccttggatgggaggccagggaatgccttgctgagaacataatatttgagtgaagacctgaagaaaatatacaaatctctagagattccctatatgtccatcttgggcaggaaaattcttgcctcctctttaacaatgtgtactacctgagggtgtgttatgttctggagcagagggctctgtggggacacatggatgctccctgccctggagaagtatctctggggtaacaagtcctcagccctttagctccttgaagtctagcagagggaagtgctaaatgccaggtcataactgcaagtctgcaggtgggatccttgagggctggagtggcaaggggaaggtgacaaagaaaaggccttttttttttttttaaatacaggatcttactcccgtagcccaggttggagtgcagtggcacaatcactgctcactgcagcctcgacttcctggtctcaggtgatcctcccacctcagcttccggaatagctgggactacaggcgtgcaccaccacatctggctaattttttgtatttcttgtagagacaggatttcgccatgttgcaggctgctctggaacacctaggctcaagcagttcacccgccttggcctcccaaagtgctgggattacaggcgtgagcctttgtgtccagctgggaggtttttttgtgtagttaatctgtgttctttaccctctcctcttgcctgggatctgaagaggtcaaaagtccctggcaaaggcagaggcttttctgccactgggttcaggcttgacgttagctggacctcagcagcctcccccactcctgctcatcccttgccagctctgtcgggtgctttctactcttaggagtatgtccctgaggccctgcatccagcctattctccccagcacctgttctctgaatcagttcccactccacttcccaaccgctttcccgaaaagcatcctttggtcttccctctctatatgatggttacaataactgttaccatttatggtgtgtcaactgtgtgcaagtagctgtgctaggcccttggcatctgtgatctcatgtaatcttcaaaacagcctcaggtgagagaagtgctggccccattgcatagatggtgggctgtaggacaagatgagaggccagttttgcacatatggaaacaaatgtcttttgttttcgtttttgttttgagacagag

SEQ ID NO: 34911 - DNA, 8463 bp, Homo sapiens
tggtctcaagagatcctcccgcctcagcctcccaaagtgttggcattacaggcatgagccactgcacctggccaagtaaactttagagattaattagggaacactgatgtatttttaatgccgagtcttcctatctcttggtaggcctgatggggcttatgatgagggaggaggagctggggcaggagagcccgacattcaggtctcactgaggggagatgtgcccaggacacttccactggaactgcttccttgatggtgatgtggagtgagctggaccagtgtgtgcgtgcatgtgtctacccaagctcatggcacatgggggagcggagggggtggggatggctcagcagtgattggaatgcaagagtggggactttggggcctgtatgaaaaagtgttatggcagagtgacacacctacgaaagagtgtggtcagcataggcctcacactgggtgggtttttacaaactgaacacatgcatggaaccaccattcagaataagaactgaacagaagcatcctcaggggagccctgaaatccccctatgcacacccctcaaacctccccttatccctcccagctgctccatccacacctccacgtgacttcttaaatcttcagctttgctgcctcatagctaagggggtcagggaggggaagctggggggtctgtagatatggaatgggggtgcgtacatcaggtccctccctctccctgccctcctgccaccttccagaagcacataaaaaaaatctgactgagggccagcctctttgttatactctgagactgtgctcagagatagaagacaagacccctaggccatgcttctgggaaggcagagggctgcgtgttaagcctggaccgagagtcccagagcccagctccggtcctgacaccatgcactgctgtgtgacttctgggccctggttctcctcatccaccaaaatgagcaggttggcctgagtcgtccttaagagtcctgtatagccttaaaacagcgctccttatctcagcaccctacacactggctgtagcttctcctcactgtccctttcaggaccaaaatactgggtgtatccatctgcaggtaccaatggctttcttctaaggccctgctgcgtcctgcttttaatctctttatttctctatctgctcctggggttaggtttgggccagggagtggattgtttgccctccttagatatcctttctttttttgagacagggttgcccagggtggagtgcagtggtgcgatctcggctcactgcaaactccatctccggggttcaagtgattctcctacctcagcctcccgagtagctgggattacaggcatgcaccactatgcccagctaatttttttttttttttttttttgagatggagtttcactcttgttgcccaggctggagtgcagtggcatgatctcagctcactgcaaccttccggtttcaagcgattctcctgcctcagcctcccaagtagctgggattacaggcacccgccaccatacccggctaatttttgtatttttagtagagacaggatttcaccatgttggccaagctgatctcaaactcctgaccttgtgatccgaccttctctgtctcccaaagtgctgggattacaggcgtgagccacttcacccggcctaatttttgtattttttggtatggatggggtttcaccattttggctaggctggtcttgaactcctgatctcaggtgatccgccagcctcagcctcccaaagtgctgagattacaggcgtgagctgccgcacatggccttagatatcttttcctctaattagtttataatctctgagagttgacccaggttgtaccttcttggactggagccaggtggttatctctgatgctgccagaggaggattagatgttttatctcctgagttggtcacacgcgcacgtgggtctctgagtcagcattgagcattacctgtttatgggtccaaaggagcctccctcccagaccctctctccagcagtgtacagtccatcgtgtggatgggaggaaggcaaggccaaggtaaatactgactcagacaaatacaagcaggtacaagaagtacaaatacatatgtgggggaggagggagcaggggcctgccagccaaagctagtcatctgagaagagggggttgcggacaggtggggctgggagctgagtcagagaaggttgctgggcctcccattagagcctgggagccttgacttgccgtagcctgcggccttgcctcttcctggacagtggccgagggtgccctctgaaatgttaaggagaaatgaatgggcccagatggtggggtgacttggggaggacgcgagatttggagtccaaggggaggcagttttaggctctaactcatcctatacacgctgcggctgtgggggaagggagagaaaggccaagggcacgactcctggctcctgagagtccccagtgccccattaggttggcagctgcagtgatggcgctgacccccccttgtgcacacccctcaagcctcagcattcccttccctgggcctctgaagggtggaaagatgtgagaagagcagggaagaggagaggaaattgggagagggggagagagagggtggtggggagcccagagaagggagctgggggtggagcatggagaggtacctgggccaagtagagagaggctttggccaggctcatctgggtccagcgtggattccctcatgcatgagctgtgtgaatttgggcaagttccctaacttctctgatctcttgttgcctcaacaatgaaatggggacaagacttcctccctggcagactttttgtgagtagtgtgctcttagggaaagcccagggcgcagggtaagtgtcccagttgctaatgattgttatggttattatcacatcaaagccaggagccagtctcagtccaaagatggagaatgcaagaacaggtgaccaagagcactgggacttgtcctagccctcgtgggaccaaattctatacttgtttccatgtggacacaaggtgtccacaggcttctcctggaggcttctcagcacccacctacttttagatcaagaccattattgctgacaggggacctttgtttcctctgtagccccttctgaaatcctatgcctttgcaacccaagaagctgggttaggctgggggcctcctgtgctgccagctggcctgggcagcggggacctgcgtctctgctcagaaactggggtggtgagatgggattagcaggcacgagccaagcctgtgtcctcggtggcaggccaggcagctggttcaccgcttacataaacggggccaggaagctgaacttgtttttgctggcaagagctgcggcaagctgcaagagagttgagaaatatgtgtctccgtgtgcgtgtttttctctggttattgacatttgcaagtttacttgaagagggggaaaaagtagaaaaacaacaaagctgtttggattcctggcacccaaacttaggtcccaactggggaggaaccccactttcccagagctgtgctgcagggtccccagaccaaagggtgtctgggccatggtgggggtcccagtgtccctgggagggggaatcctaggccaccggggcagggagatatgggcttgcttgttgggagttactaggacctaaactctctttcccttgaggaatgggaggcaagggaggttgtgggaattttccctcccctagagctctccagggagaaagaagcatttttctgagggcactgggatgatctggtcatcatccttctcccaaagccatcaactattaaataataaatccatagattcattatgtgttttcaagctgagtattgtttgcttcctgccctctgagagctaatgattgggcgccatgggatgctagaccgcaggagtgggggcctgtgggggatctacaggtcacagtctgaatcctcatttcacagagaaggccagtgggctctgccaggggcggtgacgtgcccatggctgcctgtgagtcatcacaagaccaggaatagaactcaggtcacctgacagcacagagctgtttcctctacaccaaggggcctcctgcttgtggagatgtactttattttattttatttatttatttatttatttatttattttcaagaaggagtctcgcccaggctggagtgcagtggtgcaatctcagctcactgcagccttcgactcactgcagcctctgcctcccggattcaagcgattctcatgcctcagcctcctgagtagctgggattacaggcacacaccaccaagcctggctaatttttgtatttttaatagagacagggtttcaccatgttggccaggctggtctcgaactcctgacctcaagtgatccacccgtctcagcctcccaaagtgctgagattacaggcgtgagccactgcaccctactgagatgtactttatattaaagaacaaatcaaggcagactgtacgtttgtgtcagcccaaccccacacaattaatagtcagtgattaaactgaccagaccagaccagacaccaacactgactgttgaggaggagcttgggggtttgttttcgggaggcaatactgcctccttttgtgatcttagtcccaggtgaggtgcttccttgtcctctctgcagaatcccattctttcttagcctgggctgaagctgctccctccctgtatgtgaccctggccttggcgcagtccttgggtgctcttcctccctcctgcctctgcgctgcttcatgatgcacaggagccaaggaggggcaggggacagtcggttttttctcagggagattggaagagaacagaaacaagaagcaatggaatgctcctgtcctggaggttggtggggcagtggggagaggtggggaagccattgagcctgcacatacttttgacaggcttggctcatgcctgccaaccccatcccaccgcctgggtttctgagcagggacatgggtccccactgcccaggccagctggcagcacaggatggcctccaacctaacccaggctcttgggttgcaaaggcatagcatttcagaaggggccacagaggaaccaaaagtccccctgcctgtggagtcaggcctgatctctttgagggtgctcacaccctccatgttcccctgtaggtcttccttccctccttactgcatttcagatactccagacaccagccctccccagaactctcactgttttttgtttttttgagacacagtcttgctctgggtcccaggctggagtgcagtggcacaatcacagctcacttcagacttgacctcctgggctcaagtgatccttctgccacagcctcccagatagctgggaccgcagacatgtgtcaccatgcccagctaattttagagttttttggtagagatggagttttgccgtgttgcccaggctggtctcagccacctgggcacaaacgatcctcccatctcagcctcccaatgtgctgggatgacaggcgtaagccacgatgcctggtgactctcaattcttttttttttaattattattattattattttggagatagagtttcacttttgtggcccaggctggagtgcaatggtgcaatctcagttcactgcaatctctgcctcctgggttcaagtgattctcctgcctcagcctcctgagtagctgggattacaggtgtgtgccaccacgcccggctaattttgtatttttagtatggggtttctccatgttggtcaggctgctctcaaactcccgacctcaggtgatctgcccgcctcggcctcccacagtgctgggattacaggcgtgagccacggcgcctggtgactcagttcttaatgccttgcatatactgttctctctttatggaatgtaactccctgtggctccacttatcaaacccccactcatttatcaaggccccaataaaatctctcttccccctttagaataattgatccctcttcttagttccctcagtatgttggagacatttatatcaggttggcctgtattacagatagttttaagttctagggctttgtggggtttaaagaagattacgatatggaaatgataggaaggagtgccagtgcattgtagatgctcagtagcttcaatatggagttttttttttcctggattaggaacttctgaacttgcacatcatgggtgcacaaaaattattgaattcttgaagaagggacaggcataggcttgcaatcctggctctgaatgctgagcaattgctcacggacaaatgctccgttgattgtgtgctctttgctaaatttcagtgtgtgcaccagccacgccttcgcccccgcgtgccccgtctcctagggcctactatgcaaggcctgtgtcaggccggggtgggagcatgagaatgactgggcatatctcccaggaccaggaaggactgctctcaggagccccctcctcacctggttcctcatcgtgtctcttccttttggcccttctctttggtagggcctacttagggagggccccagcagattcccagggaacagaaaaacagacagatgggaggaatcaaggctgagcccagggatggtgtcttgtgtccaccagggaatcaggcctacaggggagggctgggctatgggtgcagaattcagtgacagtgacagtgagagaactcagcagtgcaagggcaaagtggcactgtttggcctgaaggtgctcggaagctgcttgtattgaaaaatccaccctcatcccccgacatccctcagtgcccactgcgctctgccgtgccctctccctccttcctagaaatcctaactcacacagacccaggctatgtagcttgtttaattaaatatatatatatatatatatatatgtattcattataagagcaatataggcaacttatagaaaattcaaaaactacagaaagacacagggaagagaaagaaatcacctctaacaccatcatttggagaggagggcagaggtagggagaggacacttctatgaatgttacttgttctgagagtcacccatgaggcttccccactgccacccagctgtcaggggtactgagtcagagatttgggtcaggaggcagagggctgagtgggtgggagggaaggggcggtgctgcccactctgactttagcaagtatgttttcttatagtctttatgagtatttctttgatcattctgcatacagtgcttttaaaagcgtagttaacacagtgttgttcgcaggttctagaggaaatatattttgaagcagggctgtgacaggcaatacttgccaatgggtggtttataattaatcattccctgttttaaaaaatagtgactcagttttaaagattcagaaagccattactcaagttccttggcagaggaagtggccattatgttgctccctgcagctctgcttttgtggaagagggaaaaaaaagtatttttatttggtatttctctgagctgctcagatactttggccattgttagtgagtgcaggagcagaacagcccctgctattgttcaggctggccgctaaacatggcaagagcttcccgctgaactggggtaggggaaatgaccagaaagacatttactggatttggcaaaggcagaagcagaaaagagagcttcctctggctccaggagtctatttcttgcctcagcgggctcctctgccccccagcctggggcctgcccatcacacaacacgagagggcaccacttagaccccttcacctgcaaaccgtgcgcctgggagtttttggtgccgagaccctgtccctgtgggcacccctaacatgccctatattcaacaaacatgcatgaagcacctactaagttctctgatgagtgacgaccaggagcttccagtgttgtcaccatggtcggggaagggacctttatatagttgaggactgtgccatgtgaaaagtgccagtgattggatgagctgcagtggtccttgacccctaccttagaccttcatgcatcctgcacttgtgtctgttgcatgccatgtgaattctgatttctgctaatcagcgaatcagctgaggaagggatattgcaagcattgcactgggagcagttctctttgggcactgtttccatctttgctcctgcaagtttgtcatttgtgcaggaacttgaaatccgtgttaggttttatcttgacagctgctttatccagtggaaaatggaaaagtggaaatattgatgcactgattagaagtgtcgttgcatcttccatacgtaaccgcattcaggcactgatggacttcaagatgtgggctggatgtggtaaactgctgcctccatcaggtgctcattggagttcaacgcactggaccgtgtgttcagttgtgatgtagcaggacaagccacagacaaaacccctcagacaccgagtt

SEQ ID NO: 34912 - DNA, 2349 bp, Homo sapiens
ctaaaaatatattgttgaagattctgtgtgaaagctatactgtagttgtggctttttataaccctttcaagccctctgggcagtagcagtccaccccttattgccctcagtggacttcaccttctagggactcagaattttttttttttttttgagacggagcttcgctctttttgcccaggctggagtgcagtggcgtgatctcggctcactgcaagctccgcctccctggttcaagcaattctcctgcctcagcctcccaagtagctgggattacaggagcctgccaccacgcccagcaaattttttgtatttttagtagagacagggtttcaccatgttggccaggatggtctcgatctcttgacttgtgatccgtctcgcctcggcctcccaaagtgctgggattacaggtgtgaggcccagctgggactcagattttgctgaggaccaggacagtactgtgtgctgtgtcctggccttgcagcagtgaatgtgtctcccgtttctcaagggcaggtctctgggatgcctgactgtgtcttccttgccagtgcctggctgctgcagcctcctcaaatgtttatcaaacacaggacttgcccaccgtgggagaaagtaaggccataggtgtctcaggaacctgcccaaactcgcctggctgcacggtgacaattcaaccagctttcttacccaaggtctgttggtgaccagagaaaaccttagatgaccggctgccatgatggccttatatctgtcccttttctgccagccttgaggtagagggtgccagggaggaggactctggctctaggtgttaaagtgagagggaagtgtgaagggtatctgtatagctagacagggctcaatgccaggcagagctgtctccgcccctttgatgtctatgtctctgtccctggactgtggccagtagccagtgtggactccaacctcaccagctttaggggtgttatctgcctgggagtcactgatccttactccctcctctgacagccaccttggatggggtgaaaggaaggacagcctgccaagtatgagataaaaacgcctcataaacaagaagggatttgcaggccaggcagagagccttgtgctgcttctgagtcccaggagcatgggcgaggaggtgaggtcaggcactcagcagctgctggtcctctctgaaatctttggccagatttattgctactgcttgctaataaatggttatgcatttggttcaaaggaccaagtgtgcttacatgaaaactggctgtgttccctggcctctgtttccttagctggttggactaatttgattggttaataaatgagtccaaggtggttgggctaatttttatcttagattctatgactctataactgctactcaaaaaaagtgtacttgttcctttaatctttaatcttatttttcttgagtagtagaatacacccaatttttttcaaggggtagagaatgcattttttttttaaccttccagtttggtccctagagtaaacacagcattgctgtagtagatgtagggtactggagggagcatggaacagggaaccagaagccctggttcctaccccagctgggcatctgggccagtctcttgattcctctgtgcctcagttaccaactatataacgggcattctgccatgaataccctgcgatttggaaacctcctgtgtacgtgtgcacttgggtgcctggcattcattcctaatggcatccattcgttcacacattcatccagtactcagcagactcctgccatgggccaggcaacgtcccgggcacttggaatataatggagaacaaagcagggtgcctacttctgtggtgcttggagtcttgaggggaagagagacacggaattcgtaattacatggcagcgtgtgggtgacgtattgcagaatgagggcctagtggagctgggggaccggaaacgatgtttaggccgagacctggaataggaggagttgtcgtggggatgatgtaggaagaacgagtgtgaggaggagagcgaggggagttgaggggagggctccacaccttctaaggagtggggagagatgaggcctccaaggacagaagggccctgcaggccacgctgaggagcttggacttcatcttgtggatggtggcaggcccttgaagggttttctaatccagggagtggggtggctggatcatggcttcagaaggctctcccaggcagctggatggtgaagaccaggttggggaggtcaccaggagaatgctgccctaatccaggcagaggtgacggtagcctgggccacttcatcattatcactgaggcctctcgtggcttcctca

SEQ ID NO: 34913 - DNA, 1048 bp, Homo sapiens
agtagctgggactacaggcacctgccaccatgactggctaatttttatatttttagtggagatggggtttcaccatattggtcaggctggtcttgaacccctgacctcaggtgattcacccacctcagcctcccaaagtgctgggattacaggcgtgagccaccgcgccctgcccatttatattatttttaagtgcacagctctgtggcattaagtattgttgtgcaaccatcaccactttacttctccaggacttttttcatcttgtaaaactgaaactcagaatctgttaaacagtaactttcctttcacccactccttcccccagctcgtggcaaccaccagtctacttgctttttctgtgagtttgactactctagtacttcatttgcttgcttgcttgcttgcatgcctgcctacctgcctgcctgccttcctttgtctctttctgtctctctctttttctctttttttttgagacggagtctcactctgtcacccacccaggctggagtgcactgtcgtgaccttggctcactgcaacctctgcctcccgggttcaagcaattctccagccttagcctcctgagtagctgagattacaggcgcctgccaccatgcctggctaatttttgtattttttgtagagacaaggtttcaccatgttgcccaggctgcactctaggtacttcaaataagtggaatcagagagtatttgtcctttggtgactgacttatttcacttagcataatgtcctcaaggtttattcatgtggtataacatgtgtcagactttcctccctttttaaggctgaataatattccattgtgtagagataccacattgtgttgattcattcatttgtcaggggacactgggtttgcttccccattttggttgtgcataatgctgctatgaacacgggtgtaaaatatctgtttagattcctgctttcagttcttttgtgtatatactcagaattataattgtggcattatatggtaattctatttttaaattttcatggaaatgccatgccgttttcca

SEQ ID NO: 34914 - DNA, 1189 bp, Homo sapiens
taggcatctgaagtgatggctggcaggcagcctcttcgtcagcagtggattgcattttgggtagaagagcctgaatgctgggtccatacaactgtgactgcattcccagcagaaggagatggttttgtttagatgtgccctctgtctagtccagggactctggcagtggtaggaagagcctttctgtgggaagacatggctgcttgcaaagctggtttgttctttccttcattcaaagaaatattttggcgatcctactttgtattcggcactgtgtaagctgctggcagtgttacagtgaaaaagacacatgtggtccctgccttcagggaactcagtctagaggtggaaatggagaaatactgggaggggcacttgctcagcttggagtggggtcaattctcaaaggaaatgacatcacctcatctgagatccaaaggccaagtagggactagaccacaaaagggtgcagcaaaggtagagaaaacagacaggagagaagagggaacgtgtgtggagagccctggaggaaaaagatcatggcttgttggagaactgaatgaagttcatatggctggggcttgagtaccaaatgcagggacaggcaagagatgacacccccatggagaaaactgcttccaaacacttgatttaaagcatccaatcctctctgacattgtcctcaaaggaactgccatcaaggaggtccccaaagccttccgtttgttgtaccctctttgtgccttgtgggagcaggtggaatgtcaccagaaaagccactctgaaagtgagtaggagtctgtggctagccacaggcgctcagaaaccctgagcttgaggtgtctctcttgccaagtggtggaatcctggaatctagagtgggctttgttaagaaacaaacaaacaaacaaacaaaaaacagttaagcttgtcaaatggcctgttggttggcagagctgtttcattttctgggaggggggttggaggggaaggttcctttgaggcttttgacagcaccagctaagtggttttcttctcctcctattcctttttctccatattctcctcttcctcctctatcttcaattttttttttaacctagtgcaagattcttcttcagtaccactgcccacattcctggttgctggagggagcctggccttcggaacgctcctctgcattgccatt

SEQ ID NO: 34915 - DNA, 917 bp, Homo sapiens
gcttaataatcttgcccttgtccagctcgggccccagggaggaaggggaagaggacgcggaggaagaggagctggagctggagctactgctgctggggtagttgctcttcccgttcttctcctgagtgtccaccttgatgagcctgttgatgtaggtgctgcagcccgagctcttggttgcaccccggtggggctcctcctccgtggcccgggagtttttgcggcccttgcccgcggcggcctgaatcagaccctgcaggctgtcgcgggacagccggctgtccttggggccgacgccggccctgccgctccccagctcggccgccgagttcttgcggcccttgccaggacccggcccagcgccgcccgcctccgagttcttgcgcaatttgccgccgccgcccccgggcttggcccgctccgacacggtcttcaggttcagggggaactccttgaaccacttggccgccatgagggggccccggccggctcggcccaggagcgtcggggccgtggagcaggcgagcgaggaagcccagcccagacacgcagaggcgccaggggtcggggaccactgcattccccgtgactggggcgctggaggccgcggcgaggccccgcgacggctgctccgtgcgcccccggccggccgtcgcccacgcccggcagggtggggttctcacggctcggggcgccgagcgggcgggcgctagcctctgctccggacacggcaggcgacaggcacgacgcgcggggggccccgcccgggctcgtcttcaacgcctgcccggcccgaggacaccgtggctctcggaggcggcgggcgccgggggcttccccctgctctttcctcctgcggtgggagaggccaggcccacggaagccccctgcggcccagcccacgctcccagggacca

SEQ ID NO: 34916 - DNA, 792 bp, Homo sapiens
atttgaaccaaacataggaaactaccattaggttgaaagcctgaggcagctgggatggtctttcttgtgtctcttctttgcaccccagagcatgatataagtggtcctaacagattctggataatggagaagccctctgctggttttcctggcattccatgtagaataggtagagaatatttaaccaatgagcaaataaatgttggcatgtttcatgagtttggagtgattgatacttctttccagccacccttccactgccctgccgtgccctctaaaactgctgcagtgagattagagcctgccagtgtgggctctgggccatgcaaaccctgcctgggatatagatacatgtttgaagtgtaggggaacaacctaagagttagtttcattatttctccttgccttctaagtggagagaagaaaattgtttcatgatgatatggccttgtttcttttttatactttgtactttattagaaccctaaacttaaggtcataaaagggagtgctgggtttggcaagaaaaatggaggattctcttagagttagttggtgttatgcaactcacaggggcaggcatttccctctatgtcaagtgaacaggaaccccactgtttcttcaaataattttattagagccaaactatttaaataattttatttgtttcatcctttggtagatgagaaaaatacattacaaaatacattatacagaagacagctcacagtacacattactaaaaacacaatctacattccagccagggctggtggtaagttcagaagaaa

SEQ ID NO: 34917 - DNA, 2248 bp, Homo sapiens
ctactgagaagggggcatcgctgaaatgtgcagtgagtttcaggccaggtctttgcagttagggtcagtgccgaggcctaaaaccttgaaataagagtaaggggaagaaagacgcattcctaggtggcaaggtaaagttgtggaggagtagccaaaaagagccaaaatcatgaaccttgggatgtgggtgggttcgtggaaacgggtagtctaggcgccatatgtcggggtgtcccttgctattggggtcaatggtagagattctgggtgcactgcataacctcaagcagcagaaacaaatgtaacctggagagaaagaactgagccctgagaggggcttcggcctcccaggtccttcgagagcaaaaagctggatggagtgatcctgggtccctgacaaggggcccccacagaggcgcacgcgagggggtcctcaccgtgatgttgcagtggatgcggacaggatccccaggcaccgacccccgtggggggagatgcggtccgggcgcggcccccgccccggcccctccggccccagccagcaggaactcgcagctcagctcgtccaggcaggcgctggcaatgcggaagcgctcgtggccgcggtggaagatggactcgagcagcttcagctctcgcctcaggcagggccccggccccgggcccccccctgggccgcccccggcccccggcgccgccccctggccccccagctgctgccccggccccggctgctgctgcccctgcggctgcggctgctgcatcctccgctccgctccgctccggggccggcgggccgggagcctccggcctgcgctccgggctccgccgccgccgccgccgccgccgccgccgccgcggtccgcacttcctgatccccccttcgccaagatggcgccgccgccacctccgggacaggcccccccctccgctcgctggcccccccagccgccggaagccgcgcgcccctcctcctcctcctcctcctaggcggccccgcctccgtccccctcacgtgacttccctgctctggcctcctccacgtgatctctccgtctttcccgcccccctgttctcgcctgccaccctccacatgtgacccggggcctggggcttgcctctgtgggcgcctcagtgcgagtttgcgtatgtcgtgcgtgcttgcgcgcgacgccccttcgcctgcgctcccctctcacgtgactcggtgccgcgtgctcccaggggctacccgcgcaggacgctgtttcctgccccgggcgccgcttcccccgcccccgagccgtggcgagcgtgcccggcactccatggacagagaagaaagaagtgctgtcttccccgtgcagtctttatcctgctcccacatgctggtcttcggcgcaggatcctggagcctctgctccccgtgggggtgggcatgctgtgtcttcacactcgggtgggtggtcggggtaggagccgggaaccggaatggaagaggcgtggattctcgtcccagccctggctctcatggcgttttgtgaccttgggttaaccactttcccgccgagtctcagtttcctcatctgtacaatggctctcatgagaatgatgcctgtttttcctattcccagggagggattcgatgcgaggacaccataaaatgaggaatgataatagatcactgctgtgttatgtacaagtgttagttaatatcaggcctttcgcgcttttcagaccccatgggtctggacgaggttgggggaaggacagcatgggcttcctccacagagtcatggaaggagtgctgactcgggtggtccccattccctttcctaggcctaaatggctaacaccttgtcgcagtggtcttggcagctgccaggagtaggtagtgcctccggaccctcgctaggtggcactatcacaaaggacaaagctggttgaagctacagaaatcccgagctggcgttcgttttgccaagggcaagtgttattagcctgtggtaaggcctagtcaattctgctgggccaactcagcccttaaaccactggtcagattgccccgtttctctcccacttgtactaaaatgagctagcctttgctggaagactattcaattgcctctgcagaggcctcctttggtcaagttggggtatgggtatttaaagacgattatagtctgttcctggtcttcgtggggccatttatctggtttaggtagcctgaacagtttgctacatgttgactttgtgtctgtgtgtgcaa

SEQ ID NO: 34918 - DNA, 2164 bp, Homo sapiens
tccttaatcctttcaaaggagtgcttaaaaaaaaaaaaatatatatatatcttaacaaaattgaggtatataatttagatacagtaaaatttatccttttaagtgtataaatctatgaatttcgacaatcgccaccacaatcaagatatagaacatttctatttccctaaaaagctttttcatgccactcaacaatcaatttcttccacgatacccagtccctggcacccacggatccactttccatccctataactgtggttttttttttccagaatgtcatataaatggactcatacagtatgcagccttttgagtctggcttctcgtgcttagcataacgcacttgcgagtcacccgtgttgttacttgtaacagtatttcctcttcactactaagcagtatcccattatgtggatgtatttcagtttatctgttaacctgctgaaggccatttgtgttttcccagtttttagctataaagtggttaacaagctttctcctacagcttaagtgccatttttaactcccagaaggccttcaggaggtggataaggtgagctgaggatagtgtgcgctgctcaaagtccgaacgttgttcaagtggggctaaagcgggggtagggggttccacaaggggccctagcagaaagggagacgatgtgtctgccttgacatgggctcaggccttcctactcagacgggggcgcattttcccccaagccctcttcacgcactgctccattctgcagaattaatgagcaggatacaaattcacaaattcctaaaccagcaatgctgcttggcaagactacacacacacgcacacacacacacacacactctcacaagacgcacaaattcctaaaccagcaatgctgcttggcaagacgacacacacccacacacacacactcacaagacgcacaaattcctaaaccagcaatgctgcttggcaagacgacacacacacacacactctaacactcacaagacgcacacgctacgcactgcaacacaaagcctgtgaggttgtaaacgaacccagacggcggcgaaggtccaaggccggcccggcttacctgccgcggattcattgcgcccgcgaggcattgcccggcccgacccgccggcggcacgaccctggcccgaccgctgggccgcgccagcccctcgaggcccccacgcctccgctactccgcactggaagtggccccggggcgtcggcacgggaaactccgcgggtctgcgcgccgggcccaagatggctccggttcaatttcgctttcgtttcctcggaaagccttcccctccggaaagtttggccaagaggaggggcttgagcaaatcttgcgccacgcttggtttcaggccggttacaagtcgaacccctccgctgcatgagaactacggaaggtacttttttttttttttttgaggcggagtctcgctctttttgcccaggctggagtgcaatggcgcaatctcggctcactgcaacctctgccccccgggttcaagcgattctcctgcctcagcctacggagtagctgggattacaggcgagcgccatcactcctggctttttttttttttttttttttgtatttttagtaagaacagggtttcaccacgttagccagggtggtctcgaactcccggcttcaagagatccgcccacctcggcctcccaaagtgttgggattacaggcgtcagcccccgcgcccgtccggtactgtttaggaaaaccgccgtttcagtactgagctcctaattccccgcacaggccgtaggcaggaatacacgaatagagcaaaaggaaaacaaaggcacacaaaacctcaggccagaaacagcatgacgcccggtcctccctctctccgcgccagcgcggtggtggccgcgtctccaatgtggaggggggggggaggggatgggcgggagcgcagatctcgtcaaacgaccaaggtccccaccgtgggaccttgttaatgctcctactatgttataaacttaagcaagcagatgccagccagtaaaaagtaccaagagtagcaacagcagcagtgaacaatttaggatctaggtcataaaaactaccccaccaggcaaatggttaagtactttacatgtattatctcccttaatcttcacaacagccct

SEQ ID NO: 34919 - DNA, 2031 bp, Homo sapiens
tgggcccttactaataatagctagacacttcgaattctgacacctcgggcaaggtagatataattatcttcattttgtagataagcccaagtaggagtggagaggttaaataactcattcaatgtcaaacagctgcaaagtggcagacctgactccaaagttcatgtcccctttccactctatttccctttttcccatatagcaagcactaactgtttgtaaataacgaccaagatatttcaagagatctttaaaaggatgggaacaaggcttctctggtggagaaagaagttggcatcacaactgctgacagtttgacgcccctgccttctctgcccccaatgacccgctctagcaatcctgcctccctctctagcaacaagacactgtgtaggcctctgtttgcaagtctcctcccgtggcagcctagactctgctccctccgctaattgcatacttgggctcctccacacaacattcaaaatccaatgacaggtatccctttttggaaggcaagtttcccaaactctgataccaacacgaaacacctggggccggattaccctctagtggggcccccaaatcaagctaaacagagaaggaagaggaggtgacgcaactaggcctcctgcaccaggccagacaggctgagcgcggcggccgtgaccccgcagtgagctttccacagtggcctcctacgccttccctgtggaaggcacgccagggcggcgatgttatctctgggataaagggccggtcctaacgcagtttgtggtagaaggcgcagcaaaagcgcctaccgcggcgagtcccaggcagctcactctccagtcactctccgaggcgggggagccggcgagagggaaacaagggcctttggtacccagctgttgggcctttggtacccagctgctgggctccggctggcacgagcgccggagcatccgtgcgcagcctctgccgcccacactcgcgcacacacgggcgcgcacacacgcacaaaagtacaccggcccgggcgtccgcctcctggaaggctgccgagaccggccactgtgcccctaccagctgcgtccccacccagccctgcggccaccctcagtgccctgccggggcgcccccacgcttcctctaacatcaacgccagagactggagaggccgcatgggccgcgcgttccagcccaggcaggtgtagccgagaaggacagaggctcttaccgggtcttgcacttcctcgggacacggccggacacccggagactgccagtgcggccgcgaccctccccccaccctcccccaccacgtagccttctctaccttcagtcgggaatcaatggtctggtcgcagattggtgacatcattggcgcgccgggcgtgggaggaagaaccacgtgattcaacctcttttgtttgcgctctaggaaattaaggtttttgttgctacgtcttccttggttttttacgttgtgttaatgccgctgttttgggtacagtggggagtaggtacatgggtttaggatgctgcatttttgcccatggccttgattgaactccttagtcatttataacgtggttgggccggaaggcctgagaagatacgtaggtacaatcctcttttaaaaagaccacagaattagccaataatacattataaccagtagtctttgaatggcccgtttaaattaaattaaacgaattcatttttaaaataatataatgaacaccttctttaacttgacatgctaaccaagaactaaaatattatcaattaactttcatcagcttgtaagtggtccccatcttgtgccactgcctctccatcagaagtaactcccatcctgaatttgtgtttacacaactattatattgctttaatttcttttcacatttatatatattactaagcaatgtatttttacttttcttagttttgtgtgtatttccaaactctcatctagaggcctgggcctggtacatttttctttactcatctttattgaccgaagttacattttgttcattttcactg

SEQ ID NO: 34920 - DNA, 1340 bp, Homo sapiens
agcctgtaagttttcattcactcctaaagtgtgctgagaaatcctagcctgttttttccatttaattcctgtagatgagtcatttgctcctcagttttctatggcccaattttcccattggaataatgggaataatatgtcatccaccttacagggtgatgactaatatattggcatttgagatccttagatgaaaggtattactgtgtataagtataaagtactattatttagtaatcactgagttggtaaatgtattcattcatatggagtttttggaggaagagctttaaggaatgacagcagtagaaatgcagctagatatatttttgaaaacattttttaggtctaccaacttagaaaaagtcccagatattacatactccttctaaagcacctaatttgcatttttattattattattatttacctagaactacagaaaaatttatgggaaggaaagtaagggtacagggttttcaacttggggaaattcatttcccatcccctggctgccaagccttcctactcacaattccacaaatgtgcctgcagctgtgaggacagctggagagatctgttgtctttctggtcacctctgacattttgcagtgtctcttctgattgacactgtatacagggcatgacctctctgacttggccctgcctattatgaaagtgtcaccatgggggcagggagctagagagatttagttggtttaaagaagtataatgtgtccttgagctttgagcacagcaatggaaacctggcgactcttcctggagctctagggacttctaaccagagcaagttggttcattacaagctgtcacaccacagaaagagaagacctttggctaaggtagagaaaggctgactcatacaggcagttgtataactgtagacaggcagggcccatggagctgtggagagttcactgggactcctctgccttctaagacacaggttcccacctgcttcagggagagagacttcccactagtccaccttctgtgtgtgttaccaaaaggaagccatatttggagctggtctaagctccagcccctgcaatttcatttgcctttccttagtaaggaacacagtaacaacgcgaacaaaaccacacagagcatgtgaagaccgggcccttctgatgctgatgtgtggagaaaactgggcactagactgaacaaatttttagctattgccttatgggaaccacagaaatggattgaaataaaacttacaaaatcactttaaccactcttatttatgcattaccaccaagggaaaacaaagtcactgaaacagaaaaatgttttccaaaggaaaaatgttt

SEQ ID NO: 34921 - DNA, 731 bp, Homo sapiens
acaggtattcttatttctattttacagacagggaaactgaggctcggagaggctaaataatttactacaggtcatacagttaataaggggcagacctaggctctacagccagggcaggcagctctcttgactactgtgtgtgctgcccccaggctgtgctaggaaggcttgttgggctgagccccagtgtttgcctatcccaggccaggccaataggtgtttctggttctttgtgtgccttggcagatccaggagtcaaaggtttctgtgcatctgctaagtctggggtaagaggtatcgttttctcaacaggaagtttctgataagtttctttccttttgacacatgaaaggatcctgctgaatgtttgggggtaggggaggaacagcatcatcactggggctgctgggccctgattggttctaagtcacctgtttaccactaagggagaaattctttaaccctggcttaggggatatttttagcaactaaaaataaataggtttttggatctttgaacagcctagggagctgaagaactgaggtcaggaccaggtggtggtggtgggcagggagtgtttgttttttccccaactgactaaaaggcccttcacctccttcccaagggccagctgcactgtcaccccttcagggggagcttttcctgatctcccagtggcgggggcagcacttcaaacagcaacaagccatttggtgagtccaacttgttg

SEQ ID NO: 34922 - DNA, 2336 bp, Homo sapiens
ggatgtctagaccctgggtgaagcctcttataatgaatgcccacctaacccctgcccctgcaagccatgatctgaggagcaaggtaggactacagcatgtcacctgtcccctggccacgcaccaacaactctcagccacctatgggtgccaaggagtcttcagcttcacacaggctcctccccatactctgctttgctaaagaaaaactggagctcttttgcatcatctgagtgtcaaggtaaaggggacatacggcctgactccctacacttggagcatttactgagggccaactgtgggcattcatggttccaacacgccagggagtaaagttagtatgcccattctatagatgaagaaactgagtcaaatttcagagaaggttaactggcctgctcttgttcacagtgggaggggagagtccaagccatgagccacacaggtctatgcgctctgagaggtcacaacctctccactcagcctctgctactgaacttcattgctttccagagaaagtatccctcctgcccaccactcccacccaggtcctccatgaaaccccctctaacaacaggagtgggaaaaggtttcaaaagagcagctccatggagatctgtctggacaaaggttggtgattctgcttctaaaactctgcagaggccaggatggccctaacatggagagaagacagtggagtggccaggccaggccaggcaccagagcagtcttgggctgggaatcggtccatctgattccgagttgccattttcctgccagggaccatgacgagcaaggtgcgcccctctgagcctgtgaaactgggatcgttcacacctcctgcacagttgtcttgtgaaaactgagatacattttaaaatgtgtctcctgaccccttctctgaggctttggtgtaggaacttgttgttctaaccagatgagtcagtccggatgggaacgtttatttacttgagggagtcaaaggtcgaatggaaggtgctgataccgtgtctggaaagaaggcatgggaaatgggcacaggttgccaacattctgtcaccaagatgcctgccgggctcacagggagccagtggaggtgcatactttgcacacggtgaagtgctgccgacgtgcactggccagtacaagagaggggtctgtgcagacccctgactgacaagggctcagcatggaagcctcggccccagagtctgggtaggtccactgtctgcatggggccgactcggtagagagagccatcacttgccatcctgggtgcgtgtgtcctgcccagccccacactgtggtgtaggtgatgacacccacccccactggagacttggctccacagggtgggatttgcgtctattttattcactgctataaccccagtgcccaaaacagggcctgtcatagagcatgttctcaattcagatttgctgaataaatcagcttcctggccccagtctcaaacgactcacagaaaataaaaactctaacagtttccggggagaggggagagataccattaggagatatacctaatgctaaatgacgaattaatgggtgcagcacaccaacatggcacatgtatacatatgtaacaaacctgcacgttgtacacatgtaccctaaaacttaaagtataataataatttaaaaaaaaaaaaactctaacagtttcccaaatgcagaacaggcacctgagcagcagcccaagggagggcccagaccggagcagccatggattcctagcagggaagaaggcggccagtgtctcgtgggcctggatggatgtctctcccacagggagggcagtgagggacgagcagggccggctggcagttgaggccacagccccctgagccagcccctccctggaccccaggtggccagtagcagatccccgccccgccctggctctgagattgcggtccgagctggtcagtgctcacccatggggatgggggcagagcaacctgtggcgggtttgtgaggagtgtggcggcctctgctggtggcgtatgcacatagcttcgcactccaggcaccttgggagatgcgagggagcccccagacagcatctgaaccccggcctcagctttctgcttccttccatggaggcccagggactggatctggtgccagaatcaacttctgtgaatattttgcaaaagtcgctcttatttcccaggcttccttgggttttttcaccattggggaagaagaaaccatctgttgtctgtcccgggtgagggcaccataaagcctttgaatgagagggctggacaggatgccagaggcgcctccaggcccaccaccctattagcaagagaag

SEQ ID NO: 34923 - DNA, 1348 bp, Homo sapiens
cattaatttacagtcgaaaatctctctctcaccctgtcccctccctgggggcaaccaatggtacggtttctaacctgtctttcccatgcagtgcaggaacacatcccaggcacctgaaacagtgctgaacatgagacaggcaccctgtaaatatttgttaaatagccaaatatatgagcagatatatttagaattcttttacaattcttggtcacaaagtgcctcttcagttttagacaaatgtagcattctctacacactgttctatatcttggtattggctttttttttttttcacttaatgatatattttgacaacttctgggactaaatttcttttttgtgtgttgttgtttactttaaaaaaaattttttttaaagaaacggagatggggtttcaccatgttggccaggctggtctctaactcctggactcaagcaatctacctgcctcggcctcccaaagtgctgggattacaggcatgtgccaccgtgctcggcctgtactaaatttctaggagcaaagttctaggggctgtgtcaggccagctgagtgagagggtggtgtgaggaggcacaggcaggtccttactaatcacacagcatcagagctgccaactcgagtgtcgacagcctttcctgggcacaccttcctgaactcactctgaagggagggaggctattaggaaagaaatataagctgaaaatgcccccgaaaggtccactcacagaaaaccaagagctggccaccaccctgccagcagtggtgacgggaatcatgccagtgactcaggcagcagccacagctccaaagtcctggagccggccccgcccaacacaccggatgccacaaagcaccacctacctgagcatactgttccttgagtggaccagagagccggaggacagcacagacatcagctccaagtctgcaggacagggagatcagaatccagttagcctagaatttccaggagcttccatgtcccagaaagggagtcaagaggcctgtgttgaagtcccatttctactactggtattatgtaactttggtaggtctcaatgtccctgatcctgtttcctcatcagaaaatggggataacactttctgttctgtctcccacacaggattattatgaaactctaaagaatataaaagagccctgaaactaacaggtaaaacctataaagtgctaattacagtgtgaacaggcgcacaatattctagctggattaggttattgcccagaccctaaactaattctctcatagccagaggtatctgtctccactgacttggtcaccataacatatatcatttattaattcactggttgggcatggtggc

SEQ ID NO: 34924 - DNA, 2552 bp, Homo sapiens
ggtgctcgccatcgcactaggctaacttttccatttttttgtagagactagggtcttactgtgttgcccaggctggtctccactactgggctctcaagccatcctcgcacctctgtctcccaaagtgctggggtgacagacatgaccaccacacccggcctgtttaactttttaagagcctcagtttcttcacctgtgaaatggagatgctaataatggcacacagtacctaacaaagaggtgaagagggttttttgttttgtttttttaagacagggtctcgctctgtcgcccaggctggagtgcagtggccaatctcgcctcactgcaacctccgcctcccgggctcaagcgattcttctacctcaggctcctgaatagctgggaccacaggcacgcgtcaccacgcccagctactttttggatttttcgtagaggcggggtctcgccatgttgcccaggctggtatccaacgcctggtatatagaaagtgccttcgtaggaaccattattaatgcttctcagagagacctgcagctgaaggtctttggagaggtggtcacctgcttctttgaggctcgcctgtgtagactactgttttatgtaatggtggcattccaccttccccagcccagtgctcctcctgccttgcaaacggacgacccgtactccaaagctcactccgtgacacccaaaagcactcctcgtgtcacgtgatgcggagagctcccccttccacctttcccgcctcacggacacctgctctgcagcgcctcggtcacgaagtccttcccggatttcctcttgccgctgaacagcagtaccagccgcggggcgcctcccagcggggccatggggccgccacgcctcgcgatgcctgaagctgacacttctccctacccctaaaatcgggacaccgcgcggaatggacgcggccactaagcggagcggcaacaaggaacaatcgcgcccctcctcgccgtagctgcgaacagggctgaccgcccgcgaccgtgccctcagctcatgtccaaacagatatggggagaaaagggtgagacacgcggagagaaaggcggttccttcacagagcagcctcccctcgtgaagctcccccacccgaactcacttagaacagtccagccccgcccagaaccttcgctcacagcctggcctgcttaactgacacccggggaggaaccggacgcgactaccttcctccgaggggggtgacgtctgaaatttcctgaggtgaaccccatgttcccttccgcgcagccctaaaactttaggaaaaaaaatctctggagtgagatcacgttggagacgttttggaaactgcccttttgcctgtgcgttatagtacatgtgccacagcaaatctgcgcgcgccccagagtgggaatgggtcttcctgggggcgtaaggcagccctgacgcgagcggcgtgtctggccacgtcatgtcgggggaggagcagaatcgcgcacacgatatttcattgtcaagcagattttataacccgagacgtcactaagatgtggccctttaagcccggcgagaaacctttgattgcttttctagccgcagcctccggcccaaaggttttcggaagcaaacggcgtgggtgacatcaatagtaagggagcgttgaatccctagatgagattgcctggtttcatccgaagtctggctcccagccagaagtttgagaggcaggataagaataatctgtcctttccctgcatccccggttctgcctcttcccgcagtaggtgacgggttgccccagctgagtacgtcgagttgtttttggctatgacttgccgtcctgcatttttctgagcatgtcagaacagagcctgcaactcattactgcctccactagagaaaaagtgtagtgtggagacttagggagaaaccattaatttcctgaatgttgaaaagaggcacaggagagtggtcagatgcaaaaagaacagacttaaggaggtggttttttgttttttggggttttttttgttttttttcagcaacccagaaaacactgcactcatcaacgccctagaaggcagcacagagtggattttcagtcccagcttggacacttagcaagtcactctgagtttaccactgataaggcccacttcccagggttataataagaaaggaatgaagaaaatatatgacaaggtacaataaaatactttgtaagttctcaagtatcatccagatgtaaggggttgttatttattcttagcacttcgtcattcaacacagaatcagattttccagctcatcttcaataaacatgtatttgggcctccacggaaagtccacatctcctgttttacctgagtcacatggaaggagtcagaacttactcccggagtctctttcctcacctgacccaatgcacgccccttacctccctctctgactctgagatccagctccctgaatacctagtgagcgatcagaaaacttcccccaggctcacgcctgtaatctccgcactttgggaggccaaggcggatcacctgagggcagga

SEQ ID NO: 34925 - DNA, 533 bp, Homo sapiens
tcaagaggatgaaagctctttagcttcagaatcagattgccttccccagaccccaccccaaaacaggctcctctcccatctcccccttcacagtgacaaaacacaagcccacatcccagggcctggagtatttgcatgcatttgcatagacggcaacgcaggtccagctaaggcctttttctacataaagtgacatcagtgcagggctggtgattttgctctactgtgtgaaagatatctgaggacaccaaacaagccaggacagagtccaccctccaggagttagataacgctgggatcttgggctgggccaggccaaggccattccctgtggggcagggtgtcagccccggtggtggtggtggtggctatggctgtgcccctccctgggccccgcagctcttgggctctgtgagtgcttgtccttcttccctgacctgtggggaggaagaggcctttaggggacaataccatgcaatgaaaacgggttccccaaggagagaggaccctgctcctcccaatgaagctgactt

SEQ ID NO: 34926 - DNA, 1878 bp, Homo sapiens
cctgagtatttgacttccttcgcttcttttctggactcttcatttgcagacctggaagagcggcaaaaggaagacgcagacaagtttccctgaggtttccccaacctcttttctctcagccatgctctgaggaactcctttaacgtcaatacatacttgcttatttattcaacaaatgctaacaaggggtgcaatatgaaaaatagattgtgaagatgatcatactctcagctacgtcttcctttaaatgaaagatatcccatctttcgatatcctcaagctccaagtgagtactgaattccatgtggctccaaaccctagagtcctcaatgtgtgacacctgcccccaacccctggaggattacacccacccatccttttcacctgagcctcccttcaagccttcagactgtgaaacaccccccgcccaccatccctcccctctgaggttcccaagtcctgggcctcttcagcccccgcccctcgcagcgcgctcaccggccttgccctgcttcctcccggtgctgggcggcgcagggggcggtgcggggccgccacctccctccagcttgtccggtgggggcggcgccgaggcggccatggagtgggggacccgggttagcggcagcggcgggggatggaggcgcccttgggctgcaccatcgcccagaaggggtgtcaggggcagcccaggcccccgagctgcagcaaccacaaagtgcgacgacagggaagcgccgagccgccgcgcaaactgcgcgctctctccagactcgccgcccgccagcggcggcagcaaccggaaccggaactcgtcgcggccaccaccactgagcgctgcggggagggggagcaaggaccggacgagacgctacgcctgaaaacaggcggcgggcgagggacgaggcttaccacggcaccacgcgagtggaaagggtcgtctccgctagcggcggcccacaccagctcaccgaggggcggcagcgcgcggcccggctgccggaccgtaccatcccgggcggtggagccgccgcggaggggcgcgcgcgagccgaaggcgcacccgggaggcccaggtagcccgggggccggtgctggggcgccgggcaggcccggctcccgcctcgacccacccggagccagccccctctgcggacacgacatccccatggggacggtggcgcgaaacgccccactctgccgcacccaaactctgcagacccccagcttccctgggcggccgcgacctcccgcctccccgtctgccgctgagggcccgcggcgtacacaataggcttcccagaagggttaagaggcagaggtagaagaaatacggactttaatgaagagttttccctttggtataagtgagacccgtggaaacatccaaacagcaaaaggaggccaggatgaaaacggtcaactctcccttatccacaaggccaaaagagggggggccggcttgctgtggtgtggccaccccgggcctaggctgggccgggcctgtagaaggtactcaggaactgcaggttttgcgtttcccctccatgaaactgacaggcattcgggctgacttctgcctctcagtctcgcggtaagagacccaagtttttctagtcctagatggaaataaatttcatctgcctcaggtctctggtataaaaggtgcgatcccagttacctcacaggcctaggcgaggaaaatgccaagagctgtaaaagggcttggaaaagtcaaaaaggtgatgtataaatgtaataattgattatcattttgtgctcaagaataagcaatggaaaagaaaataggaaagtaagtctacagccctaaaatatatgcatataaaactttaaaagaatgcagttccaactctacag

SEQ ID NO: 34927 - DNA, 6067 bp, Homo sapiens
tccatagttgaggtgaaagaggggctgctgcccagcctggcccccctgccagtttgggcaagggggccaggcagggggtatccccaggcccttagcctggttggacctctgtggcccaggagtcacagaagtcctggggagggagagggacaagtggcttccgctccccagctcagacccagacagtttcaggccccatccccgcccaacgtggagcctcttctctggctgagaagagaacaggctggacccagcgcttctggctcctccccaggggcggggagctaaggggagagaccaatcgtgaggacagtgctgactcacaggctcagaggggctgagcccccaccccgccccaacctcgaactggagcagggggtagggctatccaagcccctctcccctgccctatacaaacaactagtaatctggggagaagtaaagtgggggtgggagggaaggatggaagagtgggacggaaaggaaggagataggaggtctgggtcactcaaaaccggacacacgcaggccaaagggggcaggaagccaggcaggagtacaggggaatgagggaggaaacagaggcagctgggggtggaaaagggaggagatctcagagctcagcatttcccttcctgtcctggttggacactcgaattcccccaccctctctatgcccgaaagctggctggccccagcccaggccacccccaaccgctaccccatacagtaagcctgggccattagcatcctctgctacagcagctgtggactggagctagcgaagtggggatgggaagtaagtggtcccaatggatgcagagcagggccaagaggaagagcaaagctggtgaaaaaaggggaataaagttcaacctggatgatacatcaggaagctaccaggcaagaagggaacaagaggacatgctggtcacggcttgttctctacgtatgccatctaccacaccaagaccgatggctcatagccaagcactgtcctgtctcccctttccacagggcttgttaacacagcacactgtcaagggtgagaatgaggcaatcaggtccccactcccactccaaaccaccccaattcacatccctcctcttacagggccctaagccccaccaaagagcacagcatccttcacaccagggaaggagcctggctggaggaggtggaagaaacagttctccaagagaagtagaaactacaggccaggaagggacagagagatcagaagacacatctgcgtcaataaggacaggagaaaaataagtacaggagaaaggggtgtcaggagaagatgggttgaagctggacacagggaacagtcccaaacccattcctgccacccacggcttcctgccactgctcttccggagaatgccacaggcaaagctggaaagtgaccaaaaaaaaaaaaacaaagatacgtattcctaccgggcgcggtggctcacacctgtgataccagcactttgggaggctgaggcgggtggatcacctgaagtcaggagttcgagaccagcctggtcaacatggtgaaaccctgtctctactaaaaatacaaaaattagctgggcgtggtggcgggcacctgtaatcccagctcaggaggctgaggcaggagaatcgctcgaacccaggaggcggaggttgcagtgagccgagatcgagccattgcactccagcctaggtgacaagagcaaaactccgtctcaaaaaaaaaaaaatacgtattccccccagctcaccttggaattacccttagatttacttcagagaattaaaatatagatagataattatcctgattaacaacattaacacttgaagtgtgttagatgctgtgcttaactcttacatctccccttagtgctcattccagaagagctttgtcactctgccagccaatcctgagaaggaattttatcacttcatttccagccagctctcgggcatagagagaatgaggaaaggattccaccatagcctcacacccccaaaacacacaaacacacactaggatgtccctcatctgtagagatgatgttctgtgggagcctacagtatccagagccagggaaggaccaacgggtgtgggcgttcggaagaaaagaaagacgtatgactcttgaaatttacatagggagaaaggagattgcctactggaagtccaggtgattgggtgtaggggaaaagctgtgtgtggcttcgcagcccaactgggaggaggggacaggggcgggaagtggcaggaaatggcgaaagcctcaggaatgtttccagcagggaaggctgggcaaacggggccaggaggaatgcccagacaagaactctggttagggggaggggaagagacagagaagtagcgactgaactgtcccttaaaaaaaaaaaaatcaaacaacaaaaagagcactattatctacccccactccaaactaccgttcttctggtagtagaaaacttttgctcatgtcacacccacatgccacacaccaacaaatccatggtcttatccacttatgtctaggaaggcctagagctacttctgggatgaggttggtcctgggaagggaaagccaggaagtgaggctgggagtctgagggcaagtctctctctccctctcgtgccaaaccccacgttcagccctttcaaatagttctacccttggaggaggttaagaaagaggaaaacggggacgggcgcagtggctaacgcctgtaatcctaacacttaaggaggctgataagggtggagcacctgaggtcaggagttcgaggctagcctagccaacatggggaaaccccgtctctactaaaaatacaaaaattagccgggcgtggtggtgggcgcctgtaatcccagctactcaggaggctgaggcaggagaatcacttgaactcaggaggcggaggttgcagtgagccgagatcgcaccattgcactccagcctggacgataagagcgaaactccgtcttaaaaaaaaaaaaaaaaaaaaaaaagatagaaaggaaaacggaaaacggctgcctttaatctcactccttacagccagagatgggaactttgacttcccacctgggggagcacgagagtgctcggaaaactgatcccaaggcccaaaaagagaaaggacaggaaaatataagcaggtggagtttcagggattgacgacaaggcttttcagctgatgacccaggtcccacaaagataaagctcctaagggggcgtggtcccctaaggacgcgaacttcagacttctgggcggggaggctttctggacagtcagacgtggattacggagggggcgtggcttcggaggggcggagcttcaacaaattcgaatcgttctttgaagagcagggttttgcccttttgggagataggccttttgacaggagttagccgaggatcgttgctaggaggcggagtttcggagaatggaaggagtaacgaagggtttctcgtagtagggcttggaacgtgtcggggggtggggacttccagaaaaactgggcgacagggtggggtcggagacaaaaaataaaaatcaagtcggggttcgggggagccccctgaagttgggaggtgggacttccggggagaggggtctcaggggcgggacttataaatgaagaccggaagtggggtcccgggagaggggttccggggtgaaagagtgagtcacctaaggagaaaaaagtcaagactcaccagggcctcatggagtctccgcaccgcaccgcgggccgatttggtgccggatcacgccactgccagcttaggttaccgctccaactttctccccgggccctgcctccctggagaaactttattacactcacttccggcctcactaacccctgaccctctacctcagggtccctccttcacgcttcccactttcccgagttagccaatggcagcgcgagatcgcgcacaaaggcagtggtggccaataagacgcctacttttgacccacgctcgttcttgagaagcgtgagaactgccctccaataaggatccgaagagaagtaaatctaagccaatcggaggcttgaaagtagaggtgtcccgcctcgagccaaacggaccaataggaagtgcgggcggcgtgtttgaaagcgaggccaaagtgggtgggagcgcgtgctgttgggagttgcttggaggttggcggcgcggggctgaaggctagcaaaccgagcgatcatgtcgcacaaacaaatttactattcggacaaatacgacgacgaggagtttgagtatcggttagtgctggcgcgggagcaatagcgagggtcgtgagctttggccgctgagggcacaaggaattagtaacaggaactgaggcgatagaattggcgcatgcgtacgaggtgcgaacgggcaatggtgtgatattgtggaaggcgtaaggcgcatgcgcggaggtgggaggcgctcgtaaaacaaagtggttgcgaatttggagtcgcctctcagtagagaggagagaggggtgggcgtggttagggtactgaccaccctcacccatgaggctttctggatcattctctgaactttatcgggcaaacttaacttgccttgtagagactgtttcacagtaatcttgtcgaatccagtgggagaacgtagcaaaagcggagctggaagtttcctggcgtccctaacaggagagtagcgctgagagagttgaatattgcttattaactcgtgaaaaagacaaggggcgtggttgtctggcttgtgtaaggaaggggatcgcttgggactgcaatggaataaaactggctaggagcattgagaaaatacttaatatgggtctaatagatgccctttaaatatcaaagggaacagttacggaatacttaacaggtttcaggtgttctgctaaagtgcaaggataacacatggtctctgctgttcacaaatttaaaaatctgtgggtggtaccgacagacaccagaaaggtgacacacgctatgcaaggagccattacagggtgtgatgggagcacacaagacttgctaaggagagggaactggcgacccgaaggctgcggcttcctagctgtgagcgggggttgaggtggggctagaaagtcagtcccctacttttgctaactccaggacgctcccccatcccacgcttcgagaacgccccccgccccgccaccgccttggaggctgacctcttactttcggtcggtcttcttccctgggcttggtttgggggcgggggagtgtcctaagggccaattcagcgtgatgtctctttcaccaccattgaaaacgaaaccagtagtaaactacgcgtgttttcatttatatgtcggagataaaaacacagggacagaaagaggggaacaacagacattggggcctgcttgagggaggagggtgggaggaggtagaggttcaggaaaaaaaaaaactgtcgggtactatgcttagtacctgggtgatgaaataacctgtacaccgaacccccgagtcaggattttacctatataacaaacctgcacatgtacccttgaacatgaaacttaaaatactgagaggaaaaacggaagagggaatgttggggaaagcttcctagagggcagagcctgagatgagactctaagaaaaaggtatgtgggaggaagcacctcttgactgaaattgtttagaagacactggatagccatctgccaaggatggtgatgatggaatcctggcactggatgtggcattcgggcttgataaattttaagtgcataatctagattgggaataagggaagacacaggattccacaaatgttggcattatgctaatctgtattaattgtaataattaagaccacttcctggtttgtatcttgtctcctcagttggagaacataaaatgaaaacttgcttttcttgtgtctcttcacccagcctagttcagggctttgggtcttccagagaactcgatgtgcattgacaaatacataatcatctttatgccaagacggctccagaccctcctttaattaactttcttttcctcagctgttttcctctaca

SEQ ID NO: 34928 - DNA, 1370 bp, Homo sapiens
gaatccagcaccagaaactccccgagggccttacagcacctttaactacggctcctttcccgccctaaactcccgaggtcccgcccccgaccgtgggctaaggtccggcccccgtatttccgggcgagaagtgaccacgtggttgtcgcctataacaatccggccctgctcccatccactggctaaagcctgagagcgacagttgaatacaccaatgggaccctggaagagtctaagcgacagccaaaatcaccattcaatgtcagctaggtgcaaggcgggactttaagtacggaagctgccccgggacatgaggaaaggaacaagggaaagagccggtgaaggggcagaacaggcaggtgagagtctaagagggctcagtaatctgaagcttggtgggaagaagggattctgggctagaaagggtgcagaagcctgaagtagaaagagacgggattttggtccggggtggagagcgaatgcattgaaaagggccaaggcccaggataaggtagacatttaaaggggtacggatgcccaaggtagagcagacacttgaggagaccagctcagcaaacggaagacacttaaagtggtaggttctcaagagagaagaagtttttaagactagagctaagcaagacatttaaaaggacatgggttgggatttgggaacacgtttattccagaggcaggaacaaaggagtcgcttgtcaaggatctggttagagaagactagggtcttcctcgaaggaagcacgcgcacgcctgctctcccccattgtcttttctggcttctccaggttccctcgacccaggaccccctgttcccaggctatggcccccagtgccctgtagacctggcaggccccccgtgcttgcgacccctatttgggggtctgggtggctactggagggccttgcagaggggcagagaaggcaggaccatgacatctagggcctctgaactttctccggggcgcagcgtgacggctggcatcatcattgttggagatgagatccttaaggtgtgtctgggacagaaaaggggggagggcgctgcgttctcctgtccttaagggcctgctgcacatccctccatggaaggaggtgaaacagggtgggagcctctttgctgcagtaggatcctggagtgaatccagcatattggaggaaaattaaccctcattctttcaattactctactgaaaaacttgtagcaaagtccctacaatttttcaacctgagagagctgattgaaaaaaagaaaaataaaaaggtcattgcaatttaccaagcagtatggtagagggcagaggagctacacaacaatgacaggaagcccctcgagtagaggaggtacaggtgtg

SEQ ID NO: 34929 - DNA, 7724 bp, Homo sapiens
gactctagagtgttcgccagccttggagcgtacccgttcctccagccattcttcggcctcagttcctttccatcattcgccctcaggccttcgcctaccccagcttcaaagaagcgaccgtaacctcctagctggctgggttcgagaagccggggacctgcgcctcctggtggctgatcggaaggaggctgagtgcagaggggttgtcttgccttctctgggacgtggagttttggaaactgttcccctgagcttcctgaagctaaatttgcctcccccggccttggggggcgcagagatcccggcggcgattagcgctgcgcggcagccggctccaacccagaggcccggaataggcgcggagttataaatagtgccacccgcaggtgttggggggagtcggcgggaggggggtacccctggcggccacggccccttcaggtgggttgggcggtcgcggtgggagcgctggggggcggggggcgtggggggtctgcggtctgagcgcccccagcggtttcctgggcggcgggtttttcgagggaagcggaggcagcggaggatgggggggagcagcggagaagaggtgggcgcctggcgcatgctgacgctccgcttgcagctcagccccccacattccgaaacaggcccccagacccactcacgcaggaccccgcccaggcaaagcctcgcctttcttaacacctgaaggcctcattcccccaggttctgcaagcatctaacttctatgcttctacccttcggcgcacgtggcccggccagtccgcgcacctggccgtcattccgagtcgctgtccccagccccaggtattcagtcctcccactcggggctttcattcctctcttagggtaaacacttccttctctgggtatttgtccaactcgtgctactctccccaaatttaaggtctagctggtcacctaaaaatttaagtcttaacatgcggatctgggacgctctcctatccccaggcggcccctgcaggcccctcacttgccctccagctcccagttccagtctgggcctagtggcggggcgggggcggccggcccctggggcccagcaggggtttcatgggagggggcggggtccccagtcagcgtttctctgccgccgctgtttcagtcgtttggcgtggttaggggttggggtaagagggaatttcaagtaggggttccccgctccgatttctgagtaaggaggggagctatttgcaccaggagaaaaagagagacaagggagggtgggcgtcactgaggaactaactgcgggttccaggaccattgggaatgaggtgaggagtggcaatctagccgcagaaagatcagtcatgttcagccagacgcagaacgcgaccctcaaacatgggggaagttgggcgaggcgagcctgaggcactgggcacctttcgagtttctgtacccaaaggctggtgccagggagcccgcccttctattgcctctggaagccctggctctgccctccccgggccacgttcccaccccccccgccccccgccccctgccccccgccccctttccttggctatcctccttcctccccaaagcagccccctctccatttcacttgtggcactgccgcctagcccctagcacagcccttcaccaggcctgcacgacccagacggctggagtaggaaggggaaaaccccggcctggacggctccgggcccctccggaccaggatctgtccggcggggctgagaagaaaacccggagcagtgatcagcctcgcgacccaagggggtcagggacgataggaaaacccggagcggattactcgagccagagcgccccatgcctgccgctacctcctccttcctatagcccccctaattctccagtgagataatgtctggggtggggggctgtttggtttggcctgagccctcaggggcgcctcacactttccgcccctggctggggcgcagggcagcggccccgaggctgagtcacggcccggcgcggagagggagagagggagaaagagggagggagggacctggactccgcccctcgtgcgcggggatcccgggtcagcccgggtgagggccagggcccccctggcgccgcccattgtggtccaacaggttgagctggtgtcccgagaagccacctgctggaaagggagggaggccccctgcggaggggggttgggaggggaaagcgagtccgacccggttcggcctggcttgtcgcaggggagccaaacctggccctaggtagccggatttgattccatttgacactagtgggaggggccctttggggtacgcagctccgcaggctcagtcagaaacatccttcacccgctacctttctcagttgggggactcctaagtatttatcccggtcctccccaaaacctacacataccacacatcccaaaacatccaggcacccctcgccacctgggtctctcagcgaattcatgtcaagctatccctcctcggtggagactcagtttctccacttagggaacccgcgggatggaggtggggagcaaaagcgtcggcgcgccccctcccccttcgcagactgggcccctcccctccgacaatgccaaggccgcagcgggcactggcgacagcacagaggctgcttgcctggggcgcccttccctccccgcggggcaccgtcacgcgtggggagggacgcagggcgcccgcaggctcaactccccggctccctccgagagggggtggggcgtaggggccggagccgaaggcctggtggctccccctccccctcccttctaggtccctgacctgattacagcccctcacgggaccccctccctcaagaccctaagtccccaattcacccccacccagcctatccctaacctctcatacccttccctcctgaggtcctgaccctacagaagcccctcttgaaggagagggagcccctgtagggggtgctcgattccctggccgctgcggacactgccccctcccccctcctctccaggttccaggccagcccctcggctccgccccctccctggacgaacgcaaggcgagacctactggagatgagcgggtattcaggccaatgagcggacagggcggtggcgtgcagggggcgggcagagcagcagcaaagggctggatgggggccgggggcggagtttgagttaaggtggactgggagagataggggcaggagaaaggggggggagagagggaccgcggcaggtgaagggagacagagagaaggaaagaaggagggaaaggaggagggtgggaaaggctaggagagctaagtaagagtttggagaagggggcaaaaaaggagggagggacccatctgcgctctgcagggactggctggacgaaggggttgaagtttatgtccttattgggcggagggagggggcctgggggggcgggtgaaaaaccaggaagtgacagagggtgtttctaagtgttggggggggggagtttggggggtggcaggggcggggggagggaggggagggatggggggaaagcaagctggaggacaggtgagacagcaggacaggtgaggcgggccctgaggggggggcgggtgggagccaggtgaatgtacggctcttggcggccgagggggggcgggcggcaggaggaggcagagggcggcggaggaggagccccccagcagcgagcggcgagcaactgaccgcggccttctgaccaggaccggagcagggccccaagcccccgggcctggtgggggacgcgcttcttcccacactgtgagcctcagcagctccagccagcggacccgacggctgagaggtgagtgtaccccacttttgtctcctggctcggggttcactaggctcgagactactgcagtgtccttcgtccgtcctgtaagtgggacccccagatacacacgcatgcagatcacattcccaccactccccttccctgtgctttcccaacaccccgggtctctggaattggttttaactgagatgaaagacagagaaggaactgcggatgccccccaaccctaggcggagggtccccagaaagtttatctgcacttctcctgggatcagacagacagacggcttcgggatggagagggggtgaggcgacgctgagcgttcccccagtctccttcgtgactttagggggagaccccagaccggactgagttgagggaatggaaacgctgacggactctaactaggacaacgcgcaccccccccccaccccgcgccccctggcgcggtggattggccccaggccagttgcatgggggttgggggggcgcaggaggagccgcggcttgggggaaagttaccggctggactattcggtttcttgcgcttccagagccgcgctctctccagcggtagtggggctcagcaacaacctctgaaccgacatagaacgaccgctctcttccctgcccctcaatcccactcccttccttcaggctccagtcccgccgctaccttttccacgccagctcatgaccacagaacccaagagcgagggcgggtgactaggaagaattctcctacctactacccgtccccccaccggcgccggcgcacctgccccagcccagagtgggggtcgctactgtgttgttgtagaacctacagagtgcgcctggcagaaggctgccattcaaaggggtggggggcgctgctttcaatttccagctttctctccctcctcccaccccatcccaagtaagagagcgacgtgtcccggccagagcgaggtgggggcgggagtgggggggcggcgtgggcagcgggttgtgcccggacacgtgcctgcccaggcgccccggccctgctggtgtttagagagagggcgggtcccctgccccccgccccgcacaacccccacgtatcaaagggcggctgagacatggtgagacctcggggcgccctggggggcaggggggcggggagcctgggtccggagcaggggaggggcagaggcgccggtgctagctgacccacaggaaacgagcgctgctgacctagtttgggacaccggaagtgggtgctggggagagggggagaccggcaggctgtccaggcttccgggccaggtggagggtgttcttgaattgacccccgcccgaatgccttggagacccctagctgcagccgagaatgggaatgagtcagcgcagctattcccccttcccccaacttattcctggaggagggagaccgcttatcagggacgggggaaccagattgggctgtgaggggttaaagcaggatgggaactgtctggtccctaagggagtatgtgtgagtgtggggatgaggcctggaggattatggggttgcctcctgctgccccacacacaccaactggtttggtcacccctgtacccgcctggcactgctgggagagctggcatggagtggacatcaggttggggaggagagagtgggcataaggagtgttgtgctgcgctagagagggacatatgtgtgactatgtctggatgatagttagtgttcctccttagtggtaactggggagaagggtagggggctccccctggagcagctgatgaaacaaggagaaatctctgtcagtgcctctgtccctggccccagggaccccagctcccccagcgtgcctctgttacatggttgctgtgggcacaacacaacctgctggcacccccagacactgtcccctcccttgggtaccacacacccccagccctggcacaggggtcaaaaaggggttaataccaccagaatggggctctggggaagaaagaaggcagtgcccactaggctcaggtgtcaaggagacaggcttgctctaatgggactctcatcactactcagttctggctgatgtagaccccagtgtctggaagacaggtgctgtccccttcttcttccccatggtgccccctggcacccagggcccccagctcctccttggcctagtgcctgcccagggagggtgcggcgggcagcgggggctgggctaacaatgcaccatcaggccctttgtgtgcctgcacttggcaccctggggaagggtgggggagggggcccagcaggcatggggggcggagcgctctggggtggggacagtgaaggctgggggagagaagcaaatgaaagcaggtggggaggaaagggaagtaggtcagatagggtgccagccccccattccaagccaaggctgagagaaccagcccctgatcctatggctgcctggatggcatcagactgagggacagcctaggactgggcatttggggtcagaagtcactgcccaggggactgctcagatggagaaggtttggcctggtactgcccccttcttaatggctgagagacccaattcttctggcccaagaccaaggccccaagatgagtagtgaatgggctccaggcagggcactgccctctgacagaagcctctgggcctgctgcggggcttcctgcctctgccccgcttggctccctgaccttcctgagagttaagactgccctgacaccaggccttagggcctatgcctgttttggcctagggcgggagagaacagtgggggaggaaggtggggacaggcagatggataggaccctggcatggggtgtgcccgccctggcctcttccccctccttgtgctgagtaaactcgtgagtaaacttgacgttttgcccggacagtttgaagttgcctcgctgccccctcccccccactcttgccaacacagaagcggccaggcgccaaggcgggcccgggggactgggaggaaggggatagagctgctgtcatccaccatcaagtgtttggtggggtggggacaagaaagacccccacacccagccaggcctaggtcttggcaagagtcttggctggggcctgccagcatctgtcccagagccctggggagcccaggaaaagtggcttcaaagcaggtcctctgcccacttctgacttccacctctactagggaaaggcacccagctaccacctggccccctgagttgccatctttaatattcactggcacagggacaaagctacctttaacaaattccccagggagaccagagagggctgccctcttcatcctgtcccatagtttgggatggacatcttagccctctcttccctgaggcctccagatgccatggttctgctatggaggatagcattctcatttgccagcacttgccctgaccacacctgggcctaaccccacatatacctctaccatattcaccatcaggcctagccctgatctccccaaaccccttcctttgcctgctatcttccccagaaccaggtcagccttcagagcttcccagtcagcaaatacctgtgccagattcaggggtcgaaggtgccccaggcaaaagagggctgatggcaggcaaatgaaacagtgatcccccataaatatgtcaatttgctatcttttgacatcactgatcctcttcttcctcccaggccaacagaatgacatggggaaatgccatcccagtccctgacaggcctcagagtggggctcccccaggcccttactttcgacctcatgtctctggcttcagtttccttcctgtttccaccgtccccccaactcctccccacccatatgcccctttcaacagacatcctctcctccttccttcctcctttcctccccctttgcctgggagcaggggtcctctttcc

SEQ ID NO: 34930 - DNA, 1352 bp, Homo sapiens
tgatgacgatgaggaggaaggggcacccaccacaccccaggctgaaggtgccatggagtcctcttaaagagggacgagggccagactgaagcagcacaaggccggggacacccatgccaagcagtgggagcacgcaggacagacacagcaggggtctggggcacggagccttgctggcatcagcatcagcccttcctcccagagccctcattccaattccaagctaagaaggtattggggcagaggctccccaaattggggtgatcccccaaggagtgatacatatattgtgtatatatttacagctgtattgtaaaagtggggtccctgtccccagctgctcctggggagtagaagcaataatgtatttctaatttgtgggtcccacttcggctatgcgggtttctagggggtgggggcttgggaccaaagccttgccccgcccctatgccccttgggggttttggctgtgtaagggggtgaaggactgcccctccctttcgagacccctccttcctggtttctgttcctttttcctggcagtgaattatgcaaagggggccggcaaaggaagggtaggtgggggaaagccaggtggaagcttgaaagactgggggactgggcctgtaaggaaggagccatcccagtccccctccgccctgctcccggcgctgagtcatggggtcgtggagaagggggcggggtggcctgattggctcgcctgcccctgggggcagtagaggggccccgcccagctaggggagccgctccgttccactcccctccctagccctccctccccacggccctgggcagggaatgtcttgttcccgccgctccctccccggggccagagggcagggcgggccgggcggcgtcctaccctcttctcctcctccccatctcctccccgcccaggtgcgagccggagccgccgccaccgctgccgcccctgactcacgccgcccccgggctggcgcagcgaagggtgtgggacagggtaaggggttggaagagccttgtggagagcgggcgagccggcgccatctggcggccatgctctgagtgggcgagcgccccccgcggccactggagcgagctgtcttcacgctcctcatccaccccagctggtgagcggcgcccccttgccaaggcagtgggcacagaacttctcgcttggccgcaggggaaggggctgcggacctgtgggaaagtgatccccttcccagatccttgccagccgggcttcctgtcaggcaggggagaataatccccactctgctcttaggattgaatccacccccattctgtacatagcctcttctgttggtcttgttgaaatctagtttcag

SEQ ID NO: 34931 - DNA, 433 bp, Homo sapiens
ggcaacaagagcaaaattctgtctcaaaaaaaaaaaaaaaaaagaaaagaaagcttgtctggcctgcctcgaatctgtgagctccagactgtgtctggttcatcttggcatccttggagactggcaaagagataggggaatacagtacatgctcagtaaatgattagtaaatgagtaaaccgatggtgagggttttttgtttgttttgttttgttttgtttttttgagatggagtcttgctctatcgccaggctggagtgcagttgcgcaatctcggctcactgcaacctccaccttccgggttcaagcaattctcctgcctcagcctaccgagtagctgggactacaggcacgtgccaccacgcccggctaatttttgtatttttagtagagatggagtttcaccatgttggccaggatgggctcaatctct

SEQ ID NO: 34932 - DNA, 518 bp, Homo sapiens
tatgtagccagtgctgtcaggctccgagggacgaaggagacaacgccgggacaaaatactgatgttgccttgctgcaggacatcaaatgctgacaccaggtcacgataaatattcccagcgtagccagtaccttccacggttagagacaccaacacaggacctggcacaaagacactgtgtgagtgacactcatggcagttgctatgcagaaaaccccacaccttctggaatgaggaaagtggagcagcgcaggtcataggatgactcagacccttggctgggggcctctgatgcctcaggcaccctcatggtgccctggggcctgacctcagttctggctcctaggactggccccatggtccaactgggtggtactggtgtctggtcttcctatccaagccaccatatctaagatgaccttaatggtcagtgagtccaccccccggcctccatgaccacccagaagcatttatttttttttttaatttattttttgagacagggtttcactttgtca

SEQ ID NO: 34933 - DNA, 798 bp, Homo sapiens
taatgatctagttgggatcatgagacacccacaagacagagatggttcaagggccattctatggattggcttttgagacgtgtatgggagctgggaaggtgccccttggaagggcaataactgggctccaaatggccgcagatgcggaacggtggtcaaggaaagaagggtgtcccttgcgtaaggctcctggtatccatgggatgcagagggcagaggctggcctggagaactgaagtgggcatgaccagaacagtctggaaagccctgcaggaagacctggaactggcggtggtggcaagatggcctcaggaagtctggagggagggcgggaggccaggctgggttggaggttagggagcctggcccgggtagagcatggcaggaagatggcttgagatggtgggggaaggggaaaggtgcagcgaggctcagagccagcttgtggagggaaggaaggaggcacagagtcaaaagctacttccaggctttcaagctgggtgaggtcatgcactgaaaggacagctggcgggagggcaggccctggctcaggaagcccaggcaccacctctgtgagcctctccacaagagggcactcacagtatgtctttgcacttacagtagttttaaaggcaaagatgtggatttttacagggccccagaagcaatagcattgaaactaatgtttcacactttacagagtttgtttaatgtacttttacagttttaaacacatttgcagtaattaacattttttccttagcaaactgaagcattatgtagggctttgggaaatac

SEQ ID NO: 34934 - DNA, 2836 bp, Homo sapiens
taacaaagttcataaaagtgagactgtgtttgcttagctttttccctagggcctggatacccccagcccccatgacacacaataggggccaaatgaatgtgttgtgaaaaaatgaaaaacaaaaaacaaaaaagaacatgctgggattccttgacagggtcgtgaagcaaactgaatgtgaatgcacagatggaaatgtgccagacagtcattccaagcagaatgtgcaaagactcagtccacagggaatgcgaagtgccagggctagtctcaggagaaactggctcagaagagacagctctcagggagggctaaagtaggaaagaggctagaaagggaccaggtgagggaaggctctgaaggccaagcccaagagttctgcctgtctggcaggcagcagggcctctggagtttcttgggcaaagagtggctgcttcctgggtaaggtggcctgtggaaaatccctgacaactgtgtagagacatgtcgtgagggatggcagggagcatagtgaactaggtttgtggtttggaatcagggcccctggggtccagccaagttggattgtttactatctgtgtgactttgagagtcacttcacctttctcaactgtaaagtggggatagcaacagtgatagtcgatctggcctgctcacttctcagcctcactgtgagaaccaaataagatgatttacaggaaagtgcaaatgagagttgtggctgatatccgcttggagagagcctggagggtgcatcctcccattctccatcacagagttggggagggaggcaccctcgccctccaggggtttcctttgtccaacccagcctcctccaacacgcgggaattgtcaggcctggcgacttcagacaggaaacgctgtccagttccccttctttcccgcctcgctcccgggctggcgctaacgcccacctcccaacagcgccacccgctggcggatatcctgcaccgcggctgcccgctcctgcgccgctggctgtgccggcgctgcgtggtgtgccaggcacccgagacgcccgagtcctacgtgtgccggacgctggactgcgaggccgtgtactgctggtcgtgctgggacgacatgcggcagcggtgcccggtctgcacgccccgcgaagagctctcttcctccgcctttagtgacagcaacgacgacactgcctacgcggggtgaagaggcgtcctgctcgctcttccgcaccgtccttcccggttaataaaatgccctgtacgcttcacgtgggtcggggactggggtgagccgcgcactgcctcgcctgcagtcgggaaagcctgcccgcccgacctctccgagccaggccgcgcacaggaggcagggaggccgcgaagctactagggaggggtccggacctggcgccgggtgaaggcgcgccgcccaagccggtcggaccgggcaccggctcccactccgcacagttgcggggaagcggtagcgctgagcagcgcgggcgtagtgggcggtgtccccgctcccgaggcacccggcgcgcagcggggcgggctttgccgggggcggagcttggcttggggccgggtgggagggggcgggccggggcggggcctggtggccgcgcggcgctgctgggttctccgaggcgacctggccgccggccgctcctccgcgcgctgttccgcacttgctgccctcgcccggcccggagcgccgctgccatgcggctggcgctgctctgggccctggggctcctgggcgcgggcagccctctgccttcctggccgctcccaaatataggtgagtcctccgcctggagtgggtcggggggcggactgggagggaggtgcaggaaagtcggaaggcattagggtaatggggccggacggagaccctgggagagcccagccagagcgcggcccgccctggtccgctgtcctgggcctagggcccggtgacttggcgatggggtgaaaagagaaggaggggggatgccggcgccccctgcctcctgcctggtcatcctctgcgcggtccctgcggacactttcaggctcaggtaccaggtaccgaggggcctgtccagcgccacttcaagatcgtgatgagagggtcgctgctccccaggactggcatcttcgctgctctggggcctagctaaccgttcgacccggtgccagggcgctgagcgggcatggcttgtagggtttagtgaagaggattctctctagcctctattccaggcctggggccgccaggcactcctcaccctggtgctgttgccaccagtgcctggccgagcgggaggggcccgagatgagccaggagaagggagaattggccaggaaagaggctgggacaccaactcctccttggaactttcacttcccgctgctgtcttgggccgggaccgagagggcaggcgcgggtggagtgtccggaggagagagggccattgtgtgttgggggggtggggggtgctcgaggaggaagcagaggctgtaggcagcgggtgtgcctgactgggcatgagggtgtttagggaggtgggggtgtttgcactgctcacccagaaatgggcgttcctggcatctccgatgtgagcgaaggggagggtgagcgggcacccggccacaaggcttagctcagtctcgagagggggcgttcctgaagtggggggagagtgattgggagggagtgggaaccggggagggtcctgtgagaacctgggattggccggaaggggacaaggagggccacaggctgcgcaagccgaaagtctttcttggggacttgtgaatgggttggtgggtggaaagccataaattagagagacaccctc

SEQ ID NO: 34935 - DNA, 789 bp, Homo sapiens
cccctatctgggcaaaggttatgtacccttatttaaaatcttccaaacttctaataaggcagtctaccctgcactaaagcagacacgaaagagatgacctccctaaaaatactgctgttggaatacgtccttccttcccgccccctcgcagtgcggtgcagcctcagtggaagctttggcgaacctggcgcgcgctgcggtgcacagagggttaactggagttggcgctgggtggagaggaggagacgcgctcccattggcggaaagttattcaggggcggggtcagtgaatctccgtaccccactcccctttccgcaacttccctcttcactttgtacctttctctcctcgactgtgaagcgggccgggacctgccaggccagaccaaaccggacctcgggggcgatgcggctgctgcccctgctgcggactgtcctctgggccgcgttcctcggctcccctctgcgcgggggctccagcctccgccacgtagtctactggaactccagtaaccccaggtagccgggccgaaccgggcgagcgcacagccaagtctgcgcgctcccgggctttgcgcgcgcccgccacccgctctttgcgcggcgccgcctgagcctggccgcgcgccggggctcctttgtttgagccggcgggggaggggggaggggcgaggggcgaggcgcgccctgggtctccccacagcccgcatgtgttggggggcaggcagaagaccccagccccaagggttgtctagggggtcttggagcatggagctgggggggcctttg

SEQ ID NO: 34936 - DNA, 1177 bp, Homo sapiens
ccagcatctgcttctctgtcccaaagagggatcagggaaataagaggcgcagccatcttgtctaggccctgtgcccactgctctgcccagcatcattaaggggggccgttgtgccaggttgaggaaggaggtgcacaatgagacagaagtttgggctggttggcatgatgccatgtggagtcttggtactgagtcccttagcgccctcatgtgtttaaagttcctgggagcctaactgtccttggcctcagggtggggtctctgtcacgggactcaaggtacagaagccagtgatactgtagtatggggagggcagggggagacccccagattggtggggtcaaccaatactggcatgcgggccagcacacatacagcccagcttttctgtgtgtctgctgcctatgagtgggcggtggacatatttgtgcgtgtgccatagaacttatgcatgtatatgcatgaagccgccatacatgcgtctgtaagggcaggtcctgttggactggcctccggggtggactggcagccgcagggaagcatggtgggagaagcgatggagggtgtgtgcgtccctcggaggggatccctcccacgttcacccttggcttccatccctcccatccctcctcccggctgctgaattatgggggatggacggaggaaatccgggcctgggtctgagagtcgctggggcctgcgccgtttctgtggcaaccaaagcgtacgttcccttcttccctccgcccctctccctcgcctccttttctttggaggcaggccgggcttccctgcgcctttgctaccctctggtggccaacaggagaaggacagaccaagaaggagggcacggaaggagacttaggggagcggcggcactagggccccgggggcagagacagggctgagccgcgaggaagctcggaggaaaagtcggaaggctacgcggaccctggggaggggctgcggagcggtcagatggaaagcggctttgctctggggtttcttctctctgagccgcttcctcttccccacagcctgcggcgagagggctacaccgtgcaggtgaacgtgaacgactatctggatatttactgcccgcactacaacagctcgggggtgggccccggggcgggaccggggcccggaggcggggcagagcagtacgtgctgtaca

SEQ ID NO: 34937 - DNA, 928 bp, Homo sapiens
ctcagacgaggtcgtggggccaagagaggagtttggtgacagtcccaagtttgggctgcggagaatcgctgtttctgtgagggacattccggggttggaacatcagggatcccagtttcttgaggggtgggaccaaaggggcgtctagggccgacggcagagctaaagtgacccgtgtccaaagggtaggggagctcctgaaggagaccgcccgacggggacagtttggagggggtgagaaatagagccgtcgagggagggcacaggcacacattgggcgaaagtgactcaggcccggtctcctccccagccacgcccactcacaacctgcactggaagtgtctgaggatgaaggtgttcgtctgctgcgcctccagtgagtagaataggctccgagccgcgcccccatcctcagctccctgctttggggctcccctggcttcctgggggtgggggcggagggcacaggtgaggggggcttgctccccagccgtagcaaggggagggaatcctggccctgactctcccctcctctctccccacccgcaccccaccccgcagcatcgcactccggggagaagccggtccccactctcccccagttcaccatgggccccaatgtgaagatcaacgtgctgggtgagtctgcgcagcgccctctggtggccactgctggaaccgcagccccccgccccggtgcctgctcacctcgcatgccttccctgggggcactgatacttcctaccctgtgggtggtcacgtccctggctccattgctgctgccgcgtgcccctgccctggcgcgcaacccagccctcaccagtctgtctgttcctctgtccacagaagactttgagggagagaaccctcaggtgcccaagcttgagaagagcatcagcgggaccagccccaaacgggaacacctgcc

SEQ ID NO: 34938 - DNA, 1088 bp, Homo sapiens
ggtggatcacttgaggtcaggagttcaagaccagcctggtgaatatggtgaaacccccgtctctactaaaaatgcaaacattagccgggcttggtggcacatgcctgtagtcccagctactcaggaggctgaggcaggagaatcgcttgaatctgggaggcagaggttgcagtgagccaagaaaaaaaaagaggatagagtaagaggcgtgtatgtctgtttgtctgcgtgtgtgtgtgtgagcgcgctccattgtgcatgctgtagccatcaggaaagactctcactggagggaacatttgattgagccaaattatacattggaggagagttttgcttcctctgtttcaaagtacaaattccctgaggctggagcatggccagggaggtcgaggagcatgaagaagcccagtgtggctggagaatggtgtgtaaggagggaaatggattgagaaatggtggaggcgggcgccaggggattgggagaacacagtgtgcatctgaatttcactgtaaacatgactgggagccactggagggtttggccaggggagcacagataagagtcacactttaaaggatctcttgaggccaggtgtgatggctcaacactttgtaattctgctaggaggactgcttgaggccaggagtttgagaccagtctggtaacatagtgagagcttttctctacaaaaaaaaaaaaaaattagcctggtgtggtggtacgtacctgtagtcctagcttctagggaggctgaggtgggagcatcactggagcccaagagttccaggttacagtgagctgtgattatgccactgcactgtagcatcaacacagcaagaccctgtctctttaaattaaattaaattaaaggatctctcaactgtgtgtgaagaataggactaggccaggcatgcctgtaatcccagcactttgggaggccaaggcagggggatcacttgaggtcaggagtttgtgaccagcctggccaatgtggtgaaaccccgtctctactaaaaatacaaaaattaggccgggtgtggtggctcacacctgtaatcccagcactttgggaggccaaggcggg

SEQ ID NO: 34939 - DNA, 2341 bp, Homo sapiens
aaattagctgggcgtggtggtgtgcacctgtaattccagctacttgggaggctgaggaaggagaattgtatgaacctggaaagcagaggttgcagtgagctgagattgtgccattgcactccagcctgggcaacaagagtgaaactttgtgtcaaaaagcaaaacaaaacaaaacaaaacaaaaattaggcgggcatggtggcatgcgcctgtaatcctagctactcgggagggtgaagaaggagaattgcttgaacctgggaggcggaggttgcagtgagccgagatcacgccattgcactccagcctgggcaacagaatgagaccttgcctctaaaaacaattttttaaagtaaaaataaaaagaaattagaatgggaataaaaagagacaaaagaaggctgagaggaagagacagccagcctaacggggaggaaggccacgcccaccccaggtgcatcactagctgcacccaggcctgcttgtcacagccacttctttctctcccgggaactgaatgggcttgaccatcctgcatttgtctaactttgaagccaagcaaggaagtaacattaatatgacaagtgaggtctgaacaacagaaggagctgcatttccattcggtggccataaacctatcctgcccccaaccccaggagtgggggatcttcatgcccaggtcctctgtgtccaggtgaagcacatccacggggatcaggtatcagaaagggctgcttaattacgctgaacatcccctccaaagaggactacagctgcacgcagctgattcccaaacttgaaccaaaaaatcttacaggaatatggatgtcttcagtcccaaccagcccctgccctgtgtcaaacatcacgtgcatgccacatcacacatcacaccatgtcacaagccatatcaaggagaactttgctcaggggctggtgtcacaatacttcaggcagcaatgctggagttatccacacacaaaagcaaacagtgagccctctagaaatttctggaagtttagaaacattcctattcttgtctgaaaacccatgtatttgccataatgcggtttaggacagatcacaatcccgagattccccaaatcaattctgatgctggtgttgctgctttggaacatcactctctacagccataaacccaagcagatgccactgtgtgccaggcactggcagaggcctttgggtgagtctcactcactgcccatcaggagctgcagtgtgggttttggagtccagtcctgaaggcttgagcctgaagcgcaatgccactgtgtgccagctgggcggcactgaccctccagtgctcccaaggtgatgctccttccagccttggagggttaatgtgacaggttgtataaagctcccacgtgtctggtatattgtagatgctggacaagtagtcgtagttgttattactaataagtaaaaatgtgttgcttcctgggtgtcagcaaagtgtcaaagtcacgaaaggctacaggagttcagagggtggagccatcaccaagctgtccttcctggaggacgtggaacttagcatagtgttgccagataaactacagaactcccagttgaatttgaatttcaggtaaacaatgaattttttcttagcacatctcccaaatattgtattggacatacttaatactaaaaaactattcgttgtttatcggcaattcaaatttaactgggtatcccatattttcatttgcgaagccagcctaaatctaaagaaagggtggcgtagatgggctgcggggagaggttggaggggagtctgccaggctgagtgggagagctaacatgcctgtgcacttacatctgccaggtgctgtaccgggcagtttacaagtgtcacaaatccctgtgaggtatttattattcttttcactttacagacgagggaactgagactcaagaccattgctggttactatttaaaccctaggtctgcctggtccctaagcacctgtttcttcccatgtaccacatcctgggggcaacagggaagcaaagcaaaagggcatgaatgcccaccttcatgttagagctcagcaggcacctgcctcagtgttgttccaatacaggctcactatttaacactaaggttctacaaggtctctttctttctctccccttccttccttcttgccttccttcctccctccctccctccctcccttccttcctccctccctcccttccttcctccctccctcccttcctcccttctctctttcttctttttttctgatggagtcttgctctgtcacccaggctggaatgcaatggtgcaaccttggctcactgcaacctctac

SEQ ID NO: 34940 - DNA, 8041 bp, Homo sapiens
tgttggccaggctggtctcaaactcctgacctcaagtgattcacccgcctcagcctcccaaagtgctggaattacaggcgtgagccaccgtgcccggcctattttccaacttctgaaaaatgtgtgcacattactaataaagtggggaagggtatactttatgtttcaaaatgaccttgagggagtacgacagagattgctctcagcccaggttctgctcctccccctgctgcctcaccccattgcccagagatgacccctggggctgagccaggtttcacttgccccagggccctgcagctctggccttcccctccccaaactgcagggcacccagcaaaggagtcgcaatccagtacctgcacctgttcccaactggaaatgctgcctccaggcagccagggcctaccccaagacctcagaggaatttcctctgaggaaattcctgccctcccaggaatttccagaaaggactcatggaggaatttcctagacatgcagacaggcagacagacagacacctcaggcagctctcgtcactaagcgcagatgtttgcctgcgggtgacgtgctgggagccaacacaagcacacaattttgcggcgagaggcagcacgaagcaagaatggagagcagacccacccgggcaggctgggggctggcatgaggaagggactgggagggggccccagagttggtcagcagatcgagtctccaggaacagaagtccctactattatctctgtctgaatggcacagtgccctgcaactctcctctcagcacagcaggcattgcaggggctccaggaagggtcagggtagtgtgactgtgagtggtagggccgcagtctgggcttgagcacttagcaagtttgctgtcctggtggcttgtcaatatcccctaccggcctgggggctccccaaggtagtgattttatcttaaacccatccttacactctcggtgcccatcgcaacacccagctcatcacaacactcagtgtctagggctgctccagtagggtggatgatcgacccccatatggataggggagtggatagagagtgatgggatcaatgccctaagtgagatgagaatactggggacagcaccaaagcagggaaagagggctccgggtcctgtcggtgcgcagaatttccatgcacgcttctgcacccagcttgctccagacctagacgcaggcaagagctgacgtggccccgccagactgggcccagcgagcccgaacctgcctggcccaagcagctgcagcgtgggacttcacacgtccccgcccagtcccagtggtcagagaaaccagggaatccggcccaaagctgtctcctccaggaggcaacccgggccacctgctctaaagagctaccagcatccctcccctcttcaacccccctgctggctccttttcagaacagttatgtccagcagaagttaagttccttcactgaacagtgagtgatttcactcactccacagatatttactgaccatctactgtatgtgctagatgctgtgccaggtgctggcagtaagataatgaacaaaacaaaaacccatgtcctcctggagctttgactctatggaatgcccgaactgggaggcagtactctcgccggggccacgtgggaggtcgacacccaggtgtcctcctaggtgagcaaaaggcgcgtgaggtgccgccctgggagcagtcggcgggtggacttcgtcctgggcgagaggagcgggccgcacctcggacaaacgcttggctgggcacgtcgcctggggcaggtgcccgagggagaggggggtggcgctggccgtgcgcaaaacccggccctgacccggccacggggttagaggccgttggtactctatgtttattgtaaacgcagcgaatacggcctccagcggcctcagcgcacgtggtggtgcagtggggagccggctgggccctccccagctccaggctcctccccggcggggtcagcgccagacttgctgcggcgtccgggccccgcgtaattacaggggctgtagccaggcctggccgtaaaataggaggatgaaacggcctgggaactggagaagctgggccggagctggccaggggccccgggtccgtggcttcccgcgatgcgcagccgcagggaagggccggctgaggatgcgcacacacactcacaacaccaacctggcgcgcacacagccacacaaccacacacgtaaaccaccaaacgcacgcagacacacagcattcggctctcccactccaggctcactcgtgagcctaatcaaacacctgcccgccctctccaccccaggagctgacacccgcccgccaagccctctccagacggcagcagatccaggcggggagaagagccccgagaggcaaattccagtgggtttgtttacacagcgcgggggagggggcctgagccgggtactggggcccgactgactgggagccccagctcagactgggccagctccagctgtgcagcctgaggactgcgcacaaacgcccctccgttccaccccacccccgctgcacgccggtacgcgtctcccctcctcttcacacgctgttcacaaacattagcatacgtctgtcaaagagtttcacacgcttccacacacgcggctgtgatactactcacaaatgctttcatgctagcgcgccatcacacgtatttcatgtgtggttacagtttgtcacccttcatgcccagattctcacagtccatattcaagagcctgttcgcacggtgtacgcgtgtgttgttacatatactcaggttattagcgctctttgacttatctaaaataagaacggccccctctcgagcccagggtcccgcgtgtcgctcctgcgggcaggcactgatgtgatggacagaggcgtccttagccccggccgcacacgttacacactcgatcacacaaagcgttgcactttattcccggcatctaggcgatgacacaatctccagaacaaagacaacattgacaaacccaacaaaaacaaacagccgcgtgtgtgtggggaggggcagtcaagcgcagagtccgggaaggggatgggggaggaggagagtgtgggaacgcgggcgcccgagcctgggcatgcgaggctcagaaaggtgcggggcatgtcaacaacctcgcaccctgcaaggtccgcgcgcggagcagcaaagccgtgtcccgcacccccgcgttcgcagactcgcacttgcgagttcttcccttctcccgcacgcgactgcgcccagggacgcaagcccaccaccgggacaggctcacaaagctccacgcagacccacaagtgagcgaacacacatctctgagcagatctgcgggggcagaggagcgcgcttcgctctttcctgcacccccagcctcctcgcctccccaccccgcccctcctccacctccccagcccccaagcccccaggcagccgcgcgccgggcggggcgagggcggggcggggtgtcgggcggcgccggcccaaaaggcggagtcgctaggcgaaggggccagatctgtgagcccagcgctgactgcgccgcggagaaagccagtgggaacccagacccataggagacccgcgtccccgctcggcctggccaggccccgcgctatggagttcctctgggcccctctcttgggtctgtgctgcagtctggccgctgctgatcgccacaccgtcttctggaacagttcaaatcccaagtaagcctcgagactcccgctggcagcctgggctcccggctggcactaccccaccgggataactgtcccggccaaaccctgagctgagcctagagtagatgaccgaggtaggagggcggctgtagattttcctcccctcacttctccgtcatatctgggagcaccccaccccggggcatgcttgtgtctacttgcatgggcttatatctgcccttcccttccttctctctggcacccctattactctaaagtgagggactcatgctgggcagttcctgccttcagcatagacttcgcccctggcagccagggcccttgttccaggccccccacccccccactgtgaaagcctccacgcctctccttgtgtgtcctttgggtatctgaccacactgacagatacctggtgtgacatcaagagtgcacagaatgctcaaggtaaccctggaaggacctctcaggagagagctgggctgtaggcattcattatgcattcaccctgtatttaaagcaaacctggaaagtccctcactaggggtcttttggggtggcatgagtgaggcacatgctgtgcatgggtaggctgagggaatcacctgtttatggggctctcaagtagtaaaagcgaagagctgggagagggagatcatgggaaagcttcagaatgaacagaagaggttaaaggggttacagaaggttctgggcaggaaggagttaatttctcctgggcaggtttagggctgtgaggcaaatggtactgggaggaagactctgtcggcccctttgttcttgcccttgagttttctgaagttatgggaacaatatttgagggaatacaggagagggtggtagggaggagcagggagagaagtgggcagcttggtatcacgaaagccatctcaccggcttagccactctcggccctagcaagcttgccccccactccccttgagaaatatgttgtgccagcttcctctgaccccgtgtcatcgtctggtgaggcagtctgttgtctgtggcttgttagggtgggggagagaacagccagctgccaaccccagagggcaatgccctcctgcccatggacgctggggaggctcagccagccctccgccacccgctccctgtgctttgcctccttgacctgatgcatctcgccctagtatgggagagagcaaagtccctgtttatgcccatgccaggtgttgactggaggaggaggaggggacaggaagccatgagtagggagggggggaccctggccttttccgttcccaagctcccaggtttcctctctttcaggaaggagcctcttccttacccacctccccgccttccctgacgccgctgcccccctttcccagatggggagcaagagtcaaatgaaggctaagtacagcagactgtacccccaggagagggggctgatgggtgaccctctggccacacacacacacacacacacacacacacacacacgcacaccctatcatacccaggactaaagagacgccagtccagagtagagtccgtaggcagccaagctgggcccagcgtgggggcaaatatgaggctacaatgaacggggtaggtgaggctggcatgggtgactcaggccagtgggcagcagccctgggatctccaggcctcaggcgggggcagcatgctgagaagggcgccagcctccctcatgctggagggcaggcccctcattctgacctgccagctccctttgtttggaggacactgttgggggtgagtgggcgctgtgccctcctggggtcctgggggctgtgcacatttgacaaggtaagttttcacaagttctcatgagtgctggggcgggtagcagaggtggatgaggaatgagtcagtgcccgtcacgggaatgagggaaagacgccaggcccagagctgaaatacctgttctgaaatggcttctatgtttatctctccagagaggaattttaaaagcctctctctgctcctctcttttccccagggtgggggaggggcctggtaagcccagtttgggcgctggcacgctgctgcaaagcctggcctctcaggggtcatgctgattgggcagtgggtgcccacctccgagtcctctctgcctgactccttcctcgccctcccagccgtggccagggctttcagttcgaagcaacttagcgctaattctgctgggtctctagctggcagtgcctgggggaattagagaaactgaccagcttgcggggtcgggggaagcacttttccccctactgggaccccacccaggctggagccaggtgtctggagctggtggggaggggctggtgggcagtcaggctggagccggtggggccagggggaatgaactaggggaggggtgctggctccaccttgggaggaggggagaggaggggagagggggagaggaggagagaggggagagaggggagaggggagaggctgtctcaagctcaagctcagagctccagcatttcatctagggggaggtggaagtgtggcttttagagataaaaggacagggttgttttggggtgctctgagaaggggaaaaggagaccagtgtataactttgagtagctagaacgggaagatttgagggggctgaatgaattgatgagagtgatttaacttaaaggactggggcattatctgtgggcccgggtatactagcttcacttttgaggaaaagtgaagctgggaaatgtgagatctactcagtgggtccggggaaatgtgagaggagtaaggaaagtgaagacacagatgtgttggaggctccaggctagcatggtaaagagaaagggtttcctggattctgattacagaatggacctgtgggggtctcagattgaggcctaacagcatttaaaaggagcaactggtagaacagatttggggaaatatttatgggtagaagagaatgataagtgagctacagaaataggtagaagcccatctaaatatcaggtaagtatcaggggggttatggaaaatgctttggtacccgaaagatactgagtgaatgctatttgaaggaccaacaggagacagtgatggtgcaggggaatgtttagagatggcagagagaaatgtaagacatcaagatcagtacatattgggagttgaaacttcggaaaaatctcttggggtccagtgtgaaatgtgagaggtcatgtaaacattcagaggcccaaggatctggcctggcttctgaatgaccacctgcttcttccccctgtgtgtgtccccaggttccggaatgaggactacaccatacatgtgcagctgaatgactacgtggacatcatctgtccgcactatgaagatcactctgtggcagacgctgccatggagcagtacatactgtacctggtggagcatgaggagtaccagctgtgccagccccagtccaaggaccaagtccgctggcagtgcaaccggcccagtgccaagcatggcccggagaagctgtctgagaagttccagcgcttcacacctttcaccctgggcaaggagttcaaagaaggacacagctactactacatctgtgagtgcctgtgaggggacagtgtctgtgtttcttttttgccattacatacatgcttgggtacatgcttggtgtagagtccagcagcagagggccccttccgatcttgaattctattttcattcatctacatcccaatgtgagtgagcttctactatgtgctgggcactctgtttagcgctatgagcacaaagataaataaaacactacagagcccctgtcctcaaggaagctgggaagaaacacacataggttaagagacccttagaacagtgtgctacagtagacatgaacacaggggccttgggaaaatgacctgggcacctgccaggctatggggctcagagaaggctcagtggggaagatggtcccagagctcaggacaagcagaggagctggccaggcatgaaggcacacgtacaaagggagcatgacatcttcagggaacttcctgtggctcagcctggctggagttggagggacacaggaagtgaggagatgtgagcctggagaggtggacagaacagaccatgggggaactaaaaggtgataaggagtttggactttatcctgagggctctcgccactgatgggttttattttattttattttattattattattactcttgagatggagtttcactcttgtcgcccaggctggagtgcagtggtgtgatctctgctcactgcaacctctacctctcggattcaagcaattctcctgcctcaacctcc

SEQ ID NO: 34941 - DNA, 3505 bp, Homo sapiens
ctcgtgatccgcccacctcggcctctcaaagtgctgggattacatgtgtgagccaccgcgcctggcctaggagtagtattaagtggcccaggcaagaggaacatattcagactcggaggaatgaaggatgaaatgtggggaggggcagtgtctatgctgagggttatttccaaagaatgagaggctgggctgaacattgggcaggaagttagcaaaaactaaggagggtaggaatcaaggttagagggaagagaagaatgaaattgagtagggagctgagaaagcagggcgaggggcatttggacttacattttcttccagcaaaggtttcttatttaacccctgtgggcttatcttgcagccaaacccatccaccagcatgaagaccgctgcttgaggttgaaggtgactgtcagtggcaaaatcagtgagtgtcagagccctgtgggcctccttcctccatctctatgctgggtgcggtctagtgatctaggatggtatagaagtcttgcagcccagcccactcatacttacagccctctgcctctttgatacagtacctgatctactaccactcttgtctttcagctcacagtcctcaggcccatgacaatccacaggagaagagacttgcagcaggtgggtagctggagcaaactgggcctggggcacaggaaggggtctgcttgaagaggttgggtacaggaggtggctcctttaccaggctgaggctgagggaatcctgttgggctgagagccagtacaaatagtggagccactcacactggtggcctttgccctctcaccttgcagatgacccagaggtgcgggttctacatagcatcggtcacagtgctgccccacgcctcttcccacttgcctggactgtgctgctccttccacttctgctgctgcaaaccccgtgaaggtgtatgccacacctggccttaaagagggacaggctgaagagagggacaggcactccaaacctgtcttggggccactttcagagcccccagccctgggaaccactcccaccacaggcataagctatcacctagcagcctcaaaacgggtcagtattaaggttttcaaccggaaggaggccaaccagcccgacagtgccatccccaccttcacctcggagggatggagaaagaagtggagacagtcctttcccaccattcctgcctttaagccaaagaaacaagctgtgcaggcatggtcccttaaggcacagtgggagctgagctggaaggggccacgtggatgggcaaagcttgtcaaagatgccccctccaggagagagccaggatgcccagatgaactgactgaaggaaaagcaagaaacagtttcttgcttggaagccaggtacaggagaggcagcatgcttgggctgacccagcatctcccagcaagacctcatctgtggagctgccacagagaagtttgtagccaggtactgcattctctcccatcctggggcagcactccccagagctgtgccagcaggggggctgtgccaacctgttcttagagtgtagctgtaagggcagtgcccatgtgtacattctgcctagagtgtagcctaaagggcagggcccacgtgtatagtatctgtatataagttgctgtgtgtctgtcctgatttctacaactggagtttttttatacaatgttctttgtctcaaaataaagcaatgtgttttttcggacatgcttttctgccactccatattaaaacatatgaccattgagtccctgctaagtgcgaggctctctgtgctacaacagtagcaactgggtttgaatttctttctctccaaagaatgtgtgcccctcacgaggccaaaagggtgggatgtttcctcctctgagggctgtccaggaccggagtgctcctgacagctgtctctcgggttctgagctgcactccactctggaagttcttcctatccgacctctaccccactcccactccgtcaccgcagggctttggcatactaccattcaggtactcacgctgtttcggtgagtcagggaagctgggaacgccagctgaggcatgcggccccgccccacagccacactagcagagacgtgtgggaggctgggagggaaagttcccagtaacaagtgggttggaccgggggtcagtgatagaggcgtcagtggattggccacgtcatgtaaagttgacccgagagggagggcaaaagaggaaggcttggtgattcctggtaatgtgttattttgagaaaaagcttcggcagcacactccagaaaaaaacttcccaaaccctgggcaactgaggttctgatgtggagctctggatggaaagcgtgctgaagtcttgttaaactagcaagcttttgtttggaggtccaccgccgaaggcgcacaggcctgtgggaacacgagcgttgagactgggggcgtctagatgatccaaggggtaggcagagtgtgagcagcggcaggtatcggggacacacccgcggagccctaggaaggggactgaccgggacatggaagaggtctggaccagggtactgggaaggcgctcggaggagaggggcgcgagttccggttcggcgtcggagggagggtggggcttcggcgcagtttccggagggacggcccgagcgtgcgggggcggagccgagtgcgcggggcggggctccagagccgcaggtctgggctgcagtaggtcccggcaaccgcaggctcgcggcgggcgctgggcgcgggatccgactctagtcgtaatggaggcgggcggctttctggactcgctcatttacggagcatgcgtggtcttcacccttggcatgttctccgccggcctgtgagagtgcggccgggctgggttggggaggactaggcagtcaggaaaggagagagaggggacagagacgtggccacagcacctggctcgtccggaaccgggatcaaagtgggatcgggtcgaggggaccggggtacaagggcgaggctggtcactaggcctgaaggagaaggcaggatagctggcgggggggagagggggcggggtctgcggtggtccggaaaggatgacaggcattgggcatccccctctagcactctgcttctcccttcccacccccacccctcccttcggggccccattacagctcggacctcaggcacatgcgaatgacccggagtgtggacaacgtccagttcctgccctttctcaccacggaagtcaagtgaggggccgacggctgcggtagtgggaaaggctaccagagggaggtgggggcggggcaggaggagcaagagtgaaagaggtttggccgggcgcggtggctcacgcctgtaatccctgcactttgggaggccgagacgggcggatcacgaggtcaggagatccagaccatcctggctaacacggtgaaaccccgtctctactaaaaatacaaaaaattagccgggcgtggtgccgggcgcctgtagtcccagctactcgggaggctgag

SEQ ID NO: 34942 - DNA, 1566 bp, Homo sapiens
aaaaaaaaagaagtagtacgccgggcgcggtgactcacacctgtaatcccagcactttgggaggccgaggcgggcggattacgaggtcaggagatcagaccatcctggccaacacggtgaaaccccgactctactaaaaatacaaaaaattagccaggcgtggtggcaggcgcctgtagtcccagctactcaggaggctgaggcaggagaatggcgtgaacccgggaggcggagcttgcagtgagccgagatcacgccactgcactccagcctggacgacagagcaaggctccgtctcaaaaaaaaaaaaaaagaagtacttcctacagggttgaaaggaccaggaaagtgaaatgtcatttccatcctgagaaatattgagaaggggtctttgcctccttgggagcaaaaatgggaacaccagcaagatgcaaagataaaggctgagatggcctcaagaaggtggttctttcacattcacttctcgaccgttagtacatagaatccccaatacccgttttccatactcaaactaaacgaagttagaaaataaactggctctttaatgggaaatgggaggaagggctgtccgcacaggaatggggttaggctgtcagaagcgcagccccctgcgggctaagtcggctcgggcctcctgtatctggctctgcagctcgcgtgcggcgtcctcgcagtcatgaaaagtggccacacgatagcccacagtgcccagggcatagcagccggcggacaccagcaagtaggcgggcagtggccacaggacttcctggcaggacaagggcagctccaggcccaaggctcccgtggtcagggccacccaggtggagcccaggatcgctagtccccaaagccactgcgctaatttcgtcatggtcactgcgagagaaggaagcaatgctcccctgaggagcagaaaggaaaagcggaccaaactcaaccgaagcccgcccacggagagcattaaaaccagccctggccagaggggaatcgccgatcccagaggtccgaacttgagtgcccacaaaaggtggaagggccccttccaccttgctaccccctctatatttgagacccactccccatctctcgccctccccattcagccttcaacctacacttacctctaccccacgtctccccttccccgcgcggcccggatgttggcgtccggaagtcctccctggttcacgttccgcttccgcgcggccttctgggagttgtagttcacatggcggcgcctggtgtactcctggccagcgcctcaatctaggcgggggtacagtgggctgtgctccgcaaacggggagcaggccgggtctggagaggcctcggcgctgctttcccaccttgggctacgctccaggctggcgtggggcttgaggacatccttaaatgttgcaacaagatgggaatataataccattccccttaaactcaattctccagcgctgaaatccattccttcattcactagttcattcattcgaagatttctttctttccattcttgacagggtctctctatagtgcctaggcgggacagaa

SEQ ID NO: 34943 - DNA, 1285 bp, Homo sapiens
tgcctgttcccctcaaaccttccctgggagctggccagaaggtaccaaagtttcttgctttcaaaggccttctcttccagctccaactccaggagctatacaaggtgcagaatcgaaaagcgtcatctgtcttcagacagcttcagtaaatatatttctccttaacaacctttcacctaagcatctggaaattcaatatcatgtttcaggaggttaaagaggagaaagttcaaatactcaagctccaatattcacttactctcagggaagatctttgcttggaatcctttgccaaagacaagattctccagattattgaaggcctggttgagggagttaaggagtagggtgtgcaacggggacagagctgtgtggggaaggggaagggcacatgcctacgtggcccgccccctccaactgcagggaggatacagtgagcgagaacacgaagagacccgaaccaagcaggccgccctggatggtgagccactcggtggaggccagctgacggctgtacatctgcatcccagcaaagagcagcagggacaggagggaggagagcgccagcgaggtgcccgtacccaccactggaggggatgggagaagggacggagagtcaggctccgccctccctccggcaagctacgggcagatcagccggtccggaagctcggtgggccgaccccctccaagaactcccgggactgcagccacacgccccaactccccacaccgcgcggcaacccctacgtattccccagccccggacaccccgaaccctcccgtccggtggaaatgcccgctcccggtggaacccaggacacgtcagctctgtcgggagaggacgaggaaagcttgtccacccaaaccccgaccccctctaggacttcctggggaccccaccggtcctgttacccatcatgccccgcccgtgagtccaaccggcgcctctggccaagaaaggcgagctgaaccgggtgcggttagctatgcgcatgcgtcagcgcttaccgcggacttgctactcctcgcgttctcctctttcttcctctcagtgcctggacgcagcgccctcttgcgacagggaggaaataatgcgtcgagggggcatcctcggccaccgccctggtcctcaggctttcctcgtacctggtgcgtctgctgccactctgtacaaggtgcacttatctctttaagtcattgggcccatgcctgtggcatctatcccatctctgtcttctttgccatttctttcatctctagtgcacgttcctcaaacctccct

SEQ ID NO: 34944 - DNA, 958 bp, Homo sapiens
tccccaaccattcctgggtagggtacaagggctctaatcgctcaaccccctgactacccgtttgttctccagctggcctccccctttcaccaaccactccctggctccgggggaggggggaggggcagtctggaacttggggcccctgggctctagttttagcctcagggcaacaactaacgtggggatggggaacaaagccagctaggtcgaggtcctgtacagcaaggtcgggaagcccacccctaggtctcccactccacttccccgccctccccgggtccactgaagcagagcggggccgagaaataagagggctggataatgagtggactaggtgctagttttgggctccctccccccaccacttcccggaatagccccacccttctaaccgctccctgtcccgttccacacgcagttctaccctgaaacccacagtccccgccccagccggactttccagcagcctgggttccctccttggagaaagccaaggagggagtgggggaagaaatttccacttaagggagtaaacctgggctccgatgaaccctagggtccttccttgccactctccaccactggccaggagctcctcccgccctctagtggtcaccgggagccttgcggggctgggccgcgcaagctgaggggccgctcggaccgggcggagaggagtaagggcagcgctgcctaagtgaggcagcgagagcccgcgagagggaagcagggcccgggagagaagggtcactgccgtggccagggagggaggaacgcacagcatggtggacggctgggagctttaggagggggcactccgggacgcgtggtggtggcgtctggaggaaatggagctaagcgggtggggtcctgaggtatgtggaaggggcaccgaggtatgtgggagaggacgttggaacgtgggcgggggagttggacacgttctgtgtgggcc

SEQ ID NO: 34945 - DNA, 2048 bp, Homo sapiens
ctaggcggagagagcaggagccggggggcggagggacagaattggagggggggccagcaggcgggtgagggggggctgaaacaaagagctgccaatcaccctggaggcatcatcagctctgggaaccaggggcactgggaaagaatcctggaggcctccctgctttctacctctccctaatgatcctcccccaggtgcctccctctccgcagtcatcattgttgggggtctcggcacacagcgctaccgaatgccactgttttctggaagccacgattgtggaaggcaagaacccctggcaggggcagtgctagacagtgggcattattccacagctggcaggaaaggatgccaagggagtggccgcaactagcttgctatagtgcccagggatgcccacatggcatgaattttgctgttctggcggagcaagtgctctttattagggtggggggtcccctgacaagtgcctgtttctccattttccctcattcgtaggaaagcttgggagtctggaagcgtctgacgggaactgaagggagaatctaaagcagtggtcagtgaggtcagagtgaagaaaccaaaaaagaggaaagggacaccagggacaggcgcagaagaccaggggtacaggcgaggagccaaggaccagactgtggaacactgtgggtactagcggacgggccgtgacccggatgaagcagaggggcgcctgagttcccgtcacctaagcgacagcctgcgagcctctcttcccctcccccacccaagccccagcccggcctccgctccggccgccgccaccgcccctgttttgtttccatggcgacaggcggcgcagggcccgctccaaacataacgcgctgtggaaaacatgctgctcgggggacccccccgcagtccccgctcggggacgagccccaaggggccctggagcagtacaggccacgtgcagtttggcaagagcccccagacctggcccaggcgcacaagaccccgctctccagagcctgccgcgccttcaggggttcggggctccacttggacgaggcgccgtgacactccgaggcgcgccgggccgacagcgctgtcccgctacgtgggccacctctggatgggccggcggccgccctcccccgaggcccgcggcccagtcccccgcagttcagctgccagtcgggccagaagaagcctcgcctccccggggatctccccaggccccctgaccgcaacgatcggaggggcggtggcggggggcgggcccaggcaggggagggcagaagcacacaaggaagtgtttccgggacagagggtgggcaagatggcggcgcccatggagctgttctgctggtcagggggctgggggctgccgtcagtggacctggacagcctggccgtgctggtgaggggtggcgccggcgccctctgctgtgccctgatgactggggagggggccgaactagccaagcatccaaaccttgccagggctactcagcacgggcgcagtgggggaaactgaggcagtcaaagagcgtacgtggccgatatggcctcagtgccctatgctgtagttttctaggcttaatgcagcaatgaaaagacgcctggttgggagttcaggtgatgggttctagtccttgctcatccattcactggctgtgtgaccttgcggagatcctttctctttgggcattttttttctccattcggaggtttactaggctggactgtctcagggacctactctagcttggaattcctgccttctcctcagcccccttctcctcttcctcctcacttaacagcatttactgaggctattgtttgttagaccaaacgactcacagccaggctttgtataaagagcttagcaatcagacttcctttgcttcatttattcattgactccttgctttaaagaggatctattagatttcttccaaatattaaacattgccaggcaaagatgaataaaatttggttcctcccttcgagtttacagaaaggcagataggtaagcaaataaatataataaaatattcacatat

SEQ ID NO: 34946 - DNA, 692 bp, Homo sapiens
ctaaaaatacaaaaatttagccaggcgtggcggtgtgcgactgtagtccccgctactcgggtggctgaggcaggaggatggcgtgaacccgggaggcggagcttgcagtgagccaagatcgtgccactgcactccagcctgggtgacagagcgagactccatctcaaaaaaaaaaaaaaagaaaagaaaactaagacttagagaagttaaatatgtggcagagtgaagcctaagctcatatctgtcctaatctaaattccaagcagttctgagtcatcaggtcacacagactgcttctcacatgcttcaggaatgccttttcagtcttccttaaaggttgcaaacagttgcaaagcaaatttcatggttcctgtttcttcaaaatctcaaagctcttcattcagccaggcatggtcgctggagcgtgtatattcaaccacttgagaagatgaggatcttttgagcccaggagtttgagacgaacctgggcaacatagggaaagccctgtcacctaaaaaaataaataatacaaccagctcttcatttagaggcaagcacaaaataggtgctcaatgtttgttgaatgagtgagttgttaccaaccataccccattattcaaggtcctgcttgtcagtgtttcaggaagtgttcttggcaaaggagtggtgaacttcaagaagaatgatgctg

SEQ ID NO: 34947 - DNA, 1199 bp, Homo sapiens
agaaaaataaaagcatagagagtgctggagcagtgtgagtgagatggatagtggtaaaaggtgaccttggaaaaggaaattgggaggccagattgtgtagggtcttggtggccatggtaaggagtctgaattttgttctaagatggaaattcactgtagagtttggtgctgggaagtgacaagatcacatgtgtatttttaagagatcactttgggtgctgtgtagaaatcagactgtaggagtcaagtgtggagggagaccagcatccaattacagcctgccatgaacttgccaggttcctcttcccttccttcagcacacactactctttcccaccgcttagcctagttaacacttattctttcaaaattagcccggatgtcactttctctaagaacaaccgcgccccctgccgcctccccacctcacacacctcctctaacgcaaactcatagccctcacaacttctttgtcactttttctccccctttttttgagacaggatctcgctctattccccaggctggtctcgaactcctaggctcaaaagatcctcccgcctcagccacccgaatagctcctttgtcgctcttatcactgttgtgattaattgtacaaatggcttaatggcagttatagcgcccagctcatcaaaggcagtggcctgccaatcgtcagcgggcagggcagggaccagtccagtccatcctggctcccatgtgcagccccagtgcgcatcgcgacaccggcgctcgttgccgcgctccgtgaacgtttgtcacatgtccgaagaatgaatgaattatatacctttcttcccactccagccctcaaaaagcaagtggatacaaagacttgaagattttataatcgcttcattagtaaaatttgaccatccttaccattaaaaataatgataatgatgaaaaaggctaagtgcgaacgccgggaggggagagctaaaattcaaagggcgaaatatttataatgcctaccgtcggcgaagagaaacagcagccccaaccgaaggcaaaaggaaatcccaccgcagcctccaaaggcgcgtgggcgggactggagaatggggccctgcgcactaggcgcggaagtcaagaagcagccccaccacccgtgccgcgagaaaagcagccctggggaggcggggcggggcctcacttggaaaagagacggtcactca

SEQ ID NO: 34948 - DNA, 1414 bp, Homo sapiens
attacagggtgaggcactgcgcccagtccgcttgttttttgttttgtttttttttttgagacggagtatctctgtcacccaggctggagtgcagtggcacgatctcggttcactgcaacctccgcctcctaggttcaagcggagggtagggaccagtccatcctggcacccatctgcagctccagtgcgaatcccaaccccgacgctcgtcgccgggctccgtgaatgtttgtcacatgtctgaagaacgtatgaattacataaccttcttcccactccacccctcaaaaagcaagtggatataaagacttgaagattttataatctcttcttcattagtaaaatctgaccatccttaccgttaaaaataataatgatggttggccgggcgcggtggctcacgcctataatcacagctgtttggcaggccgaggcgggcggatcacgaggtcaggaattggagaccagcctgaccaacatggtgaaaccccgtctctactaaaagatacaaaaaattagccgtgcgtggtggcgggtgcctgtaatcccacgtacttgggaggctgaggtcggagaatcgcctgaacccgggaggcggaggttgcagtgagccaagaaggcgccattacactccagcctgggcgacagggcgagactccctcaaaaaataataataataacaataataataataatggtgaaaaaggttaagtgcgaacgcagggaggggacagctaagatccaaaggtcgaaatattcattacgcctaccgtcggcgaagagaaacagcagccccaaccggaggcaaaacgaaatcccaccgcagcctgcaaaggcgcctgggcgggactggagactggggccccgcgcagtaagactctgaaggcaggatgcagcccgaccacccgcagccgcgagaaaagcagccctggggagtcggggcgggacctggattggaaaagagacggtcactcatgcagaggcgggactcagagcccttcctcaagtctcattggtcaagttgaacgaacaagtgtcgctggcgagccggagagagagagagagcgagagcgagagagcgagcgagagagagcgagagagcgagagagcgagcgagagagagagagagagagagaggagccggcgcgagaactacgcatgcgtgtcggcgttttcccgccagcacactgttggtggatgggggcgattgaattcccacagtgagtccagcccaccgaagctcagaggattcctaaccttcctctttagagagcctcaggttagggaacgtccagtgcgcagaagctgccccgtgggaatcccattgtccatcgcctcctaatgtttcgtcctggccgtgccctatcccttcctgaggctgggttgttatgatgctgaattattcaagaagtct

SEQ ID NO: 34949 - DNA, 1630 bp, Homo sapiens
aactgtgcacccaactcaccgagaacccagcccaagacgggcaggacctcttgatgctctcggtggtggtgacggaagaggccaccatgctgaaggtgaccaccaggatgcccaggagcacttggaccagccccagcgtaagcagggcctgcagccagggtcggtggaggcggaggtgggtaaggcccctggtgctgggccggctggtcagcgagcggctggagtcactaggcgagggcatcatgcctgctgcccggttgcctgcgcctcgctcggccctccctggcacttgggagcatctcagaggcgcccaaggccccgtcctttctcctctccaccccactcgctctagagcccaccccctggctgggtcccctggggcatggccgagggacgccagctgtggggggggccaagcgaggggcgtcacggagggaccgcggagtgctccctccccaccacgggcactggacgggcaccgtgcccggggcgacgatgaggacgcgggggcaccggctcatcgcatctccctagggaagaggggcaccgagaagggccggtccaggagtgaggagggggcggcggcctggagcccagggaggggtggggagggtaaaagcgggaaggatggaaataagtctagagaagaggggaggggtcggcgtggggtgactctagaggcgcggtcggtgtgccctcagggcgtccagtaggatccggggccgcctggtggggagaggccgcggcgccgctgtctcctgtgtcgcctgtcccgctcccctccccaccacgctccgctccccgagctccggctgccgcaggtcggggactagagaagggggatgggaatggggatggtgcgggaaggaggggcatggcggcgagggccggcgcggtgcaccccgggagttgtagttcgggactgagaccctgtcggggttgggggatcccgcggcagggcgaggcagtcggataagcgctcctccagtccctgcctcgctctggaccctggctaggctgctagtgatcctttgggcctccacttgagccccatccagcttttcaggctccaggcccgcgtattccttggcgttcccggcagaggcggtggctcttccccgtcattaatggagaggggtggggagcagggctccctggcgtctccgggtttcgcgtttccgtggacttcccacctccttcctgcgccagccactcgggctccaccgccccgcccctcatatctcccagtttacactaaagccgggtccgaccttcccacctcactccacactctcctttctctttcataaggcctaattcccaatgaagattcaggaaacggggatgtcagttccagttccactttctttttatttaaataaccgaagcaacagccgtggcacagcagagggaagctgggttggggcgtgtgagaggtggcagcagtgtggcctgatggggggactaggtcacagtgaactccccacacgcctgtcaggttcagcagtcatggccataggattgggagcactacggaggagccatcagttagtgatgtctctccaagtcccagagaccttagggacgggagctaagtcagctccctcaagtagcagggccagggcatccc

SEQ ID NO: 34950 - DNA, 2100 bp, Homo sapiens
cagcctcccaagtagcaaggactacaggcatgtgccactacacctagccaatttttaaaacgtttcaagagatgggggtctcgctgttgcccaggatggtctccatcaaattcctgggctcaagcaatcctcccacctcagcctcccaagtgggattacaggcatgcacaccatgcttggcttttttttttaagttttaagtaccatgaaaaccccttaaattcttacaactcaccatcttctaatccagtgggacaaacaggtgtagtcctcctcattccttgctttcaaactgcacacctaacctaaactccaaccagccccaacctttattttcttcaagaaagccttcccatacagaacattggttaaggccttgccagcctccagatcttcccaggactgacttttagagctcaaaccatttgggttggtggccctggtggccctagaaggatgaggcatcccatggctgactagcctctctcagggaactaagatcacagtgcctcttccttcctgtgcatgcagaaaagtcccctgtacccaagctaacttgtctcactggcaaacccttcccttccttgaactcctatgctctccagtagctcacctcccgggtctcaaaagggttgtagacgtcaagcgtggcatactgccggctgggtcggtgctggatcacagctgggtcctgagggcagagacccgggtctcagctggcacccagtgccacctaggggaattcccagggaccattcccaaactgcctgtggctccaagtactgcaccttcggggccacgccgttgtcccaggactgggacaacatttacctcaaatccatcatccaacactgccagcaccagcccattaaggggcagggcccgccccccagagtgctcactggtctggagtcactgtcaccccacgtggcggctcttcccaggatcaaatgtcacaaatggggatacaagttagcccgaccctacagaaccgggaagaatcaacctgaccgcccaaaagaggccgactggcgcaagtcacctgaaaggggttgtcaagctcgctgggctcggcgaacgggtttccgccgtctctgctctgagccatgtttgcaactgcggcctccgcggccctctgccctccacgcccctgccgcagcagtggcggtagcggtagccctcagagtccacttcactcgcctcagttcgccccgcttctctgtgcacggattggttccaccgaccggaagggccacaaggatccccgcagcagccgtgggttgcgcctgcgtcttgtccaaaagctaagacgaaagtgcccccacgtgatacctctaacccagtgcccacaaccaactaccgcccctcttccatgtgacttccttccactaacgaactacacttcccagcaggcctcgcgtaggaatccggccttcctagtctcccgagatggacgacgggagccttctgaccggtcgtggcaatcccccctaggagccaggttgagcacgttttcaacctgagtttctggctctatactgggccgcggcctaatgactctaggagtcagatctttcccaactctcataattccacatccgagaagtgccacctcataacacttctctgttttaatctgaaagaaatgctgccccacccatcactaccctcccatatgataaggtggacaggggaaataaactggtagcctggctgtgcttcattttggagggtaaggaggactcccttcatacccaaactcagaaagtttgccaatagtttcatccctccaccccagcattcccaaacctccaactccagggatgggggtcaaatgaagcacgttattttatttcacaaagactgtacaaaattccttataaaacatggggtagatgccacctggttacctcactcggcccccatccaactccgtatgagggggcaggtgagggtggaaactgtgtggatggaatagtattatgtacaaggcaggggttgaagtgataggtacaagttctttcatatttacactatttcacatattcacaggtatatagagagccaggaggaaggagtgaactctggctcgttctcttg

SEQ ID NO: 34951 - DNA, 1356 bp, Homo sapiens
attctgtatcacttcttcccaacctccccaaattgaggagggtggtatttgatgcattcttggtgtaactggggccggtagcataccaagctgcaagcacaagattttcccagcatagttatcctaatcagcatagccacataaatgccatctcaccacatactaccatcaaacggcctcacagcactgtcccctcaaaacatcactagcctacctttctcaagtttgaaatcttttgctttttcctttcttactcagaaaatccagaactcctacaggcaaattcttcctgcatgttccaagtgacacggtgatgtattcctcccctccagctttgattggacccgagtccaactttgatattccactccttcacatctctggaaccactcccatccttactctatcatcccttctagtctggttccgcccaagcttcctacaggtcttcttggtacatctaacgcaggccgacctccttccccctcatctccctactccgtcgcttcgtaggtctcaactctcctcctctccaaatctcgcccccgtcccttgcccccaacccaagcctaaccccgcccgccccgcggtcgccatcttttcgcgcggccagccaacccgcgcgctcaccgttctggcggcgaggcccgtgcgcttgtcccacaggaagtccgtgatggcggcgacactgcggccggagtcccggcacccccgcggcgacgaaatgctgctccacccccccaacccgggaccctgggacctcccgccccgttcccgggctccgcttcagtcccgcccgccccggctccgtccccgcccctaagatctgcttggcgccgctcgcaccgcccccgcccggggcccgatcccagctcggtctccggctctggcctctccgctccgccgccgccgccgtgagcgagcacgtacgcacggaccgacgtcctgcgtcgcttcccagctaccccctgggctccgcccccaggaccgcgcgcgccaccacgtgctcacgtagttggcaggcatccgcctgtcagagcctcggaggtactgggggcggaagttcataggggcgaggagggtccacagggacaagctggaagccttccaggcccgctatgccccgcctcctgtcctttcccactccgtcttcaatcttttaccctttgcatggagacgtgtggcttagttaggtttggagtttaaaagaaaggattgtcattgtcaatacagtgtcgctgctctgcaagcctgactgtagtgaggcttgatggtgaagtctcattcttctgcatagcctgaaaataaccatttcttaaaacacttcacctacctatccccaggacaaaagtctgc

SEQ ID NO: 34952 - DNA, 1561 bp, Homo sapiens
caaacccgcgtccgattttcccgccactgcagggggctcctcctccctggttctcagtggatgaaaggccaacgctaggccacgccctctccctggctcaggctgcgctccccgccttctttgctaagccacgcccctctcggagttcctccaggatcccggcgtcccagccccgcccggtcttggcgcggccctcgccagggggcgccgcgcagcccgcccgccgcccgccagtctagcacacaccccctccgccccgcgcgccggcgattccgagcctacgacgcctccgctagagcccgcggggctgcgccgactcctgctctggaggggttgcgggtacctgatggccacagagggctctaggaggccgagcgtgtaagcggggtgggcgccatggaggcagagcagcggccggcggcgggggccagcgaaggggcgacccctggactggaggcggtgcctcccgttgctcccccgcctgcgaccgcggcctcaggtccgatccccaaatctgggcctgagcctaagaggaggcaccttgggacgctgctccagcctacggtcaacaagttctcccttcgggtgttcggcagccacaaagcagtggaaatcgagcaggagcgggtgaagtcagcgggggcctggatcatccacccctacagcgacttccggtattgggggcttggcggggagggcagggtacatcaatcccaccctcgcgggcagcgacaccgggacccggcccgccccaccctccacggtcacttcatttccagcccggggtcccttggtggggcgggagagtcacttgcaccagtctagcctgggaattcctgggcgggtatcccctgccggaggtcctccgtgcctggacaggctgggggcaccagaaggggcaagcagacatcaggggatctccagagacctggatttcctctttcaggaacccgggaccccatccggaccaaaggaactaccagagtttgggacccctgcctcctccagtcctgcttgctggagatctaggaaattatattctaagtatcggggccagtctgagggagaagccgagctccgccatctcccatccccacacccgctccttagcacctgcctagttcagcatgacagactaccaggaaaaatagggacgctgaagggggcggggggtccagacctcagctctggtcgctgtccctagtgctgaaggcgggggcggcggggcggggccgagactcagagtgactgaggcggcaaagcaggggcaggaccaccacccaggtgactcccagagaaggaacagagggtgggggtggggccatttcacagtctccgtcagggtgtacctctacatcaaggtcgctaggggaagacagcagccctgtccttgggggaaatgaaggacagctcttggatgaggcagggatgtgtgcaaagcacctaacctggggaactaaagaagcagagaggaagaggtgtgaatctggagcctcgaaatacagttgtagacccagacattatcttgaatccacatatatacacactccctctatgtctc

SEQ ID NO: 34953 - DNA, 1568 bp, Homo sapiens
aacatggagaagtctcaaaggagacaaaagatgaagaagcacctcaagaaataccaataggccctgtgtggctgcagggggatgggagtgcttaccgatggtggcaatgatgctggtactgcgagcagccacgggctcggagtcaatgtccagtaggcagaggtgttccaggaaggtgtctgccatagcagctggcagctgctgctgctggaagaaggcagtgcccagctcctgggtcagttgggccacactggcccgccgcagataccccgctggccctgtggtagaagggggctcagggactgcatgtcacctgcccttcctccccatgccttcgtctctcagcataccctctgttccttcccttcttatgagctgggcatcatgcatatattattttattatgtcacaaggatcctataaagcaggtactgttaaatgttctataattatccaattttatggataaagaaacagaggctgagaaacaggaaataaatggtccaatattatacagcttctaagtatggatcagctaggattcaaatctaggtctgactaactctagcccaagttcttgaccactcagttatactgaccccgcacaacccaggaccccccgacctgcagctactgatgaccctcaaccccaccaccccttgatgtctagtccccagcagcctcaccctatgcagacccagaatcacccagttcctgctccaaaggtctctgttttctcccttccaacccctggctactggctggcttccccaccccatcctctgagtctccccaggcttctcaaagctgctacagacacagaggtccctgtagcttgacccatcccagttcagaggagcccccgattccagccgcaccttccatgccactgcacacctctctgggtctccctctctgtgggtctgctccacactgttgggttgtcagaggcatgaggcccagctgggctggggatcagttctgcagactggttaaagtgtcaccactgtctcctgttccattggaagccctgtatgccaggggccagagtccaggaaccacgggagtgccccgtggcttacatgctgtggctctggcctgcctatagggcctggaaaagacccaggccagggtccataatttaacacacgggaggctctgaagaacgtacgttcctctccaaaacccacctagccagtggctgatgtggatcatttatgccctccaccctggctcctagttttcaccctcattttcctcctatgttccatggcttctgtctccccttcttacctcctggagccccaatcaggatggactttgctaagtctctttgggacttagagacccatgaccgaagctgcagggatgatatgttctcctggatcgacatgctttcagtgtgggcctggggctgcgggaccatggaatgagagggagaggatgacaaaactgctggtcttatctaagggagacagagaagagaaaaggggcacacccagtaggccaccctgtccccacagaatccctcccccagaacggcctgctctctgccctcatctcctggc

SEQ ID NO: 34954 - DNA, 2178 bp, Homo sapiens
ttagtagagaaggggttttgccatgttgaccaggctggtctcagattcctgaccgcaggtgatccgcccaaagtgctggaattacaagtgtgagactcatctttttttttttttttttttgagacggagtcttgctctgtctccccagctagagtgcagtggttcgctggatctcagctcactgcaacctctgccttacgagttcaagcgattctcccgcctcagccctcctgagtggctgggattacaggcgcgcgccaccacgcccgactaattttttttttttgtatttttagtagagacggggtttcaccacattggtcaggctggtctcgaactcctgacctcatgatccacccgcctcggcctcccaaagtgctgggattacaggcgtgagccaccgtgcccggcccaagactcatctttcttaagcccttaaagcactttgcacacattacctcatggtattaccaccctcattcaacagatgaggaaagctagtttcaagcaagttcactgaggatcagagacgttaaatgatttgcctaaagttagagaactaataagtgagaaagctagtcctgctgcgttttactaacgtgccaatcagctgcccaggaagataatgaaaacttgagtaagacaggcagccaaagccacagcggggacgttcccagcctggctcgcttccggcactgacgcctccagccgcgacctctagacttcagcccttccattggtcgtccgtcacagtgccacagtgcgccatgctcacacgacggccagcagccaatcagcgcggctcatcttcgcccagccaggacacgcaggatcgcgttatctgtccctcccgcgggcacattgggagttgtagtctaattatatatttccgcccttagtgtggggagagcgggaactactcgacccacagagccgatcgcggagcggattctgcttttaggagtacccgccaacaagcgggaccgagcaggaatccgtatctgggaacaggtgagagaggatgtgtgctgggccttggaggaagggggccgagaccgggccttacttctgtaacgatactgtgaggcatcggaaggccagcctgttgtgtccgttttgaaggtcggtgggctagactggctggccttctaggggtgtggagacttcccaactctgcccttgtgctttcctggaatccccaatatgcccggaccccggtttactcctttgctgcgagcccttctctcccgtccagagttgctccgagcctatctgctcagtcctagcgattcctgtggggcttgggacgcgcggttcaagcaccccggaccatatggatgcagcacccatgggttctcgctccaatgcttctttcctccttggggcgtaactcagaccctgggcacccctctccactgcccaggggagacctgggttctagatttggctctgcctctactatcttcctacctcctagagcctcagtttggcttgtgtaaaataggatgacttaagggtcctttcagcccctaatcctggggtactttactctgtaccgcctccttacccagccttgtgcacgccatcttgaaggcactgagttctagcctgtttattgtaagtggtgattagttgggtctcagtcacccagccatacttttttgttccctgcgtatccttcctgtaattgtccccaagcacattccacaagagggaggggcactctgggctaaggctggggtgggagttatctggggagctgccaccatgcctctgcctttggtgcttgcccctgcagggagtgcttagtgccccctccctatgccactcccaggatgcccctgtcccgctggttgagatctgtgggggtcttcctgctgccagccccctactgggcaccccgggagaggtggctgggttccctacggcggccctccctggtgcacgggtacccagtcctggcctggcacagtgcccgctgctggtgccaagcgtggacagaggaacctcggtgagtgtggttggggtgaggggccttggggaggggagcagctgatcaggtttctgacttgtttttcttctacttagagccctttgctcctccctcagaatgaacggagaccagaattcagatgtttatgcccaagaaaagcaggatttcgttcagcacttctccca

SEQ ID NO: 34955 - DNA, 2619 bp, Homo sapiens
ttcaaggaactccggtcccgaagccgggccccagccccgccagtcccgcctcgagaccccccagttggctgggctttggtcccgccccggcccccacccccgcctgtccctccccgaaggaagaagaaccgacctggactgcagcccatagcggaggggcagtccgaggagggccgggctgtcagcccagcggctggcgaggaggccccagccgcgaaggagccgggcgcgcaggccggcctggagggtaagaggtcgcaagaagcgggaggagggctgggcttcggccgctcacgcctcctaggcttccaacccggccccctgtcttccctccattctgtgtcacccatcctccccgccccttctaccagggagcgctccgggaaagggaaactgggtgggtcattgggttatgggactaactgtttgctccctcttcttcccgccccttcttgcctggctgcccatcccgctgccctccttccctctgcgcctggccccgccaatcccgcctgcagccggtcccctcctgctccctcggcccctggttttccggttctcggccgacgggcgccccctgttggagggtgggggcgcaggcgcagctgggtctctgctcctggctcctctggccgggtggcccggcgccgggctgcggctgctgggggcgccgagccccccagaggagcagctgctgcccgtccgcctgtccccggtgggagcctattcgcctccgactcggggagccttgccctgcctggccagccccgagctggcactgctgctgtccccgctctttcccagaagtagcaccttccccgccgcggctcccccaccccgccaggtacccgcccccccgctgccaccgcaacctcgtccgccgaaggcccctcgctggaccaggagcccatcgcctccgcccaggctacgtaagacggacccgggctagccccgcgggccacgcctcaggcgggccgccccgcccactctcgcccggccccgttttcgctttttttccggggttgcccagcttagtcccgcccttcagtttaagccgactccaagcaagtttgtcggccttggggagtctggccccgttcctagtgctggagggggaagttgttgcctttcctgctccgtgggccggccccctctccctccagacccacctgggcatagtggacgcgggcttacccagcctccatgccaagtctagggggtcccagcgagtctgttgttaggggctttgggtcacaccctctgtggaattccttggcctgtgcagctcgggcctgccccccgaccttgctagggaggggtggagggtgaagctcccgggagctcattggcactagaggttctggccacgccctctccgcgagtccagtcccacgcgggatgaagagggcaccctccgccaagaggctgctgcgggacccgggtttcccctttccggcgccttccagcctcccaatcctcgggtctcgcctccctccgtctcctccctttcccctgtctgtctttccattggtccatgccgcccacgtgctccccggggctccgcaggcaggactgggccccggggcggtgcgctgggctacacctccctccccgcgccccgtcctctcccgccctacaggccctagcagggcaggcgggaggtgagcgcggccatcccgctcccggagttccgggatcctggaggtgggggctgtgccctgagggagggcacagggaaccgggatggggctgggggacagcgagtgctgggaagtgtgcgagatttcactccggggctcgggtcgagctaccccgtgcttcaggcggtcctgcgcctcctctccccaagacccttcggggacacagcactgcagacccgccggagacaacttgtgcgggagcccggagtcctcggaataacacttggtaagtgttaccgcgcccttcttcccttacgccagtccgtagttcgtggtccttcgccggtgtccccggagcccagcggctgtggatggcagaagcccagagtgggactggtcagctgcaggagcagaagaaaggtagggcaccctgactcccgaccccgcgcttccgaataaactgcccttcgcccccggccctgctctcaggctgtccgaaggcagtctctccacgcccctcgggcaagcctgggtaggggcgcggcctcctagcgtcttccctttcccactcctcccaggtcttctgatagccgtcagcgtctccgttgataaaatcatctcgcatttcggggccgcccggaacttggtgcagaaggtgaaggtggctggggggaggctgttgggatgaggagagtaatggagctccgcggggggtgcgggaatggttggcgggaggtggctgggaggtgtctggagggatctctggagccatcggcatcgcgccacctccaggcccagttgggtgatagccggctgagcccggatgtggggcacctggtgctgaccaccctctgcccggccctccacgccctggtggcggacgggctgaagcctttccggaaggacctcatcaccgggcagcgcaggagcagcccctggagcgtggtggaggcgtcggtgaagccaggtgagccaggag

SEQ ID NO: 34956 - DNA, 1565 bp, Homo sapiens
aaccttcttgtgaatgagctgaatgctaaggtaaaagctgggtccacaataaaaacagctgttttcaattgtgggaaatacagaaagcaatacattttatctgatgcaccaactaaatgcactacaagagagtatgactcagagcctgttctggcgatttttaagctataaagtctgttttggccgggcgctgtggctcatgtctgtaatcccagcactttggaaggccgaggcaggcagatcacgaggtcaggagattgagaccatcttggctaacacggtgaaaccccgtctctactaaaaatacaaaaaattagccaggcgtggtggcgggcacctgtagtcccagctacttgggaggctgaggcaggagaatggcatgaacccgggaggcagagcttgcagtaagccaagatagcaccactgtactccagcctgggcgacagagtgagaccccgtctcaaaaaaacaaaacaaaacaaaacaaaacaaaaactctgtttttttctctaactaggctatttttcataatgcccaaatgacatcattcactgaaatggaattcttctggaaattcccctaactgcactaaccacaccacaaacaattttctttcatctctgtaggttcacacttcctttataggcatatcttttttctatcatgttttaaatctttttaaaattgatacataatagttgtacatatttattgggtacatgtgatattttgttacatgtatagaatgtataagaatcaggtcagagtattttgggtatccatcaccttgcgtagttatgatttctgtgtcaggaacatttcaagtcctctcttctagctatttttgaaaaacacaatattgtgctgtcacctatagtcaccccaccctgctactgaacatctgaacttattccttctaactgttgcataggtgtgtcttataaacagcactagagaaattgtttgagatcagtatattctgatcaaagcttatactcttcagttaaagagaaaactcagtattctttgcttcaatctatatgcttgtacagtgaatatactttttccaaaaaaaaaaggtttaagcctcacttattcttggaggacaaaatattcatcatcactgaatgcaccaaataatgtatataatttacatgtagtaaatcatttataataatgttccattgtctgcttgttctatgacttgtaagctataaatgctaaatgaaaatactccattctactgctctgccaattttagaatccaggtttgtaagttctgtcatgtgtagccagccatgagtcacatatgctgaaaaacagggatgaaataactgacattccaggtcagaaactcttgctcatccaagtcagaaactcttgcccatgagacctatttcatgtctacctaacatacatacataaattaaatagaatcactatcaggattgggagaaaccaggaaacctggccttacttaagtgtgtaattttactgtaatttcacttgcatcaagctgattttatagctgttagtctgtacagtacagaacagtatatgttaga

SEQ ID NO: 34957 - DNA, 1167 bp, Homo sapiens
ttttatattccacactgaagccccaaattctatcctcattatatggccctcataggatcaagagtaagccaaaacatgttactagcataatttcttaaataaattatgataaaataatggcaatactaatatagaaatcatcatgtgatgtaaacttccaccacccaagaagttcttcttgctatataatttaaggaatagacataaggtgtcaatttgtcccagtggcagaggacaaagtcttcagggtctttttaacacctcttttattcccaacatgaaaaaccactgcaaatctgacttcatctatagtctttctcacaggatttctccctatccccatctaactagttacgaaagaggtacaattttgaactatgtactcagtgattttgactcacaaagtgaggtcagagaggaaacttttctttcatcattaagtttcatcttgtcttcctattaatgaattttcataaaagttccaggttttgtcatcttatcatataggacctttaattctgatgtctctcaaaaagctttcattcatttccatacagctgtagctcagaattaattagtaatgtgtaattattgagcagccgtatgtgaggatctctggagtgatttacaatcattaaaatgaaatcaaagatatgagcagacaaccataaaaagcagtatacgaattagtgagtgaaagtaatgatatttaggcttaattctctgggactaaagaagatataccttctaacaatttggttcaataatgattttttttttccattagcaagatcaacaatgaaatgagaaacattcacattcaccatatatacaccattaaaacaaaccacaatacagactccagcagatatcctagctatgaaagtgaactcttcaatcagccaaatgcagtactgattagggaagttcctactacataatgaaagcaagaattgaggatgaacctgattaaactaattacggtagttttaatcttcctggcacatttatagcagaggctgcagagcccaatggcagggatttgctttgcccttccatttaagggagctcatgcttccgtaatagaagtcattttgagaaaagagtgacatcctgttttatctccaaggctttaggacagatcacagccccttagctgtctatttt

SEQ ID NO: 34958 - DNA, 2391 bp, Homo sapiens
ggggcacagccgactccgcctccactcgcttacttcccagccccctccgggagtctgcctgtcagggacaccccttcaccccgcctggagggacttcccggtaggctcaggatccccctccctgctctcccctcccccatcttcaccactgctctctcagagatccaggtccgggagatgacagtggctcccagaaagcccaggattcaatcgctgagagagtgcttaggcccgaatgccggcccaaatcgttctactcaccgtgtcggaggccgaggccgaggccgagagcgatgagagtgcagggaagtggggaagagggggtggccgccaggctcctccgcttccctgggtccacggcggatccctcccgcttgtcaggaggcggccagcgggtaagctgactggcggaaatgcgagagaggagaagggaaaggtggaaggctaaagggggcaaactgaggggaggcgggtcccgcaaccgagactgggatcgtctcccctccgcaaagcgaacccaaaatggcggcgggagcggcggcggcggcggcggcagcagcagagtggcggcggtggcggcggcagctcctccagagggagggagcgaagggcgcctagcgcccccctcaaccttccactccttcctccttgcgttctttcccaccgtcccccgctccgcccgactccgtccgcgtagcgcgcacgcccgcccgcacgcgtacgagtgtctacgggctcgtcgctggctgctcccaccaaccaccaccttcggccgccccgcgcgccagccagcccgtacgcgctcacccacaggaaccccctcgtccagtccctcactacccctcaggccctgtcaagccggcgccggcgcaggccctcacgcgtaccttcaacggcgcaagcccaagcctcctcctcctcctcctccacctcctcttctctcctccccccccttccccgcccccacggccaccaaccgccgccacggccgccgccgccgccgccagccccccctaccaccctccacccctcgcgcgtgcgcctcccacaatcccccccgcgggactgttccattcctgtcggctgcaggggcaggagaggaagggacgggccgagcgggtcggggcttgccgtttgactggaattgccagaatggcggaccgagccccacgacaacctacctccctgggctcctcgccgcagcgctgcggctcgcctccctctgctcctcctcctccgccggatcgcggcgagcggatcgaggactgcctagcgcccctctgcccaccggtggttggaggccgcggcggctgcgcgttgagtcgtttcctgccggttgacctgagcctacttcgcagtagcaggaccgctgctgtggagctggtcgcaggcggtgtgtgccggtcgcctagtcaggagaactagtcctcgactcacggtgagggaatggaccgacacgggtattgtaccgctgagggaaaggagcgggactccggacctccaggaggtagggagtgaggccagtaggaccggcgcgcctccggggggattcctcccgggcgttgagttgccaacctgggacccgaggaagatcggcgtggtggtgtgctttttgttgttgttaaccctcctcggatttctcgaatttcacaccactgtccatatgcgatgatgtttgtttgcccttgacgcacttactcatggatggtacttcttcagcctcgttagacagcctggtgatggaggatgaagaaaccatgtgcttttcattcagttctggacttagtctcccttttcttccttcagcaagttatttttgttagttccttatcaaaaagtgtacataaaaattaggcaactccaaacatgcctccagggttaatgtgtgaaataataagataatatatgtaaagtggaattagctcctaggcatagggaaagtgcagaatattgccgtgttgtcatttacagttctgttgatgtcgataacgtttgtgggtgtaattggtagtgttctgtccctccaaggagttaataaaacaaagcaaacataggcctgttaggtttctgtggctactgaatatttgtttctcaaaacacttgactgatatttgataattgaatgcagcagaaatacggacgattaaagtccacaaataattccaaagtttacttgatctagtagtttttacctttacctaaagggtaaagcagaataaattaccggaaggatctacttgggtttccctttccttcacatttgtggactcctggggatccaggaagtaattcagaaatgactgttcaaaagcccatgcaaggccgggcgcggtggctaacgcttgtaatcccagcgctttgggaggccaaggtgggcggatgacctgaggt

SEQ ID NO: 34959 - DNA, 625 bp, Homo sapiens
cctctttctccaggctttccattccttctgcttcttcttcttcctcttcttccggctcagagttctcctcctgagaattctcttcttcagactcaccctcctgactcatgcgccttttcagatgccagccaagtcagtttctccattgtttcctgtaaaaccctccaaagagtacttacggctcctagtggctcatgaattgcagaacagcacagagctgtatcaggataatctgaagttaaacaatggggaacccactacagctgtcagagcggaattccctgagttatgaaatcccagtgatagctgacattgggcctgacagcaggaaagtggaaaagatgccttttgaaaacttcttctttaccctgaaattagttttcctttgccttagcccatatttatgtgcctcttcctttttttttttttttttttttttttttttgtcttgcaacagcgtctcactccatcacccaagctggagtgcagcggcacaatcttggctcactgcaaactccacctcctgggttcgagggattttcatgcctcagccccctgaatggctgaaattataggagcatgctaccacgccgggctaatttttgtatttttagtagagtcaggg

SEQ ID NO: 34960 - DNA, 1893 bp, Homo sapiens
cacagccgactccgcctccactcgcttacttcccagccccctccgggagtctgcctgtcagggacaccccttcaccccgcctggagggacttcccggtaggctcaggatccccctccctgctctcccctcccccatcttcaccactgctctcccagaggtccaggtccgggagatgacagtggctcccagaaagcccaggattcaatcgctgagagagtgcttaggcccgaatgccggcccaaatcgttctactcaccgtgtcggaggccgagagcgatgagagtacagggaagtgaggaagagggggtggccgccaggctcctccgcttccctgggtccaccgcggatccctcccgcttgtcaggaggcggccagcgggtaagccgactggcggaaatgcgagagaggagaagggaaaggtggagggctaaaggggcaaactgagaggaggcggatcccgcaaccgacactgggatcgtttcccctcgcaaagcgaacccaaaatggcggcggcagcggcggcagcagagtggccgcggcagctcctccagagggagggagctaagggcgcctagcgacacccccaacctcccactcctccctcctcgcgttcttccccacggtcccccgcttcgcccgactccggccatgtagcgcgcacgtcagcccgcacgcgtacgagtgtctacgggctcgtcgctggctgctcccaccaaccaccaccttcggccgtcctgcgagccagccatcccgtacgcgctcacccacgggaacctcctcgcccagttctccactccccctcagaccctgtcaagccggctccagcgcaggccctcacgcgtaccttcagcggcgcgagcccaagccttctccacctcctcttctctcctccccctccctccccgcccgcacggccaccaaccgccgccaaagcagccgccgccagcacccccaccctacactcctcgcgcgtgcgcctcccacagtccccaccgcgggactgttccattcctggcggctgcaggggcaggagaggaagggaccggcaaagcgagtctggcttgccgtttgactggaattgccagggtggccggccgagtcccatgacaacctacctccctgggttcgtcgccgcggcgctgcggctcgcctcctcctccatgggaccgcggcgaggggatcgagggcggcctagcgcccctctgccggccggtggttggaggccgcggcggctgcgcgttgagtcgtttcctgccggatgacccgacccttttttgcagtctcaggacgggcgctttggagccggccccaggcagcgtgtgtcggtcgcctagtctggagaactagtcctcgactcacggtgagggaatggaccgacacgggtattgtaccgctgagggaaaggagcgggactccggacctccaggaggtagggagtgaggccggtagaccggcgcgcctccgggggggattcctcccgggcgttgagttgccaacctgggacccgaggaagttcggcgtggtggtgtgctttttgttgttgttaaccctcctcggatttctcgaatttcacaccactgtccatatgcgatgatgtttgtttgcccttgacgcacttactcatggatggtacttcagcctcgttagacagcctggtgatggaggatgaagaaaccatgtgcttctcattcagttctggactcagtttcccttgtcttcagcaagttatttttgttagttccttatcaaaaagtgtacataaaaattaggcaactccaaacatgcctccagggttggtgtgtgaaataataagatagggctgggcgcggtggctcacgcctgtaatcccagcactttgggaggccgaggcaggtggatgacaaggtgaagag

SEQ ID NO: 34961 - DNA, 624 bp, Homo sapiens
cagtaaagacaggtgtaagaaattataaaagtattaatttagggaactaacaaatgtccatgaaatcttcacaatttatgttcttctgccatggcttcagccggtccctctgtttggggtccctgacttcctgcaacactctggactctccctttttattagtacttggtaggggtggttcagagtcctgatcattaaactcctctctctcctctgactcagcctcatcatctatctgaaaagcctccagtgctgtacacaccaatgaccaaactgaccaaacaggcaaaggaatttcctttccctttctttgtgctcttttaaggtcctttccaattctttcccaatctttcaattccaaagttctctgttccgggaaccaagggcaaaattgttccacagcataaaacaaatccataagattttttgtatcaacttttacaccactacgcttcaagagctgccatagcaagctcaaatacatggcgtacttactttcagtttgtcccatttgtgtccctagctttctccaagtgccccgctcacctgcggagcttaaaactttttcgtctttgggagtcctttgtctgtcggtcctccatttcacacgcttgagcatgcctt

SEQ ID NO: 34962 - DNA, 1191 bp, Homo sapiens
ctaggactacaaggcacttgccaccaccctcaacgactttttttctttttttttttttgtagagacggggtctcgatttgttacccaggctggtctcaaactcctggcctcaagcgatcctcccgccccagcctcccaaagtgctaggattagaggcgtgagccaccgcgcccgacctacagttagttttaaacctcccttctgtttctccaagacattaggggagattctccatcccctcaatcaactgatgtaattaaaactcagtaactaaagctcaataaaacatgaagatttcgttgattcctgtgagagatggtggtgaccttataagaaatagaatgggagtagccagggcagctcttttatttcacagataattactgagatcaaaaaaaggggaaaaaaagaaaaagaaagaaagaaaaagaaggaaagaaagacagctacttcagctccaggcacctcaaacacagcagtagctcgacagaatccacttttttgggaacccaagtcggaccagcagggtgaatgaatgccaatgtggaggcagccccggcacggccctctcctaggaaaacattttcaaaaggggtcctaaccgcgcttccacctcggtgcccagggctggctccagtccccattcccaactagacactggacttcacgcccttaacttccgccacgcacccagcgcccaccctcagacccgaccttctcaacctggacatcgttcgtccaggtgtcccagctcccacctgcctcttcccaccccaccacacacaaacctgtaccctcaccagccggcctgattccacggaaacggctttggcaccaccggaagtcagccaacaacagcgaattgcgtgcgcgtccccgagcctcggagcgccgcgccgcagtgcatcaaggagcatgcgcctaacactatgcgccatcccattttagggcagagtgaagccacaacgttagtgcgtcagttattggcaaaaaaatttaaaggcactacttagctttctctgcccatggagttatcctactcaaaactgaggttaagattcagtggtttagattaacagctaatttgggggccaggcgcggtggctcacgcctgtaatcccggcaccttgggagacggaggcgggcggattacctgaggtcgggagttcgagatcaccctggctaacatgg

SEQ ID NO: 34963 - DNA, 1478 bp, Homo sapiens
tatacaaccataaaaaaatacaacaaagagagttgtcccattaatgttcagtaagagacaaagactaaagatggcttatgacataaagtctgaaaaaaaaagaaatattcagttgcttaccaactgctgatacccttgtttctaaataaatctgaattagactccaaaaaagcctcaaaatataaatagttagaaactactgatattcattaagatatttttatggggtatatttggaaacataagtgatgatctggcttaccaatggtgggatcatgatcttctgggaatcggtggctgatgaactgcatggtcatggcttcaaaagaagaaataaaagtcaaatcctcacaaaggtgacccacagagagaattttaagtattaacattgcaagatagcaagtatcccatctggtcatttaagtacttttcatccatgcttcctgtcaaatggaaaatgttacctaccactcttccctacaccaccagcacccagcatcactagtttgtactcccgtgagagcccagcggggctgctacagcagctaccaactgggcgagttccagaatccattgtcctcttggggccttcctcggttgccccgaggaaaagccacctagaaaaggaggaggaaatgcttaatccaggatggagacaccacggcgacagccctcaagccagtgccttacctttccatacatattctggcctgtccctcttactctggcctgtccctcttgctcaccactgcaccctttcgggtggccctaagaaacccccccatcttcaccctccctcctagacagttcagtcacatgacacatcacaggttttactttttccaaagagaaaaataaaaagatacaaataaatttacgtctcggcacagtagggacaaggagaaagttttgggaagaaagggatgcggccccttaggccgcaggggttctctcacgtctgcggtacccagaggttccgccccctccccattctcctccgaaccccctccccacccccagctgctgctccgccgccagactccccacccctctacctcacaagccgacgccctgctgctcctactggtcagtggggactggaacaccacagccggtcgggtcacgcacttcgtcttccttcactcgcggaggctccggcactgacctgtgacccctcccgcaaccgagtaagatggcgccaccggcgcccgagtcgcggaaggaggggcggggccactcagtgacgcccacagcctgccccgccctcttcccgcccctcccaggtccctaaaacccagttccgggacccaccgctgaaggtcctctggtcacctacccaacctagggtgtatgcactcacagacaagggtatttaatcacgagtagaaagtaaattatttacacaaaagggaagggagtacgtgataagagacatgcagggacacttaaattaacaacttaccgagggttgtttgctg

SEQ ID NO: 34964 - DNA, 2056 bp, Homo sapiens
gcctcccgggttcaagcagttctgcctcagcctcctgagtagctgattacaggcgcgtgccaccatgcccgactaatttttgtattttcagtagagacggggtttcaccatgttggtcaggctggtctcaaactcctgaccttgtgatccacccgcctcggcctcccaaagtgctgggattacaggcgtaagccaccgcgcccggcaaaacaactattaaattcgcaattagtggagacccttcaacttcaaataccttctcagaagcattctgagttggtttcagcttcccttttgccatgagcatggcattaatcttggcagccacagcagcagcagcatccaaggctcctgaaggagcagctgtggtgcccccaggacttcccccactgctggtgacctccccacctggggccgctggcgggaggaagagaagtggggctggagctggttggtcccatttgctgcggcgcctacatggagaaaaaggaaaacattaggccccaaagctttcgtgtatgttattctttccttactacgccttagcaccccattttccctctattatattccatttacacctccgaatcaccttccaaatctaaaactcccctctccttaaacaattattgcttatttaacaaacccccactttcaacccttccccaaaatctttcgtttctactgtcacctatatcgaaagactccactctatcctacacgctctagtttacgccttccccttggctcgcccttccaaaagtccccgtttgcctcctccctcggatccccgccggccctttaagggccccaggcctgctcaagatccttctccccaaacgtccagccctttacttcccacttaaggacccttccaccctatacgcagcttctcagggtccctccgcctctcctgcgccccagtgctcgctccgatgccctcgcccctgaagccgtacccgccagctccaggatgtgtcgcgctccccgcggacatggcgaccgcttctactcaaccacccgccaactatccgactaccacctctcgtcacttccgcccccaacgttcttacgcacagcctcttccggtcgtggggccgagcggttccggtgaaaatgtcgattccgattggactctcgatgatttaaaggcatctggcgtttctgaggcaggtagggtgtgatcttccgggttgcgccttaaccttaagaaagatggctgctgtgcctactataaatgcggaatcggggctagctgaatccatctttatcgtgggcatgttgttagactagaagacaatatgcatgagtcaggagattaaacaggtttctcctcaaattccgctacgtttgtgttgagtcctagtttctgtctggggagacagccttcccgcggcttttgcccgtttcacgtttctgttacttaggaaaaggaaaaggattcgttgcaaagatcatttggagaatttctctgtttgtttgcttcatttctgtgcaccaagcagggaatataaaaataaaaagatgaataagccgcaggccctgccattctggtactctcaatgtggcaaggcaggtacgcaggcaaatatgtatgatagagttgtatattaagcaaaggtcgaagaagataagctgctcatcttgctggagcgtttaagaatgggacgctaaaaagccggttgagtactggagaggcgatcaagcataggttatggagcaccctgttctggcatctgtgtacttaacggttgagctggctggagtgggaggccagaagatgaaaggccttgaatgctatgctgaggagtttgagttgattctgtaggctaaaggtttcttttttttttttttttttttttttgagacagtttcgctccgtcacccaggctgaagtgcaatgacgcgatctcggctaaccactctccgcctcccgggttcaaacgattctcctgccttagcctcccaagtagctgggatcacaggtgcccgccaccacgcccagctaattttttgttgttgttgttttgtatttttagtagagacacagtttagc

SEQ ID NO: 34965 - DNA, 1981 bp, Homo sapiens
atgctaggtgaagggaccccaagacgagcagataagagaatgagagcgctgggggaggaggaggaagggcagggaacacaatgcatagtgccaggtgtgtcagcctaagggtttcaggttgggagaaggaagagctaggaggctggcggggcagatagggatggaggccctatgttccaggcagaagggctcaggatggaggaaaggagcccagctacacaaagacctctgctcccttcacctagaggtgatggtttgggggaagtaagccgtccctcggccgtcccgaccccagccacccgcccacccagaggggagaactgaatcacagctggaaagtccatttgcgaggagaggaggagctgacttttgtcttggaggggtggtggtggtggtgggaggaagccgggaaaccaccccctcccgtcccctccgccggatggcggggacaaagggggaacgaccaagccagcgattggggagtgatggggggtcgccacgccaagcccaagccggtggggcccggggtgagaggaggtgccggagcttccaccgcccccacccgcgagacacacacctccctcttcccgctccgtcccttaccggagcaactttctttcaagcggcctaaagcactcggtcccgccggcttggaggcgaccaagcccaggtccgctccgctccctcccgggatcccagcaccgtcgcgtctgccgctccccccacccctacccactcgctcgcagtccccacccaccccgtcccgccgctcgccgatccaccgctccgcccgattttggcgcccagaaagcaggcggggagacaggagatgcaccgcgggtgccggggttcggggagcacccgaggaccgcggcgaaaggagaggggtttccgagcccaccttgctcgccagctctctgctccggtcgatccgcgcccgcgtgagggattcgatccgagacataatcggacggggggaccagggaggacgcggcgcggaccccggcgtcctgtattgttgggggaaggcggggggaggggttcggcccgcacgcgttggtctcggggacaggaagtctgactcccctcgcccggcacccagcaccagttcctcaaacccgagtctcctcccccgcccaagctcaggaagggggtaggcggagcggagggagggcggggtgcccgcgcgcaggacgggacgccagggtttgtgtgggggcagctcggagaggtacgagggtcctaggacaggtttgagaggcccctctgcctatttcccctccagcgcctgggggcgccctctagccccagagacccgcctcttagctcttcttttcctaaaacccagccccgcagccctcgccggacccaggttggccctttcccctctgccctccccttcttcccttctcccctcgccctccctttttccctcccctactgcgttacctcagtctttaaagacccgcaggcaggagaattccatccgcccccagctcttagaaaacccaggaccagttccttcctggccttcggggtcccatcaaagcaggcctgagcagactgaccccttttacgattgggggcaggggtggccagagggagaggaaatcaaaggagaactaaacgctggatcttcagtacacgggaagggtaggattcactcccagaggtcgaagaacagagaggagagaattctcccacatgccccacccttctggggccttcctgaccccactctgccctcctcctagctccgcctctgccagctactttgggggactaggttgggattctccacttttaccgaaggccttccatgtgtctaactgcagttctctctgttgcaagttaagccggaactgaaagaccagaaaccagcctgccctagtcaaagaaagttagggcccaaccagcctctccccaagaagcagggtaaggtggggcattcatctctctggacccttttccccagcctgag

SEQ ID NO: 34966 - DNA, 3431 bp, Homo sapiens
aagacaggatgacagacgtggggaggaaaggctgagcgaggcaatgtcctgactcactctggcgcttccctctttcccatctgggctccagagtctctgccctcattccccttcaccaggttgctcaaccctccatcagactgttaggtcaagggtggacaaacagaccaaccgggatctggatggcccctgggcagtactgacttcccctaccattcccatggcaagaaaagggagtgattccactagcagactcccctaccctgcagtgagacagcctgtaggaaggtgagactcagaccccaaggtttctgcttttgctttgttccttcgagatctccattcccccatgggagagaaacctctctgtcccacctgccctcccctcccatcagctttcagattctccagctgctcctcttctgagactcacccagtctcatgcctccattagcctcaactcccgacccatggcctgtggtgagaggtgctaacaacatgacctgctttcatcttgaccttcccagcccacccagagaaaagggaatcttggctaaaaaaaggctggaagaggggagaaccctggcactgcgggtggggctgggaggagcccaggcaaccttactggtgagaatctcatggctcttcaaggtgaatatgatgatgatttccctggggtttctttcaatactcagaagccgccccgagttggaaagcacatgcatacttggggaggccaggggaggaaaaggggggcggctcactctgacagtaaatgaagaaagtggaaacaaattcaaggagcaggcagagctcccggtttcaccagagcccaacggttggtaataaggatgagaacaatgtgccttcacttcctgggatcagaacagcacatggccgcacatgtacgggtatgcatgtgcttccataatcatatactttcccagcttctactctgcctgtggtctaatttcaactccttcagctgctgtacccacccataaaattatgagtgtaaaagcactttgcaaaccctgatactctatgaagaagtaaaaagtagtgctgtaattattatcattattatgtccaatggttgaggtttccgctgcccacctgtcagctatgtgaggcctaaagagagggagggctaggccattcctcagcttctgaggttcctggcccttttccccttccatctgtccacagctgactgctaagctggatgcgtaggggaaagcagagaaaaggtgatttactgggacacagagacacaggctggaagagatagcatgtgtttccttaaaatttgaagcatttggctgggcacagtggctcacacctgtaatccctgcactttgggaggtaaaggcaagaggatttcctgggcccaagagttagaggctgcagtgagctatgattgtgccattgtactccagcctgggagacagaaaccccctctcttaaaaaaataaaaaaataaaaaatggaaccattgctctgagtttctaatagggggagtggtgggaggtggcgatggtgggatgggagaaagggaactggagagggcagtgggtcccaagcctcctgcttccccagctgactcctaccttggcctttccggtcatgcccgagaggaagctgaaggtctgtcgcagggaggagcctacccgggtacctgaatgtccttccagctggctgcagctgcatagagaaaaagaagacatgaggagatggaggtaatgctggaaatgaagaaaaagataacttcctgagagatggtggatgaaggtgccatgaccagcagagccagaatgggaaggaagaaagaggaaggattgggagagaaagataagcccccatcctgacctcctaggacttcctggatgtgggcatttcagtttcccaggcccctctatttaggaagaaaactccaggctccacccagataaatacagactcctccttcctacctaatccaggctcaggatgggaggcccagcctcctcatgctgctccccaacggaagtggtatggggcggaggctctcccggggggcattttctcctctcagaacaagagccctgtgtacgaccctctctgctgtttggagaaggcctctgggcctaaagccaataaggactgaatttcctgggatttcatcagccccatcccatgagctaatcccaaacccagagccaggaggatgtgtcagctagagattttcaggaccacaaagcagagcctgatatcttaaagggaccattacttgcttacacatccacactgtcttagagggctgacccactctaatcaggcttcagccataggagccaaataagcaggtgctgattttgcatgcttatttacatagttattcaaatctcccagcctccacctccagacctgaactctgccttcaggccctgccctctgctgggagctccacagcccttgcccagctctccttagggccaatccccattggtctattatctgagccatcctaagctgatccatggtccttggtcattgtccctcactaagactgttcaacagtctatctgcccttttaccctataccactgacaacagcaagcaactcccatgctctattattcaatggacaccctgtgccctggatactccttttctcctaatttctccccccatctcatgcagctaccgggaacctggtgagcccacccaaaccaaagaagagagggtgaattctatgcagctcagggaaggatatttggaggtcttagatcagaaatgttaaggggaggaatgattcaggaagcagggaacccactggggctacaaaaccatagcctagaccctattgctgttcccctatagaggcttttgaaggattctgagtcccccacactcaccgtttcctgaggtcaatggcagaggactgggatacattccctgccaacacaaaaggagatgagaagtgtctagctaaagccagacaaaggcgcccagggcttcctcccccacccgcttcacctagatcaggttcccaagctgcaggtgcatgtgacgctattcctgagggcgggcagtgggcagcagggagagagggcggggtctaagcagggcagagctgaagaatttaggagccatgggaacagagcaccgggttatgtggagacagtggctgggagactgatgtttcagaggtttcacccagagctcccaatactccatcttgaggacaaggtatattgcaggtaactgtcttgcatctctggtgacaggggaggctggagaacctcactatgtcctatgtccgctttcattggtaggagtttcagaattccaaagtccagaattcagattgcttatttgaataaagccattctgaggccaggcatggtggctcacgcctgtaatcccagcactttgggaggccaaggcag

SEQ ID NO: 34967 - DNA, 3367 bp, Homo sapiens
ctgggcaacagagggagaccctgtctcaaaatacataagtaaataaataaataaataagttcagctccaaattggggaaatgtggggtccacagaaagaagtggttataattactaggggaacagggcccttttactgagagaggaacacatacaccctcatcaacacagaggcaccgacacagaaaggaagaaacagagtcttggagaaagagacagaggcagggtacccggagtcagggacagagcacacagacccaggggagcagacagaggtgcatagacgatagattcccattcgctcagatggagccagagcaatgcccgggcacagagagacccagcagctggcagaacagaggagacgtaggatagaatggtggctagacaggcgaggggcaggagaggaggagcaaggcaggggccttcatggggatctgtctgtccgtaccagccgggaggcgtagccaccctggtgctgcagtcccagaaaggtgtccagtccttctcggatctgcaggaagagggcctccttggggcctgggcatcccgatgcttgcagtctcctcctgaaacacacatcgccaccactaccgtctgtatccagtggccagtgacgggcaccagggaggaacactgcctcgcctcagcccagccctgttgcttgcccccagcccagcccttcctgttggcataagcacagcccagacccaaactggtcctactttggggctctgctttgccagggctgcagagttggctgtgggcaagagtggcccctgctggtcaaagggcagtactgcctccagaagaaagccagggttcaggggaaggcgaacagcaagagcaagctgaattctccctccttgcctggttgctgatgccaacctttgcccctgctcagccaaatagtgcactcaggactcccttccctctctaaccaaggggcagaattaatgcctgactgtgaaaggtgggtgacacttgaaagaccctgagatacagttggtgccacataaggggggcccaggcatttgggcatctctgctttcagccagctacccttaggaaggtgccatgagccctgcaggcattgcttctcatctgagttcccacccaagccagttcagggacaaggcccagggtcctctcccctcactgaaaccagccagccctgcccgggagctagggaaggttggttcactcaccagagctaaaggaacttgttcaaggggaccattgtcaaagcagagagacagtgcccttccatggccagcagcccctacaatgttcactcacactgaactcttcatgctgacccccggaccttctctttctgacttcctctgactttggggaagtggtcaggggttttccaagggagggggaagagatgatctctctgctccagtccaccaagcctatgcagaagtctgagcaagaacaactgatctcatgtggcaatgcgggaccatgagttaatccaagacatcctgggttgtcctcagcctgcaaccaaaagcccggcaaaggcctggcaatggggcaggccaaatgtcccaaccgtgagaccacctctctcaagaaatctctgaaagttctttgggcctcagtttccttatctgtaaaatgaggagattgtgccatatgctctctgagttcctttgtggttctattacaccattatgtggttctatgaaacccaccgtgggaggcagaagcaagaagatccagtgtcctgatactccccctgactccacacctccctcccactcccaccctcagtcttccctgagagaaggaggtaagagccactgtggagaggcatattttggaaggcagcatccatcctcccccaaaggcccacaaatgggattgagctctggttctccagggaaaggactgagggcccaggtctccttgattcttgttgttcttcggatggttgtctcttgagggagatgactagagagttatctagttccttcccactttcccattttctccaaggtctaggcctggaaggaaggaggtacaggaggtcccctgggggcttacgtattcagtgggccctcgagctccctgccaggcccccaactatgtcttctgaagacgtctttgttttcggccgtgggcccggaaagcccctgacctttggaggggtacagcatgcgagccattcccctcctttatttccccatctcttcttcctccagttgttctctggattcaactgcagaaaggcagaggccagtgtggcctcacgggcaccttgtctccacctgctcagaacacgtctgggacggctctgttcgtgggagacacacacagaccagtctgcgtcagcaggaaataagagtgagcagggttctagaactctgaaaccttgggactagaagtgtgtcacagtcagctggacttaggagtgcctagccaccactcactttactgagacacataactggataatgtgtcacattgtgacacattgtgacctcagggtcacattgtgacacattgtgacctcagggtcacattgtgaattagctgcagactcaaggctagaacttaggttttctggatcccagttcagtgtcctttctagtacataaagagatcctcattgtctccttcttattccatttactgaggacttatatagcagaaagccaagcaaagagaaatagatattgttcctatcctcaaggaatcagagtctagtgagtgggtgagtgtgtgtgtgtgtgtgtgaacaagcaaaagaacaaatcacagatgactccataactggctcacatatgccaaatgccacaagagaagtttcaacaaaaggctttaggctgttaaaggagtgagggcacgtgaccagttgggagactcaaaaaaggccaggtgcggtggctcagccagcactttgggaggctgaggtgggtggattgcttgagcccagctgttctagaccagcccgggcaacatagcgagacactgtctccacaaaaaaacaaaatgttagccgggtgtggtggcacgtgcttatagtcccagctacttgggaggctgaggtgggaggatcacttgagcccaggagttcaaggctgcagtgagctatgatcatgccactgcactccagcctgggtgacagagtaagacactgtttgcttttgttttgttttgttttgttttttgagacagagtttcgctcctgttgcccaagctggagtgcaatggtgcgatctcagctcactgcaacctctgcctcctgggttcaagcgattctcctgcctcagcctcccgagtagctgggattacaggcacaccccaccatgcctggataatttgtatttttagaagaaatggggtttcaccat

SEQ ID NO: 34968 - DNA, 1303 bp, Homo sapiens
aggtctcgtccctccacggcgtatctgttcagcagtgatttggaagccaaaagcctggctccttcctctgcttgagtgacagcaaatagagccaacaccacaaatgacagcagcctcatctttagagaaaaaagcaaagtgagttatcaaaccaagtacgtcaaattcaccaaaatcctcttgacagcgctcccgtagaaagctccttcgatgctaccagaacagcagccccttccacagagtagtccataagccaccagagcagacccgttctccagactctcctaccatcttcaccctgcagccctcgaaaaaccggtacaagcaccaatatatctactgccctcttcctgtcagaagccccgggatgcccaccggctggtggagtcttctgaggggacaccatgtggccagagcagggcttccttggggtgcctgatttcggccgatctcggacctgcaggagcctgtagctttccctcacacaggagtgcccacagccttcccgctgctcccctcctccttggccacagctctattgggatcccaccgcggactcgcggggtcctcctcacatccctgtaccccactctccagtccagcccctgagatcccattcgtcctcgcctgtcacatccctttcttggtcccacgggcgggggggcgggggtcaatcacctctgccccccgcctcccgcctcttgcaaggttacacgtcctccagccaccgcgtcctctgcccttcccgccctcccctagctaacccccagccacggggtgatgcgcggacacgaggctctcgcctctcccgttcggacgccctaagcctccggacttaccgttggcatcccaaacgcctttccggagccacaaagacaggaagagagcgtcagcatccgaaagaccggaaataagcactggccggaaaccgtggtgttccgcccaatgccttgtgggagttgtagttcttggagaagccccacctttccctttgtagtgcccgcctgcctgagaggctgtgagcgctcctaagaggtttgtgcgttctccaggcttcttattcggccctctttggggggcttttcaagctgatttttcactactgtatgtgacccgcacctcattaggtgctttgggaaactagcaaacctagaaatttggatcatctatctaaaatgtcaactagtactgtcgaacagagaattagagaaaagctattccaaccagtattttttctattctcagacaagacacatagacattccctacatccagcaggtcaccgagccctgagctttattta

SEQ ID NO: 34969 - DNA, 2730 bp, Homo sapiens
cctatcttaagccccgcctatgtgaaattatggagcggccacagggggtggcgaacacaggcaacagtccgtcattcaacaagattttattgagcacctactgcacaccgtgtaaatctcagaagagctgagaaccaaatgtaaccacgtcgatttgaaagagtgggaaggatctgggcacagggaaatcctcccccgacagccccgtcgctcagagaacactgggcgttctctgaggcacagagtaggcgccggcgctctccgcctgcccccggcccgttctctcagttagcacctagcccgggcccccactccggcacactcccctcaaacccagggtccttcccccttcccggtgcaaggtgtcccctcctcactctccaccacgcccccaggccacaaggcaaaacccgcccctcaacacgcgccacgctcccccagatctcccctcgcagggcgccccctacccgcctctccttgccttcagctcctcggagtcccagccggcccccgccctcctctccggggccctccgggacgccggaccgtcagagaggccccccatctcttcgcagacccctcctccgcgctccccccgccccccgcctgctgtactacctccttgaccgaggctcgatcgcagatcacaatttcctccttgtccttgggggtcttgacggtgacccgaatggggggcctcgtctcggccccgctcggctccgccatgccgccgccgccacccggccgcccgccagcccgcccggctcctcctcctccccgcccgcccggccggcccggctcggcttctgcgcctccaacactcccctctctccacctctcccctcccctcccctcccctcctctctcctcccctcccctccccgaggcttcaccgccccctccggaccagccgcagccacagcgccccgggcggaccgggggggccactgcagcggggtccgcccagggccaagccccaggtccggagcccggccagggtctcgccaggcgggggcccctggggggcctctgggagggggaaggggcgtgcccttcattgcgggggcgagggcggactgccccgggagaccgcgacccaacgctgcccgcccgagccgtgccgcggtcccctccagcccaaagcctccccgccccctccgcggctaactcggctccgggacaaaggactttctgtgtcgccgctttatctccgttccctgtgataacttggtctttcttggaagcccaagtcccttccaggccaggggactttcccgacttggaggttgggttttcccaccaagcacgtccacctaggttctcagctctgggactgaccctatagccccgagggtcgcggcctgaatggtctattaagaacggttccagggagctgggttttggctgcgtggcctttcagagccttggtttcctcaagataataataatagtacctctcgcctcatcgcacagaattgtgcataacggagaaaactgttttgaaagtaaccaaaggcgtgcctgacaaatatgaggatgtagtataattattgaatcgtggactgccaagcggacacgttgattcctttctccccgaaggggttaaatgtccttccagcgctgctgctgtcctttcactcccgttcttttccgccccccaacaaccgcgtggtcggcttggaaaggcgaactataattcccagggtgcctcgcgaggccacaaagaactacgattcccagagccccccgcggtggggcggggttgagtcggaaccacaatagccaggcgaagaaactacaactcccagggcgtcccggagcaggccaacgggactacgggaagcagcgggcagcggcccgcgggaggcacctcggagatctgggtgcaaaagcccagggttaggaaccgtaggcatgctgcgccccaaggctttgacccaggtgctaagccaagccaacactggaggcgtccagagcaccctgtgagtgcagaccacggacccgagcggcgagcgctgcagtggggcggcgcgcggctccctgagggaggggtggggaaggatcaccaggaagggaggaagcggcagagggggcagcggctggggataccggccgggaggtcccctgtcgaaaagggaagccggtgtgctgggtgcttagggcatgttccgggacacgctcaggccagagccttgctggatgtgcccttggtgggacttgggatggaaacccagacgttttactccccgctctgagcacatcgctatccctccccgcccctcaccaggctgctgaataacgagggatcactgctggcctactctggttacggggacactgacgcccgggtcaccgctgccatagccagtaacatctgggccgcctacgaccggaacgggaaccaagcgtttaatgaagacaatctcaaattcatcctcatggactgcatggtatggagaggggagccagacttcccctgtcccccaaaggggatcccaagggggcgacctggaccccatcctggatggttggaggggcagggacaggatctccggaagattactaagagttggtctgcagcagcatttgtaataggcaggaccctattcatcaagtggtggtgaggaaggatccctggacctgagaggtctgacttgggttctggtctcagccatccacttatcagttgtggaaccttgggtaagtcgcttaacctctctcagcttcctt

SEQ ID NO: 34970 - DNA, 1486 bp, Homo sapiens
ttagcacatggcaaatgtatatagcaaacattaatattattattattattgcctttgactcccacaattaatggtgtgtttcccttcctggcagaaaacaatggactgctcttcctggagacctcagccctggactctaccaatgttgagctagcctttgagactgtcctgaaaggttagagcctacctttattctgcacccctattccatccccgtggcttctacaggcagcagtaggaatgcagacactcagccctcaccccagctaatttctcagctcctctgtgggtcctggcaccactgcctgtccccctcagtccctccccagtgcctcccactcagtctggagctcagggagggaacaggccacactccccatggggctgactcttggttccttctccacccaagtaagtagaagggacccctatgtccacacttcatttccttcctgcaaaacctcctgcaagtgtggccaccccccatgctcagaaggggcatgcagtatgtatgggggggttggggagaagggagcatgggctctaaatcttctggcctgatcactgccctctgccctcccagaaatctttgcgaaggtgtccaagcagagacagaacagcatccggaccaatgccatcactctgggcagtgcccaggctggacaggagcctggccctggggagaagagggcctgttgcatcagcctctgaccttggccagcaccacctgcccccactggctttttggtgccccttgtccccacttcagccccaggacctttccttgccctttggttccagatatcagactgttccctgttcacagcaccctcagggtcttaaggtcttcatgccctatcacaaatacctcttttatctgtccacccctcacagactaggaccctcaaataaagctgttttatatcaatgcctggtcattccactgcctcccgtctgttcctccctcttctccttgtctgtgcctccccttcaactttggcccctcctctgagtccctaatccccttcctctgtcctccccaccatacctactgcccctcagggccagctgcctctggagttctgtggtctggggacagtgccaaggggataggaggtgcctgcccttccctctgccaacccccagggcaggtgggggagggaggagagcatggaggggagggggtatatctggaaggcgagacaaaggaaaccatcggcgggcaccatctggtgctgagggccctggtgccaacaactgaggtcactccaatgccaggggcaaggggaggaggcagcgggagatacaaggggagaagagggagtgggggccagtcctgtaggtgtgtactggggaaggggtttttaagcctgagaggtgcaaggtccaagtcctccatccagtcttttttttttttgagatggagtctcactctgttgcccaggctggggtacagtggtgtgatctcggctcactgaaacctcca

SEQ ID NO: 34971 - DNA, 1532 bp, Homo sapiens
gaaacactgcaggggacaggggcagagaggaggactcctctccagattcctctagcccagctttgtggggacagatggcttctgagcctttcagccacagaaacgattgacatgcttctctccccaacccctagaagatctatgcaacttctgataggactccaactcccttacactgctggaaactggtgacagtttcccaaacaggatatgggggtggggtgggaggtaaagggtcatgttaggaggtcggaggtcaggaccagagggcttagggattgcaaagagcacctctagatacaggtggtaattctccctctcccttttacccaccccctcctcggaagaaggggtggagtgacacacagcgggggaggtgggcagagggcgtcagaatgccttagtggccacctctggcaaaacaaaagtttctcttagctgcttccagatttaagggtgtgttgaggtatcagagttgtaactctagtaaaattttcagtctggccccctcccaatctttccaggacagggtgaccagaggctctgaaagtggcgcaccctccagccaccactgcctccctccccccttccccagcgagcgagtatctctaagcaccttgcccctcaaatcaccgctttccaaaaggctttagtggaaaacaggtccagggtgggcccagtggagtgggccccggaggcatggggcacggggcttaggagaatattcggatggcttgcgtggctgtgatgtggcagacgggacactctgggtccgtcctctcgcagatgcgtactgcacactccatgcagaacaggttgtgtccgcagggcacaagggcggcagtcacttcgctctcaaagcagaccatgcaatcccgcccgccgccggggctccgcaggccgcccccaccaagtttagagaagccctggagcggctctcccggggggcgcctcgggagtccggccagctcgggtcccgcggaagtggcaggggagcggtgtgcgcccgggggcccagcgcgggccttggcggaagaggaggaggaggaggaggcagaggagaagagcacggaggtgggcgtggcgttctcctggcccgcccacagcggggggctagtctcggccacgccgtagtacacatcctgcttgcccacgccatagcccggaaagaggtacccgccgtagccaaagtccccgccctgctcacccaggcgtggggcctcaaagccagagtccactccgcactcgccgatgcagcccaggctgttctgccggaaggtggagaggggcttgcagccgggctggtgcacccgccaggcgtcggagtagcggctatcgattgctgcgtcggggctccccgccaggaagtcgttttcattgttgtactcgaggatcttgccagtgcgcaccgcgatgtgcgtctcgatctcctcgcgcgcacgctccacgttgcctggggcacccgtgatctcgaacacggggtcgcggtcacggcttggtgtgataatgtatgtgttggtttgctgctggat

SEQ ID NO: 34972 - DNA, 1592 bp, Homo sapiens
cgaaacatcctagttctccaaagcccccatttctttccattattccagataccactagactaggcatggcgaaacaaaagctgggggagagagagagggagagagagagagagaggtggtggaagggaaaagaggagagaggaggggaggggagaggagaggagggggtgtgtggggaggggggaacaaagaactggggaggggggaagaaagcgagatagaaagatagaccctccccctaagcccccctccccaaacaccctgtaacccgactcccctcgccccagcccccggggtgggggtggggggaaagagaagcaaaaccaagaaagcagatctcctctcctctccgggggtgacggggggcggggggctgcaggatctctgcccccacccctcccgcctcggacctgggagtctctagcccccgctgtccaggcgcccccgttaggctcccgcaccgagccccagtccgggagcggcgctcagtggcccccaatagagcccagccccttccagcgctcaaactcttttgttttaaatgaactggatggagcagcatgaaactgacgggaggggggcgcgccgggggcgcccggggcatgccgggagttgtagtttcccgcccttgggggcgcggggacaaattccttgacccgaggaggatagggatgtggccttcggtctttcctcgcagctccggggcaagctaggagtgggatggaagtcgaggtccctaattttttaaggggagggtgcggggagaaggggtagtatgcggaaacagagcgggtatgaagctggctaacgccgcgcgccccctcccaggacccgctcctgccccgcgccggccggtcctgggggcccgcttttttatggaaatgaggagggggggccggggccgggggcggggagccgggagccgtccccgctcgctcactgcggctttctctctcgctcccctctccccgctccctgccgcgctcactctccgcttccccctcccgctctcccagagtcgatcccggagcccggccgcggggagaggttctcggcagagaagacaaagcccgcagcagcgatggggggagagctgggctctgcgtgttgtgggggccaggaaagggtgccaggctggggctggaaccccctggcaaaggatggggtcccctcatccctaaacagcaagccatctcccctcgcccgccccccgcccccccagtctcggagatctcagaggcaccgactgggaggtgagttagttcacgtccttctgctcggtggagggggtcgggagggcggtggagtgatgaagtgcagaggttgaaggagtgcagggacagaactgggggtcggacggagagtgggcaggcaggaaaagtcttaaaggcctggggtgacttaaccgtttggggtgagggccttgagctttggatatgacaggagggaggagagaccaggatggactgggaacccaggcttccttcaggcctgggctgtgaatacagcttggggtgatctgtcctttagcactcatcgtaatttccactctgtttcctccacctctctcccattgaaaacctattcagggc

SEQ ID NO: 34973 - DNA, 763 bp, Homo sapiens
aagattgtgccattgcactccagcctgggcaacagagggagactccgtctcaaaaaataaaataaaataagccaaggtcctaacacagtgcctggctatcttaggtgttcaatcagttttagtttcctggccctggttgttctccccttgtggttgactttagccagattgtggtcttcatgaattttcattcattcgttcattcattcagccagccacttcctattgagctcctgggatgtgccaggcactggaggagatttattctgacccatcataggtcacttgaagtcacttctaggtctagactcgctgaaataaggtcattctaaacaaacagcaaataattctaaaaataattcctgttaagccctggaatgcaggtgacctctgactctctctctctctctctctctctctctctcttttgtctttcttacacaagccaggcttctggcctcatgcctggggaacaaaggaccctgttgagttgtttagtacatacacacacacaagccaggctgcagggcaggaaaggtgacacagtggagagtccaggattcttgtggaggttgggggaggagtggggtggatgatccagactgtgtgcttgtctgtgtctggagttgtatcccttcttcttccttttttttccttttgagacagagtctcgctctgttgccaggctggagtgcagtggcacgatcttggcccactgcaacctccgcctcctgggttcaagctattctcctgcctcagcctc

SEQ ID NO: 34974 - DNA, 1516 bp, Homo sapiens
gaggcaggcggatcacgaggccaggagaccgagaccatcctggctaacacggtgaaaccccgtctctacttaaaaaaaaacagaaaacaaaaaacaaaaaaatagcggggcgtggtggctggctcctgtagtcccaggtactagggaggctgaggccggagaatggcgtgaacccgggaggcggggcttgcagtgagccgagatcgcgccactacactccagcctgggagacacagcgagactccgtctcaaaaaaaaaaaaaaattcccttatcctaggagactcctcagtccccggcaaacccagggcaattgcccaccctagtttcaggctccacaaacatttggcccacactgggttgagggtgagggagaaagggaatccttttctgcctcacttcctggaaatgtgtaggggcgtgagctatggggcgagggggccctctcctccagctccagtcctggagttgtggcgcttctgtttgtttccttggcaacagggaaaggaaacccccatttaggaggccggggaggccccagcaaccacacacacacagagacacacagactcacacgcggccgcccacacgcagtcgcctgcgtcagcaccagccgtcaggccctcgctgcccgcctgcggggtgtggagtggggagaacagccccgcctgaatccagtccgactacccgcccctactgatttgcctgggacgccgccggcccacatggccccacccacgcctctgtccccacccccccacgcctctgtccccacccccccaccgcccccggcagcgttccccccttaacaccttcccccaggtggtgaggggccaaagctcggggatggacaagagaaaggaaggagatgtcactgctgaatttctgctgaatttccttctgcctgctgcccgatttctatttgactggcaatagtctggtgtgtattgtgacagttcagggagcctgagactcacaagtgaggtggcgatttgggcctggttgggtgggggaggtggtttggaatgccgggaatggagctcctggggagactgtaggattttgctgttggattgggttccttgggatctgggtcgaagagggaaagagtatatttaacctggaggcagaaacctggggtttgggcctgcttctgtcacttgtcagctgtgtggcctggagacaatcagttagcctgcctaagcctctgtctcctcagctgtaatatgcagataatggtgcttgcctgtgcacctcaaagaaatttgagaaggctaaggtagtaaccttgattgtgaaaagcttgtcaccggggggactggggcaggtgggagggcttggttactacttatccagtcgcccctccagccccgctggctcagtgagcccagcagccacttcccgactttgtaggaacccatgccagtccctaagtggacctgctctttgacatctgtccagtgtggctgccctgtctcccatggcagcgtggcactgagctgcagtgctgtcttgga

SEQ ID NO: 34975 - DNA, 3508 bp, Homo sapiens
ctgggtgagagagcaagacttaatctcaaaaaaacaaacaaacaaacaaaaaaaacaaacaaacagaggatgaggtggatggtgggaccaggataggggccaggatgaggggaggggagtggaaggcttatcaaaagggtccttggtgaggcctgaggatggaggctccagagcctgaggtagcgaaccctggggacctgagtgatctcgttttgtgagagagcctggcccctccccagagccagctgcagaatggacctggccagagaggaaagtagagatgagtatggtgctggcctttgcagccagcaaggctgtggggtctttgctgttcctgtcccccactaccttcttgccccccactaccttctttctggctgaaaccaggatagagacccaatattggctgtccagcccccagccctgcttcccctttcaggcccctctgggaaccacagaaatctgggacctagtgtcttggcaacgtaatgaatgcatgcacagctctggtatctgttttaaattatccattaaaataagtacagttctgggggaaaaaaataagttgactgggtgcggtaagcagtagaaagggactgaagggggaaggaacccaggcagtgcttgggtccaaaggaaggggacaggagatggaaggggcagtgcctggctcctattcttggctttctttaggggacttctttaggggactgtggcttgttgcttgggtctaaaaacgaatgcttggctttgaagagagatagattggggcaaaagaaagaaaaaaagggaccccccaaactccttgatccctggccccaaactgggggcataaaggaactcaggttccagaactttgctccccccagggaacccaggcattccttctccaccccactcctggcacactgagatgcagctctgaatgggctgcccacgtgtggaggggggttggggtgactcactattactactgggaggacagggggagccagtggtggaagaagggtgagtcacactgatgggcaccagcctcagccctccccccactttcctggctcccagccctgcctacctgaccctctcccttgctttgcgcccacttccctctctttctccccgacccttttgcccacccactctccctccttggctctgccctctagcccagaaggtctgaggcaatgggggcaagcttggagccgacagtgctgagcaggcaggagccaagagaggggaagcttgagcctcacgcagttaggggtgcgctggagagggtggggcccgactccgccacaccccaacggtccttccccctcctcaccactcccgcccccacccccaatggatctgggactgcccctttaagagtagtggcccctcctcccttcagaggaggacctattagagcctttgccccggcgtcggtgactcagtgttcgcgggagcgccgcacctacaccagccaacccagatcccgaggtccgacagcgcccggcccagatccccacgcctgccaggagcaagccgagagccagccggccggcgcactccgactccgagcagtctctgtccttcgacccgagccccgcgccctttccgggacccctgccccgcgggcagcgctgccaacctgccggccatggagaccccgtcccagcggcgcgccacccgcagcggggcgcaggccagctccactccgctgtcgcccacccgcatcacccggctgcaggagaaggaggacctgcaggagctcaatgatcgcttggcggtctacatcgaccgtgtgcgctcgctggaaacggagaacgcagggctgcgccttcgcatcaccgagtctgaagaggtggtcagccgcgaggtgtccggcatcaaggccgcctacgaggccgagctcggggatgcccgcaagacccttgactcagtagccaaggagcgcgcccgcctgcagctggagctgagcaaagtgcgtgaggagtttaaggagctgaaagcgcggtgagttcgcccaggtggctgcgtgcctggcggggagtggagagggcggcgggccggcgcccctggccggccgcaggaagggagtgagagggcctggaggccgataactttgccatagtctcctccctccccggaactgcccccagcgggtgactggcagtgtcaaggggaattgtcaagacaggacagagagggaagtggtggtctctgggagagggtcggggaggatataaggaatggtgggggtatcagggacaagttggggctggggccggcctgaattcggtcagattgggatttgccaactatttggagccggggggaggggcttgagcaaaacagaactagccctgccagctcgaagaactctgggcacccaggacacatcggagtggcagaaagggtcctgttagaactttgttagcgggcttggcactgtgctagctttgcccaagctggctctgaacacatgatgcccactaagacataactctcaagttggcatctgtccagcgtgttggagcgaggtcaggaaggcagggcaatcccccttttccctcccaagggcttggcggtggccccccctcagcatgaccttgtcctgggttctaagggttgggaagttctccctcactctgccactctgcgtgtctgggaccttccttgggctctgacaggcccaccaaaagagctccgggagatgagagatcggctcccccgcagctcccacagcccttggcctgcttggcccaggaatgcaagggagggagggaggcagagggcagaggctcccagctcaggaagttgtgttatgcccaggtctggccgcactcctcccttggccctctgcctagtgtcttcgagggttgggggcactgtccttccctccttggggtgagccactttcattttcccagcggggccaggcagtctttgctcgggcccatcctcttagctgctgacgttttgatctttgtcttattgaagtgctggaatacagtgacatttttgaaatccagccgttggaagattcaggccactcccactttacccacccctgccccaccctaccccaccctactcaactgcaccttcttcttttctaaaaaagcctttgggagcttggaagtataggccctctcttccagccccatcaaaatttgtttcccttcttcctgccttccctttctctatgcagacccaggccaagagcactaagggtgcttggagatccgtaaagggctgttggctttgacttcttctctctcttttatcatctactccaaacttctgctcttcctagaaccctttgctaggtgtggttttgttgcccaggctggagtgcaatggcacaatctcggctcactgcaacctccgcctcccaggttcaagtgattctcctgcctcagcctcccgaatagctgagattacaggcatgtgccaccatgccgggctaattttgtatttctagtagagatggggtttctccatgttcgtcaggctagtcttg

SEQ ID NO: 34976 - DNA, 662 bp, Homo sapiens
ctttgatcgagaaacagattgagtggattcgatattctcttgctcacccagccacgccagtttgtctcctctgcctcctagtgcagctgtccaggcctgggacaccaggcgggtatgtgcgcatgtggggcagggcggaggtggtgtgtgtacttgttatatttagccacctccctctgttctcccccactgatcctggctggaaaggctgggcttccggaaaagagaggtggatttgcacacctggatcccaagctgatagaaagtggggtgaagacaaaggggactcagactggggtgtctgtcctcttctatgcccacagtaggaggagccaggattggttactccctgctgggtctgctgtgctcagagtgaggtagagaagtgggtagagtaaagaatttgggagaggaaaaaaggcattttcccaacccctcccaccaaagcctagagagaaggtgttgtctggtttaatgtttaattagagctcagagttcagggccagatttggagttgggatggaaagttgtttttaagaccctgtagcaatttttgacccagcctgggtacctcaaccacactcaggagtttgggggaccttctgttgggctggattataggctccaagaagaaacccctttcgccaatactctctctctct

SEQ ID NO: 34977 - DNA, 2702 bp, Homo sapiens
taaccagaaatcgcttgaacccaggaggcagatgttgcagtgagccgagatcacgccactgcactccagccagggcgacagagcaagattccgtctcaaaaaaataatactaataataaataaataaataaggggcaaggtagtccaccaacaaaatgacaggcagtgtgatatagtggacaccctagccctcggtgcccttagttctgtgtgtggccctttcactaaattgctgtgtgaccttgagcaaatcgcctcccctttctggctttccttagctgtaaaagaaagggattggagcggaaagtctccagagaccttttaggttccaaagtagtacagtgacccacaaagtgagaaaacagtcttctaaaataccaagttattaatagtaaaatcaaatataaataatgtgaatatagttaatagctaatgttgttctcaatagaaatgtttcccacaagctgtggaattaaacatactaccacatttctctatttccccgtgaaagtttgttagaaatggttaaattgtgacattaccctcttggcaaatgttttgttttcattgctactaggaaagggcaactcgttttcgatgcctctcccttctggacggtggaaagggctgtgtcatagagtaggaacgggagatgcggcacaggaatggctcccattgacccgggttgggggctagggcgaaggcctaggagaggcagaactgttaccttagagctggccaggattagagaacagtgcctggaaccggggggaggggcacggtgaccttgggctgcccaccttctacccttccagcacccatactggctcccccaacctgcggctgggctgggaggaggtcttggcccctaccaatcccttaaggaaggggaaagagtttgggaaggggagtcctcccttcacccctgcctcccccaagttgtgagagaggaagccggaatcctgcctgctgaagccaggaataattctggctgagatcccaggcccggcaggggcgctgagtcatggtagagggcagagtggagagtggacaggagaccctaagcttgtccagtcagaaaagcagaggctgaggggtggccttttcttgagaactacattcaagttgcagcaagaaggacagtggtctgaatttgacggggacaaatggaagggagataggacacatgagttcctttaggtctggctcaggggagctagacttcatttcaaggggtctaggttctgggcagttgagaaggaggctatttggggtcaccaaggctcccctttcttcccaaagctctaacactgccaccttctgctggctaggagagagctgtgtcttctgaggctagagctggaatgcagtgagaccagactgcctaggtcctccctcacttcttctcctgaccttggggtgtggctcccactctctcccagtgtcctcagggttaataactatgtgccaccagatagagagttaaggggctgctgaattggcttcttgtgaagggaatcccctaaatgtccctcgttttggtcactggcctccctcccgcccccttcaggacattctactatcttcttaggccatccctccctcctccaggcactacttcttttgctctatccccaagccccacccctgcatttttgtgacaacaccggaatgatttctagagagagaggccaggaagaaggaaagtggcacttggcaggagaccttgcagggggcggctggtgaggaagccagccgcccattgtccaggaccccagtgccctggcctccggcctcaggcttctcctgcctctgtacaatgccacgttgatacgcccagcagctgtgactcaggcctggccccctgccaggcccagcacttctactggagttgcgtctgaacatgtcaacaggcttcctatccctctctcagcaccagttctccccacttcagcccctccctctgcctggaattaaaacctggctttgtcttagggaaggacagctgggagcctagtggctctggtaggggatctgagaggcctcagaccctaggcatatttggctgtttggcaggtgtcacgcccaagggaagcgtgtggaagcagagccatgcctgctgtgggtgcacatgcccgcgtgagggagtcggggtgtttcatcctggggcacctgtgggcttttgaggtgtatgatattcagaacttcacaggttggggtttggggaaggctcaaggggcttctaagtccctggaacagctgcccccctcagttcctctctctctctctctttttttttgagatggagtctcgctctgttgcccaggctagaatgcagtggcgcgatcttggctcactgcaaactccgcctcctgggttcaagtgattctcctgcctcagcctcccaagtagctgggactataggtgcccgccaccatgcctggctaatttttgtatttttagtagaaatggggtttcaccatgctggccaggatggtctcaaactcctgacctcgtgatccacccaccttggcctcccaaagtgctgggattacaggcgtgagccactgcgcccagcctcagttcctctctttaaggtctcctttccagagagggatagcacctcaaatgccagggaggggaattctccacatcctgcccttacccgagttgtggcagacccacagactagccaagaaacc

SEQ ID NO: 34978 - DNA, 1787 bp, Homo sapiens
ggagggaatacattctccggttctggaaggggctcttttttgcaggagacagacacttacattaaacaacttgttctgaggtgtggccagaggcctggactgagcaagtgtgcaggctgggggagcttcctctggcttctcatgtccttcccctgcccctctgagtgtcactctatcctcctccctgcctggtggggggaggtgggggtgactccttttttggactctcctaagcagaacactgcctgggtctcgtcctccagagcttctgcaaatctagccttccctatccctcttcacagtgaattgctgggcctcttggagtttaggacttttgtggtagaagaaaaatgttggcagggctgcttttctcctttccaggatagatttttccttctgcccacgcttggttttccttttttccatctgctgtggtgggctcatgcttaagcactgatgagttacagatggcagctggaaccaggtcctctggatctttccctccgctccctgggtctgctgctttctctcaccctatatttgtgaagcaattgtaacatctagaaagttcttgggttctctggaggtttttaagaaaataggacctttctatttctccagtccactagcaaaaataatcaggggcccagaaaaggtgagggaggtggcagaggcagcgctgttcgactggttatagctaaagctttacccactttgaggagcagggaggcttaaagctggggcccagatggacctggaggcctgggatccacatctggaaccagatgctgaggctatggtagatgggtagggctcagccttctcccagggcacggatgaggcaggagggagggaggcagggacccctctgttcagtgcagatcagggcacccagactgggtcctgagaaaggaaagggtcaatattgtgcctggtcatccttgtctgaggtccctctgagctctaaccagactttccttccccacagtcccacatgtgtaaaagggactaggagaggtgaccagtacctttggggctcagatcgagaagtgctagggacatgtgggccatgagcttagttgtcaggctcctcagagggagggaagcttggccaaagggaagtgagtagagtccagggagaaggctaagtaaggccctgtgtgggaaggggcaggagacaaaggtacccctgtctctttgggaaagaatgggaggagagagagggaaaagcattcatatcacggggtagagctctgcccttggccccaggcacgttcctgagccctgagtcatgggaagggtggagaagcaggaagggggttttcaaggaccttggggaggtgggagcccagccccagaggcaagcagatgcaaaccaacctaatgcaaggatgccctctcctggtaattgcaggcatagcagcgccagcccccatggctgacctcctgggagcctggcactgtctaggcacacagactccttctcttaaatctactctcccctctcttctttagcaataccaagaaggagggtgacctgatagctgctcaggctcggctgaaggacctggaggctctgctgaactccaaggaggccgcactgagcactgctctcagtgagaagcgcacgctggagggcgagctgcatgatctgcggggccaggtggccaaggtgaggccaccctgcagggcccacccatggccccacctaacacatgtacactcactcttctacctaggccctcccccatgtggtgcctggtctgacctgtcacctgatttcagag

SEQ ID NO: 34979 - DNA, 926 bp, Homo sapiens
gctaatttttgtaattttagtagagatggggtttcaccatgttggccagactggtctctaactcctgacctcagttgatcctcctaccttgacctcccaaagcgctaggattacaggcatgaggcactgtgcctggtctaagctcttatctttaatccaaccccaaactcttcttaaattatctgaatctcttctgaagacagacctattagcttttctaacagtttcatcttcctggagagcctttctgactgctccagtctagactagtgccgtctactcccggagcacagatgccatcctggaattcccctgcctcatcattctggggattccctttgcctctttcctgtgacagatctcttgtttcttgtgtcccatggcttcctcttttttttttcttttttcttttcaactatttcattttggtggaggttatcctttgtagattcctggaaaaggatacatggcaggtaaaacattttaagatcttgagtgtctgaaaatgtattctactttcctatttgatagttcagctaggtatacgtaattctagaatagaaatacgtttccttcaaactttgaaggccttgctctattatcttctagcttccagaggtactgttgagaagcccaaagttattctgatccctagccctctgaatgtaacctggttttatttcactgaaatcttttttttttgttttttttaatactgatccttgtggagcagggctaccttataggcagtgtacctcactgccctcactggaatcttatagtgctttttctttgtcctggtgttctgaaatttcatggtgttgtgctttgatggaacactactcatttattgtgctgggtactcaatgggccacttcagcctggaaattagttatcttagttctttcagttctgagttttcttga

SEQ ID NO: 34980 - DNA, 695 bp, Homo sapiens
atgaatgaaaggagtactcagacacgggtatccagtgaattcacagcccccctaagccggtaacgcatttattcagtacagattttttttttttttttttgagatggagtattgctctgtcgctcaggctggagtgcagtggcgcgatatcagctcactgcaagctccgcctcctgggttcatgccattctcctgcctcagcctcccaagtagctgagactacaggcacccgccaccgtgcctggctaattttttttttttaaatatttttaggagagacgggtttcaccactttagccaggatggtcccgatctcctgaccttgtgatccgcccacctcggcctcccaaagtgctgggattacaggcgtgagccactgtgcccggcctatttagtacagatttaacgacaagggcttggagcaaacacaatttgtgggtaataaacattgtcgaccccccaagtagagagcagtcctgcaggcgaatgatcaaaggttggtttctgcagacaggagtaaacaaatttatctagataagttcctttacattcccttgttatctaccctttgctctcaggctctggataagagaatttggctgccttcagccaaattttatttcgaagcttttgcaaaacctcccggccttccaagaaggtttgtgtctttccctataatttcttccaccaccctg

SEQ ID NO: 34981 - DNA, 2101 bp, Homo sapiens
ttatctctttgtcttgtgtctctatttctacactctctcgtctccgcacacgaggagaaaacccactaaccctgtcatttttctccaccttaatgtcatttttctccaccttcaggttgtcccccattgctgcagttttttgagttcccaaacttcaaaattggctatgtatcctcagtgattcctgctgcatgttgtcctctactattttggctctataaataatgagaaatgtggcaagcgcagtggctcacgcctgtcatcccaccgcttcgggagactgagtccgcagcatcgcttgagcccaggagttcaggttacaatgagctatgatcttgccactgcactatagcctgggcgatagagtagtattttgactctaaaaaacaaaaaagaggaaagaagaaaaagttatacaaaaatcacacattagatttgttcttttttttttctttttgagacagtctcgctctgtcgccgtccagtggcacgatctcggctcactacaacctccgggttcaagcgattctcgtgcctcagccacccggctagctgggattacaggcgcgcgccattactcccggctaatttatttcgtatttttagtggagacggggtttcgccaaggcggccaggctggtctcgaacttcggacttcaggtgatccgtccgactcggcgtcccagaattctgagattacaggcgtgagccaccgtgcccggccttgatttgaatataaaggttccaacactcccaaacacaaggtgaccccatttacaactggatcttcaataagcgtctggtgattcaatttccgccaattagaaagagcccaaccagaacacgcaggcgccttaacgctgagggcataacgaaggtaaagaaggcgtggctactgcccaaatccaagatggctaccaggaggccgtcagttctcggaagtgcggcacatcctcactcctgggaggctcaaaggctcaaacgccattggcagaatccccgacagctcatcctccgccccctgcagggggcggtaatgacagagtcctaatttccggttccggcagtaccggtagcccagtcgagatggaggaagatgcgaccggcagacggcattcgctgggaacgacggatagactgggggctgcggcctagaggtccgggcttggagttcgcctcagacgcggtggagccgccggagtctgagaaggtaagaagccgccggcttgaggtccctgacaactaaggtctctgaggatctgcacttgtcagggaggcaaaggatgcctggggtgtcaggctgcggtaccatgcagttttgggaatgaaggacaactgcggtgaggcgtctcttcctggcagaggatcgtgagattcgctgacagcgaagaagcacggcaaggggcatgttcgaagacccagagttgggtgtgcgggggccaggacagaggctgcataaagggggtgtcccacggagtatcttgagaggattgtcatgtggtgtctgtgatgagggatcacgtgggtacctatggaagaccaaaggaaagctgggtgggaatctcaccatgtccgaggtagggaggagatgatctcgaaggagggttcggaggcatccccaggcattcccctagggaaatgtatattcagtaggacaggtgggcaagcatgtacatatattcacgttcatgtggtagatagctcccaggatgcagatgcaatagggagaacagaaggaatggaggatgttggtctctattccctgtttccagctgagaaatggggacccatgggtgtcttgtcaggagttgtagaagatgatttgatttgaaaagatctgattattataaaagtttggttcttattcagcaggtctagggtgcaccctgaaattctgtatttctaacaggctcccacgtgatgtccatgatgccagtctgtggaccaccttgggtggcaaggacttagagcatcactgtccagtagaactttctgtaatgataatgctttgctgttaacaaaatgccttcacaattcttaactcatatgagttgtactacagctctatttttttttttttttttgagacagagtctcgctc

SEQ ID NO: 34982 - DNA, 1792 bp, Homo sapiens
gacttccattctccctaaactggagttttggtcggtaatcaaaactaaaagaaacctctgggagactggaaacctgattggagcactgaggaacaagggaatgaaaaggcagactctctgaacgtttgatgaaatggactcttgtgaaaattaacagtgaatattcactgttgcactgtacgaagtctctgaaatgtaattaaaagtttttattgagcccccgagctttggcttgcgcgtatttttccggtcgcggacatcccaccgcgcagagcctcgcctccccgctgccctcagcctccgatgacttccccgcccccgccctgctcggtgacagacgttctactgcttccaatcggaggcacccttcgcgggagcggccaatcgggagctccggcaggcggggaggccgggccagttagatttggaggttcaacttcaacatggccgaagcaagtagcgccaatctaggcagcggctgtgaggaaaaaaggcatgaggggtcgtcttcggaatctgtgccacccggcactaccatttcgagggtgaagctcctcgacaccatggtggacacttttcttcagaagctggtcgccgccggcaggtaaagtggacgcagccgcggtgggagtgtttgttggcaccgaagctcaaatcccgcgaggtcaggacggccgcaggctggcgcgcggtgacgtgggtccgcgttgggggcggggcagtcggacgaggcgacccagtcaaatcctgagccttaggagtcagggtattcacgcactgataacctgtagcggaccgggatagctagctactccttcctacaggaagccccgttttcactaaaatttcaggtggttgggaggaaagatagagcctttgcaaattagagcagggttttttatttttttattatctttgagatagggccttgcgttgtcgcccaggctggagtgcagtggcgtgatcactgcagactcgacctcctgggctcaagcgatcttcctgccgcagcttcccaagtagccgggactacaggctcgtgctcccgcgcccggctacagatcagggtttaagtcgcggcccaccactatgtgagcaagacgtaagccccctctccctcgtcggcttcttgtcagtcaagtgacagcaatagtacctttctcatagggtcgttttgagaattaaatgagtaaatacacctaaggcgcctaggacaggacctgacacatagaaagatttgttagctattatgagaatatcttcttcactgggagattgccaggactaaatgtgttaccatgaaaagaaacatttttcctgtctcgacttttattttatttatttttatttttattttttgagacggagtctcgtcctgtcgcccaggctggagcagtggcgcgatcttggctcattgcaacctccgtctcccgggttcaaaggattcccctgcctcagcctcccaagtagctgggattacaggtgcacactaccacacccggctaattttttgtatctgtactagtagagacgaggtttcaccatgttggccaggctggtctggaactcctgacctcgtgatccacccacctcggcctcccaaagtaccaggattacaggcgtgagccaccgcgcccggccttcacttttatataatttatatgactcgagagttttgcccatgatcccaccaccccagcacatcagtgttgaaacgcttccaggagttcggtgccctgaccacagcctctccttctctagccctctctatccccacttccctgttctttgg

SEQ ID NO: 34983 - DNA, 652 bp, Homo sapiens
aggtttcagtgagccaagatcccaccattgcattctagcctgggcaacagagtgagactctatctcaaaaaaataaataaaataaaataaaatcagtgtaaaggaatagagagcagctgacacgctgtcctctggcgacctgtcgctggagaggttgggactctggatgcgtgcggggctctggcctaccggtgacccggctagccggccgtgctcctgcttgagccgcctgctggggcccgcgggcctgctgatctctcgcgcgtccgagcgtcccgactcccggtgccggcccgggtccgggtctctgacccacccgggggcggcggggaaggcggcgagggctaccctgcccccgtgcgctctccgctgcgggcgcccggggcggccgcgacaaccccaccccactggctccgtgccgtgcgtgtcaggcgttctcgtctccgctgggttgtccgccgccccttccccggagtggggagttggccagggccgatcgactcgctggccggccggcccgcctccgctcccggggggctctaatgtggcacatatacaccatggaatactatgcagccataaaaaatgatgagttaatgtcctttgtagggacatggatgaaattggaaatcatcattctcagtaaactatc

SEQ ID NO: 34984 - DNA, 723 bp, Homo sapiens
cctgtcagtccttgatatgcatccaccacttacccatttcctatcagctcctcatccataaattattccagggtgaatatccttgtacatttccacaggagctagtgctagaatttctctgagacatgtaactgggagagggatcactggatcctagagtttacacctacctctgttccatcagattactttccagaaaagctgttcttgtctgccaccttctcaccgtcactgggttttttaccattctaatatttgtcattctgccaggtgtgaaagcggtatcttgttttaatctgtgtgtccctgattcctggcaggtttgggcatttcttcatgtacttagtcattttggcttcctcttctgagaactgcctgctcatttcctccagcctttcattttcagaacttttttaaaaatgggttttttatcttgttgatttgctagagttgctagtatagaaggaaatatctattgggtgataactttgttgatgatgtcctttgaggaacagaagtcttcaattaaataaaaagcagcacacatttcaactgtttccattttcccttaagaggatgacacagaagggaaatgcagttatgcctgcagacccttcatgaactgcatggatcctcctgactccttttctcagcctcttgactaactcaaagagccatttaaaaaaatgccagatataggccaggcgcagtgctcatgcttgt

SEQ ID NO: 34985 - DNA, 1649 bp, Homo sapiens
gctaacatggtgaaacgccgtctctactaaaaatacaaaaaattagctgggtgtggtggcgcctgtagtcccagctactcgggaggctgaggtgggagaatggtatgaacctaggaggcggaacttgcagtgagccgaaatcgtgccactgcactccagcctgggcgacagagccagactccatctcagaaaaaaaaaaaaaaaaaaaaaggagaaagcagcgaaaccacaaggactttctggatcttggcagtgggaaaagccagggtgttaaaggatgtggcttctctacgtctagcagtaacctatccttccagccctcccatgtgcccatactggaacacctctctagggatgtgacccagcatctccatctttaccacacctccctcaatgactaatgactgagtaactaactgtcatcagacataagcacacacccaacggtgcacctggccctgacccaaaccgtctcatctggggactggggcgacccacagggaagaaagtcttccacagcagggcaggtatgcccctagaagaaaacattgaataaatgcctctgggaattagaagttcaaggctgacactctgaacctgagaaggaagggaaagctaccatggccccacccagcctccatggcagccggcttgacaagagctcggtcctgtgtgactctccttaagctgttccccctgcctagtacatcttcacaactcttgtcagaagttcccatctcttctgtcactatcctctactcaatgttctctcccttctctggattctttggtatttatcaactttggtccttgaacacatacttctaccggcattactcataatggcaggcattatgcccagcattggggatacaaagcaaaataagcagctcgctaattgttccctggccacaggctttgtgagggccaagatcatgcctaatccttccctgtcagagcataagggcccagcacagataggtgattaattgcttggcaataattcttgccttggccatcaggggggatcctcaggccccatcctggctcatcccctcctccaagaccctgggacctgacaggggcaatggagtggactgacacacctgcgcacacacgatgatgaggtcggggttggtccgaagccagtccaggaagactttcacagcaggaagcagaccttcggccatcaggacctgaagcttctcctggatgctgcgctcattccgacaggagcgtccactggactcactcccctccgactcagagccctcctcagaggctggggggtgggtgaatggaagagaaaaaaactgggataaacaactgacacttgggaacaggcctcagctctgtgcagggagcatgcttccacctggcctgggcccttccaaggaatttggatatgaaaaatctggggaaccacttacaggcccttattcaatttttccaggcccactaactgttgttgttttttaatctcatcaaattcattttaccaaggttgtttttaaaatatggtgccttttaaatatgattcttatagactcaagtaatttgtgacgttgatctacagctattcattcaactaggatttatgaaatgcctactctgtgctggaaggcagggcagacagttagaggggagct

SEQ ID NO: 34986 - DNA, 396 bp, Homo sapiens
gccagaggtagaagcatgagaacctgctcaagtccacctttcaggttccactgacctatgagggggtcagtgacatgggtccagtcgatgcagcactgcagttccagctggtagtgggactggatatagagaaggagatgctggtagaagccaataccagcaaccaggtgcgtcctgtaggcacattccaaagtgctccggctgtggatgtgctacagattgcgaaagggaaggggctggttaagcaataaactcagagtcgcactcaccctcccttaccctgttcatctcacttggctctggaacttcatctacatctactctcactcacaagttactgtcatactcttagctctaactctctgatctttccatctgggaccaggctcccctcct

SEQ ID NO: 34987 - DNA, 1900 bp, Homo sapiens
gtttccacgcttcatcctattttgacccagttgcggagcccatgttccagttgacctacccaacaaattctccacctttgatgggaagagctcattcgggcctgttgccaacagagggctgaagggctgaagatgtgacttgtggagcgtgggtggcattatggaaatcagaaaccaggaacggaagttgcctggcaagagactacagtcatgaggctgggaggaaggcaggactcaggagtccccaggtgcccggaattgcctcccaaatcccaagaacgctctggacacaaaagtcgttcgtgacccttccaggccaagactttctcattcggactcctcaaaattagagccgtatgggactttagagcacatccaattcaaatcgttctttttaaggataaggaaactgaggcccaaggtcacaccgtgagagagtggcaaaggatggacctgaacctagctccacggacttcagtccaagactcttccttgtaaatcccccaggattccaagcaccgttcccttccgggtttttctacacctgtgaccccaccttcacctacccaacccttccagccttcaattcccaccctattaccccaactccaccaagcttagtgcccgccccaagaaagctcactgcagaggggattcctccacgtgcttccctccaaacctcccacctacccaattcctcctttcagttccatcccgagttactacgggaccccgccccgcctccaaaattgcaccctccttcctcacccgcacctcaccccgacacccgggccccgcccgcccgggaggccccgcccctcgccgtctccccacttccctcggtggctgctctcacgccctggcccctctcaccggtaaagccgcttagtgtggaggacttttgcttcgggctcgctgctctcccctgtgggggggccttggctcatggtgcccgggtccgggggcagctcccggtcacaggcccctgccacccaccactaccgccaacactgccgtctccggccgtagccgcagccgccgccgccaccggccctgctcggccgccatcgctgtgaggcggctgcccgcgacagctcctcctccgcctgccaaatctcgcgatggcagccgcacagttgcggaccagtggcctgctgctaccaaatctcgcgaaactcgttttccctcccgggaagttgccagaactaactctgggcagcatggcgtctttccggcttctccaaacccttgcgaaaaactttattggcaaagctatcagagaacggacagtgtacccactgaggcggccaaagcttaactggatcagggcaggtgagcttacagctaggagcgtgactgctttgtcctacaatggtcatttggtccatccttctgcccctttcccgcctccccgtttgagccaagcctctttcagattactggttagagtgactccagctttcccttttcccccataatttaaacaaacaaaaagtgcatgtgaaagtttccttggaaagggccgagcatcacataggagtaaagccccggaagaaatgacttgtacaagcgtctcggcccttcagctcccctcccaaagatttccagcttgcatatctatctcttacgagccagtaacatttattgaactgccatcttccagccacagtgcaagattctagacacacagaggtgagcaagctagacactatccctgccctcccaaagctcaaatgattttagggataaggactcatagaaatgagaagctagtccctaacgtttctatctcctaatcctcacattggaaatcagggcaggtgggcttacagctaggagcgtgactgctttgtcttgttttagcttaaaacctaagttaaaaagcaagggtggtttgttt

SEQ ID NO: 34988 - DNA, 1597 bp, Homo sapiens
gagagaatcactcaaggccagaagtttgagcccagactggcaacatagcaagaccatgtctctaaaaaaataaaaataaatcgaaaagtaaataaaagagggaaaggaataacatactcaacttcataaagatgtggggaagtcaaatcaatcacttatagtaattagcgctgtgcctaatacatgttaagtgcataaactttggctgtatttggaagtaccagccatacccaccaactgcatctgcctcccctatctactccccccaccgtcagcctattgccaatcagctgacgcgcttccctcgagagtagcctgacccttttcttgcccccataggctgatctactggctgacctttgccgtgggccgctccttccgaggcttcggctacggcctgacgtttctgccactgctgtcgatgctgatgtggaacctctactacatgttcgtggtggagccggagcgcatgctcactgccaccgagagccgcctggactacccggaccacgcccgctcggcctccgactacaggccccgcccctggggctgagcctctccgccctcgccctcggagtagggggtagcggcttgggtctgacacatctttgaaccttgtggccaggcctggacttcgcccccaggcctaggaccgcggtgggtggaaccctgctactgccccaacagggactccaatcaatcggagttctccccttgccggagctgcccttcacctttggggcccgagacagtcataagggatggacttagttttcttgcagggaaaaaggtggacagccgtgtttcttaaggatgctgagggcatggggccaggaccaggggagaggcacagctccttcctgagcagcctctcaccactgccacaaggctccctaatgctggtctctgctccactccccggcttcccgtgaggcaggaggcagagccacagccaaggccctgaccacttctgtgccagttgtctaagcagagcgcctcagggacgctggaaatgccttaaggatagaggctgggcatcacatcaaatgggactgtggtgtttggtgaaaaccttcctgaggatctggattcaggaccctccatgactggcctatttactgtttacagctggccagtgcagagctgctgctcttttacctttttaggcccctgtaacttcccacctttaaactgcccagaaggcatgcctctcccacaggaagaggggagcagacagggaaatctgcctaccaagaggggtgtgtgtgtctttgtgcccacacgtggtggctggggagtgcctggatggtgcggtggttgatgttaacctagtgtgtgtgtgtgtgtgtgtgtgtgtgtgtgtgtgtgtgtgtgtgtaacaataaattactaccagtctttgctggctcttttttcctgtttgtcccccagtctcgagtgtcccttccctgtttaattcagatgacgatagaaacctcccagctctacctggtggagcagggctggcaggttccttggttccacagcaaggaaatggagcctcaaacagaaacttgccttccaagcccatctcttagcccttccattccctggaacc

SEQ ID NO: 34989 - DNA, 1199 bp, Homo sapiens
agggagcaccatcaggcccccatcgggctcaggggatagcaggaggctccagttgacgctcagggtgctgtggggggtgttggtggccaccattaccactgccagaggccccaggctgctccacacatagtgcagtgtggaattggtgcccactgcccgtatatgaagcaggttctgcagggggcccagccagttagggatgacctccagagacacctggaacatggagtagtggagggttgagggaacaggaccaaggagagacacaggcaaaagagaagcttgaggggaggggggcttggaaagtgctggacaaaggatgggattttggggactagacaagaggaatgtgtgcgggagctgagggaaccctggggtaaggggcagtggggacaggatgaaaaggggtagggtagagggtacagccaggactcccctgaccctggtgggcgggtcagggcacagggctgcgaagaagaaaacattcaacacttgcctggacctgggtcacccagggctgagtcggggtccagacatcaccctcacatttgccctactccacaatcccgtcccatgacccatgaccatctcccacaccctccaggttgaagaaccctcctcttggcagccaccctccacccctagcccctggatgcccggttccagccaccctgcaagggtagcgtttcctgaaacttctatcgctgtagccccagggccctcacctggcgggtcttctcccccagcaggccaaatggggctgcaaacagaagtagagtccaaaggagcagggggctgggggcacagtgcccccaaccccaggtgcactccacagagccgcgcatacggccgcaattcagccgacggaagaggtgccagagggtcacatgactcgcgttcagctgatccctttcaagggcggagccgccaaactatttgctttttaaaaaaatttcctttcgtcagcaccatttaatgtattaaagaacagctttgtattctatcttaaaacaggaaacgtcagtctcttacaagtaatacaatttaatatggtcacaagattttaagtgaaaaaaaaaacattcatgctacaagttttcagttttccttggacaatgccaaaaacacagtattcaaacggcatgttttaagaggaacgtgaaatctcattttgacacaaagacaggttaaagaaaata

SEQ ID NO: 34990 - DNA, 742 bp, Homo sapiens
gctgagtggtgcctttgttttagctttttttttttttcttttgcatacactcaaaccaatctgcacacacacacccattttgagcccatcaaagccccggacccagccacaaggggagagaaaccacctaacttgggagaccactctcctgtcccttctccattaagagttgtttcgtcactcaatgaaattctttccgaccctcttcaccctttgaactgtcagcataacctcattcttcttggatgcatgacaagaactcgggaactgctgaacgtgggtacaagctgaaacacaggcagcctggggcatgccccagcccagccaagggctgagccagtgtgcaagccaggcgtggccaggtgggctaagtgggcagggtacctccggcagcaggcccggggcgcgaggcctgggcaggaggcattgccggctgcagaggtccccggctggcaaagtggctgagaaaaatcctgcgtcatggagatcttgtcacaaaaaaaaaaaaagaaaaaaaaaagtaccaaagggcatcattcctattcaccagcaaactggtccctcccaagacaaccatcactaccagtttgtttgttttgtttgcttgcttgctctgttggccaggctggagtgcagtggcacgatcttggctcactgcaacctccacctcctgggctcaaggaattctgcctcaacctcccaagtagctgggattataggcatgtgccaccacatctggcta

SEQ ID NO: 34991 - DNA, 2090 bp, Homo sapiens
tgggaggcagaggttgcagtgaacagagatcgcgccactgcaacccagcctgggtgacagagcgagactttgtctcaaaatataaaaagaaaaaaaataagggatcttccaaaaggaaaaggtgaccagtcgagaaatctgggaaaacccaactggttagtgggaaagagtacaacgccggggacacggagggaacgattacatctaagatcagtgaggcaagtacggttacttcgggaaaagggattgctgttcaagagactgttactgaaaataaatgtaacgtaaagtgaccaaggatattacctatttaccagaccctctttaagcagtctaccgacttacctcatttaattctcacaattctactaggaaatactgttaactccgtaatacagattgaaacatttaaattaccgctactaagggatgggccaagaatataaagctagacctaactgaaaaaaaaacaaaaaaaaacgttattcgtgcagctacatagcgacaatcaggctagaaagggcgcaggggcgggggaagcgtgggggctgagggacagaacgcggagtgggaaagagcttcccaagacgagcacacgtcaaggaaagaggctcggcgagaataaggccagtttgagtttgtgcagagaagcgaacaggttaagagaagagaggaaagcgggacactgggcttccaaaatgaagacgatgattggaaggctcagtggcccggtcagtgggggacggagctggggcaacactgaaaagtatggacagaagagggcgaaaagggggtccatttcctggcatccccagaactcactgagcacgagcactggacgatggcccatcatggcgacgcgatgcagagccgggtacccagagctgggggaaccggcagaaccttctggagagagagaaccagacagaagcccagaaaacgctgcctcctcagggcttacacctcaacccgctactctcaaggtagtcgccaatcaccgcacccatctcattgatcggcacaaaaacagaccaattgacagccttagtcccgccccctacgcaagaacggccagacaagttagacagagagcgcacgacgaaggcactgggagggcacaggcgcttgcgcagtagggtggccgctcccggccgcgtgcagcgcgaacgtcggcgcaggcgccaaggctctggcagttggccagcacaccactacgcatgtgtgtcaactctagggttgggtgctggggttgcggctttcggttaacaccgcaggtgaggtcgttaaactgtgtattgcgactcggctcctatcggaccgtgaaggctaagaaaggcttcacagttcccactcttttggtctagccttagcaacaggtggactagagaggcgggactccagccagcacatgggggaaagacctgccggcttggcgcagggtgaagtgggagttgtagtcttaccgggccggactgcgcagcctttttccgggcacactgggagttgtggtttatcgcctctggactaatggctgtatgtggacttttcccttcttaggaaatgctttcagtgaggctgtgagcagtaccggagggtgatggcttgcgtttccttaagttatcctatctaaaatattttcccaagtatttccgccgggcgctgtggctcacgcctgtaatcccagcactttgggaggccgaggcgggtggatcacctgaggtcaggagttcgagaccagcgtggccaacatggcgaaaccccgtctctactaaaaatacaaaaattagccgggcgtggtggcgcgcgcctgtaatcccagctactcaggaggctgaggcaggagaatcgcttgaaccctggagacggaggttgcagtgagccgacatcgtgtcactgcactccagcctggcgacagagcgagactccatctcaaaaaaaaaaaaaaaagtattccctgtggtgctttgagatttttttcccccacatccatccctctcccgctgtcctgagtcttagttagagatgatggggagccagagttttaaaattaccattcgggataggagaaggacttatcataccgtggaaat

SEQ ID NO: 34992 - DNA, 508 bp, Homo sapiens
ttaccatgttagcgaggctggaggcaccttattttaaattgcaattcaccatccccagcccagccttgcctcgtaccctttccttgtttttctccagatcacttattatggtgtgaaactcttaagtattttacccatttgttttgattcttgccaatgggctacactaggttaaaggtcatggggtcagaggtcttggggttcatttgtgcaggccggttggccagtgccccagcaagaagagcagcgcctggcaccgggatgcctttgatcctgtgagtcaaggtctgggtgacgcggtgtccagaggctcttggcccagttgccaaggaaagggacggcctgtcagttgtgttttgggcctgtcgggtccttcagcacctggagccacagccggagggttccttcccagcactcccagcctgggataagcccctaagtgtcccattatgtaccattcactcttactttgtcggccccatccacagccgctgcgtccttttgtcag

SEQ ID NO: 34993 - DNA, 2740 bp, Homo sapiens
aggcgggcggatcacctgaggtcaggagttcgagaccagcctggccaacatggtgaaaccctgtctctactaaaaatacaaaaaaattagccgggcgtggcggcgggcgcctgtaatcccagctactcgggaggctgaagcaggagaatcgcttgaacccgggaggcggaggttgtagtgagccgaaatcgcgccactgcactccaacctgggcgacagagcaagaccttgtctcaaaaaacaaacaaaataaaaacaaagagcactgaatggggagttgggtcgccagggttccaggccatttcaccttgaccggcagtgtccttggactcgtccccttcaccttcctgagcgtcagcttctttacttgacaacctgttttttgttttgttttgttttgtttttttgtgaggaacttctgagacaatggatataactcacttcgtaaactgcgaagcatcctcctcaaatcaatgttcgtgccatcgttggttccccgctcctagaggggcctctgcacaaagacccaggccagtgactcgctgtgtttggggacggtcgtgtcgcccccaaggcaggggccaagatgcttcctttcttctggatctcccaggcagcgccaggtcccgaggcagtattgactgaggttaggagttcaggaaaacggccaggaggacagagggcgctgtcccctctagaactgagcagggcgttagatttagaggaggtgttcgatttacgcatgcgcaccctctccgggaagacctggcaagacctggcaagacccagccaaaattggctctctcggctcggtttttccccatctagggctacatcttctgggtgcgcatgcgtcctgcccgggtgcggttggctgatgattccgtctgccactggcagagccagcgcagtgaggctgaggccccgcttcccgcccattggcaggggcgcggagagtggactggggtctttggccgcacccactgcagtgttagacgagcggattgaggacacttcccggccgcgggccgcaggcttggaagcgttggttggccgaacccattgtctcatttgccttgtcacagcagggaggacgccgggggagaggggtgaggggactgctgcgtagggcggcgggactggcgctgcatccgagcagggtccgatggccagttgccaatcagccatttattgagcgtcttctgtgtgccatacacttaggactatgtgatttctgccttcggggattttacagcatagaggagattaaacaagtgactttattgccttccctcgacctcccttctaccccttcgccttagatggagattttctctttctgaacccggaaccgctccctcctccccgcccggctatagctggcaggacagggattggatgccacggccggtgcgagccttcgctctccgccgagggtagtgacacaggcgaggacgggccccgcaggtcacatgagggcggggcctggcgggctcgtgaccttcccgtaggcggggtccctcccctcccagctcgggccgacagcgtcgtcaccagcttttatggggcacgtggcggctgatgcacagtaaatagaagtgactctcccctacgaaggcggggaccgcactttatgagaccaaacaaactgcccgagcgaagcccttggagctctaaatacttggcagcaagtacaaagcaaaggtggcggggtggagggggtgacggggggcgggggattgtcaaatgtaaatcagtccgactggaagcactaactcctgagcgccccctcccaggctgatctgaactagacctagcagggagaagtgcaggaggctgtaggagcttcctactgcctccttttcctcttgggcctctggtttaccaagtgtgaaatagggcaggggaatggactttggatagtgacacagtgatttaagacagcaaacagagtgccaggcgccgtggctcacgcctgtaatcccaacactttgggaggccaaggagggcagatcacgaggtcaggagttcgagaccagcctgaccaacatggtgaaaccccgtctctactaaaaatacaaaaattagccaagtgtggtggcacgcgcctgtaatcctagctactcaggaggctgaggcaggagactcgcttgaacccaggaggcagaggttgcagtgagccaagatcgcaccactgcactccagcctgggtgacagagcgagactctcaaaaaaaaaaaaaaaaaaaaaaaaaagactgcaaacagatacgaggggctgatatgagggggctgtattggctccagtagaagtgagccattctgggacctggggtggggtcgcccaagtgtccctttcacatatgctgttctgaaacaagtttccacaatcacaaggctggaaaagttactcagcccataggactgaggggtgtgagtcagaagaacatgagctacagagaagtggtctggccttcttggctggaacaaataccaccctttgcctcctgcctaccaagagccacctctttggatacaggagcccagtgggtgctaattcttctgtgcaccgatatctgagtccagaaaactgggaccctaaggatctgtgctgcttcaggagctgatcttgcagctgaaaagtaaaggagaagctgcaaaaagttatatgctcttgagtattattttaaaaaatctatagggtttgtagtactccacagtttacagagtgcactttcaca

SEQ ID NO: 34994 - DNA, 689 bp, Homo sapiens
ccggccagaatcaactatttctaacacttgtacaaactaggaagccaagcccagaacagtacagtgccttgcccaaggcccctcagtgagtgagtgatggagactagctcccagccctgcactgttccaccagattccagccctatctactactgggaggcttggctccccaaggaggaccatggcccaaggccacctggcagcctactggtctgctcccagagccaccacagccaggcctctgcggccagtgtcaacaaggggccaggccctcacatgaggcattaccatagcccgattacccccagccggaacttgaactgcagccaaggactgtaaacagtgaacaactaaacagcaatgtgttcactggggttttgtttacacacctagggtcacctgaaaacacctgctgtttaaactgagatctgcttagctgctcctgtaacaagaggaaagggagcctgtggtctctgagaggagatgagaaatctcacacacttcccagcagggctccaagggcggcccaggggcagaaactgctttcatgccagagtgacagatgagaatctttaagtctagccttcctgagtgcctgtcccaggttggctgacaccaactaactttcctcctgcttcacaaaagactgtgggcccaacaagatggcagaaaaacagaaaaccaccctc

SEQ ID NO: 34995 - DNA, 2586 bp, Homo sapiens
cctacctcaaaaaaaattaaaaagttgtggtttttggtcttcaaagtatactggaaagttgggcaagaggggtaatgctgagggtaaagctcctttgaccagggggcaaaaaaaaaaaaaaaagctccctctgcatggtttcctcgtctgctcagctcctaggagagtggccacagcatccagccagaggcaccaagccaaggtcagtgaccaggcctagagcccagagcctcctgggagggtaagtttaaatgagtaaatatggtcccacctgggtgtggccagcgacaggccagagcttcggacatgtccctcccctcccagcctacagcagaaagaaaagaagtcagacaggcacaagtgcctcccgcccccttggctatcagggtcctgtgcagaatcaatgaatgcattcccctgtctccacaccagccaggactaaccagaagcataacttggctctcaggaaagagaggcttgtagcctcagcctcaggaaaaggaaaatgtcagatgaagagggccttggggatcacctaggccaaggatctacccccagatgcctgatggcttagatgtagtcttgatgcctcacagtggccttgctcatcagggtgagcggggagggcaacagagaccagcgacaaaccaccaaaacacccaggtgttaatcaccgaaaggcgaaactctgtacatctggaaagctggggcccaagaggagggacccggggacacacggtcagtgtgaggggcagaggcaggctgtgccaggaacacagagaggggcacgtgggggaggggtaaggggcagggatggaagtcagccaaggctccttgactcacaagccatgctctttattttgcagacagggctctgcctgcccatctgtggtctaaccttaatccctcctgctccagtcagcccttctctcttcaaagttcttgctatgcccttcgccttcttgcctccggtcccctcaaccccatcccaactctccaatcctttaatcatctttgccattcactaccccccacctcccgcagtgcagcagctgctctgtgggtgtctacataccagtgtgtatgtgttgcacactttcctgcatgtgtaccactaaatgctgtggactgcattgggcatgcctgtctacatgagacccttatctagctcccactactgggggaaaggggcctaatggctatttctcccacagctccaggacaaacgcctcagaatactttcagccataagcagggagaggaaaaagaagataaatattccgagatccaaatagcaccgaccccaccaagccaaaggtcaaggcctttcctttcgggagagccactggaaaagaaagtgctttgagttcccctcctttcctatgcaaaattagagccatctctctcccccccagcttccccactgggaagttcttcctgaagtctaagctccatcctacctgctgtgatcatggatagacagagtgacatcgaccacaatacagtcagacgtccagcttctagaacacagcttctagtacctaaccgcccctccctccatgagtaagtcaccaaactgggacagaaggacagacagttggccggactccggccccatgactggctcataaaagccaccagcaattacagtgatgctgaggttgtgccggcctgccaccatttcctccttctctataaaaaagagatagttgcctcaaaccagctggcctgagagagcctcgagagtcccagccatggtcccgtgggatggggagaatcccagcaccacagtgccatgagactcagaacctgacccttgatgatgggttccaggctcacatcggatcctcatacccacttatagaacctgatgaacaccaacgatgacctgtgtccaagaggtcaaggcctgtattaagtcaaggccctcaactcctcttttccagtaaggccaccactctctcgactagaggggcaaagaagcagggggcctgactcaaatagaactagggaaatgttgggcccacccacttgctcctggacttcccttgtccccataaaggtactcaggtgtgtggcaaagtgtccaaccaagggcccacaccaggccagcgtaagtcctgagattctggatccagtgccaaccagggagagcagggggcccagctggtcaggaagagaaagttgacaaaatggggagaggtccaggcctctctgggggtataagagccagggacgaccacagcagagggaccctctgagggcacggtagaggagaagggtctgaggggctgggccataatcaatgagggcctatccccaaggcctcctcgggggccaaggcacctcccactccaagcttccttactactgctcctttagctccccccaacctgaagagtctccctctggcttctcttccctatcacatctcccaggaaagattaaaaaaaaaaaaaaaaaaaaaaaaaaccctgctacagagagattatataacagcagccagaaagactatcatatctcccagcctatgagaagaaccaggagccaagggggcagagccaggatgcccaggccctccagccc

SEQ ID NO: 34996 - DNA, 3738 bp, Homo sapiens
actggggcttccatgaacacggactgtatgtctcccttcccagaatccctccctactatgaagttgtgcctaaaagagtggaaagacgaaagctctgacacagatttgctgtgtgatctcaggtaaaaaactcaaccttttgggtccctacaggggtgagtaaaagctcctcccttcctcccttcccccctcccccccttccccccagagagaccagagacctctccctttacaaatgtacatgcacacacatacatatacacacatatgcaaacatacagggtgtgttggcgggggcaggggagttacaacaaagagaatataatcactgagacccaaaggtccaaatgcctatgctggggcaagtggggaaggagctccatataagctccagtgtcccccaatcaccccgtataaagaggtcctcagccactcccacaatagtcctaccccacccccatctcctgcccaacacactgggaaaccacaggaaggaaattcattcccaggcagggccgtgggagctgggacagccagactaagtcctggggcgggtgtgaccccgtggccacaagcgggtggacatctgtgaacactgacatgtgccttttcaatgctctcctcagctactgagaccttcctgttggggttgggagaggagtgggaggtggacagctcccaaacgccaaaacacccaatctcaggctgacctgcgctcccctcctatctccaggccagagcagcccaaggtcaccgccccagacggcaaacttcccatagtctaggctggaccctgaattgctgcggagacccactgaagggataggaggaggagtggataagggccacctccaccccaaagcaaagaaaccaggactctgaggaaaactcaaatgggggttgggcacagcaaagagggacacaggatcccccccaacccgctataccctcccccaacccatcaacaatgcaccaagcaatgggaggcagagggaggctcccattcagaagggcaaacctgggataacccggtcggtggcttctagagtgccttcctttcaggaggagtcctcggaaggctgctgagaggacagcgtgattcactagggggagggggcccctttccccatccccctaagacccgaacctggtaggagagaagctggcattggagtgggggactaaaagcattttggtctccttggcccatcctcccaaaagcccccccaaactccctaaacccccgctcgcagcccagctccgcctgccataggtggaaaggactagagaactcttgcccagatgttgaacagctgcaaacttctggccagggagttctccagttggggttactgacaaaccacatcaggggtctcggaagcggggctaggaggtctcaaggaagggtcctgcgtgcccacctcgtggcgactccgcgtcccaactccacaggcacccggcaaacacgggccccggagacacacacactcacacaccccaacccactaccccggtgtcatctgaacaacatcccccctccctcccccgcttcccaaacagctgcggctccccccgcctccaccctcccgccgccctcccaggcccccttctgcaccatttcgggccaaggaggagggaacaggcggcgagaggagggagagggagggagggccggctgttaaaatgtcagtcgctcccgactgtcaccggagaccccctcggaggatggcgccccgtcccagaccgctcggaggccgtcgtaaaccccctacacgaacaggcgggcgcgcccccaatccgcccgtccccaccccgtactcccaacacccaagggaattgcagcccactccacttgtcccccacgacagactccctgacacaaacagtcccctaggtaatccccgccaacgccacacgaaaacacggcccgcttcgcgagttcctcccggcccgggggctgccccatcccacccctcagggggacggtctagaccaccctccaccccaacccctggaccgggtgggggagggggcctcttaaagtggcaggcgcattatttttctctactcaccagcccggctgggggaacggtgttgtcacggcaaagagcgggtagccctcgcccctggtccgggggatcttcaacaccgggaagccgcagctccgggcggggagaataataaatgaggccggcgtccgcgcgggccctgggcggcgccgtgaggcctgggcccccgtcgtgggcgcgggggccagcaggcgggcggcaggcaagcggggaaccggggccgagcgcctgagccgcctcggctgttgttgatattttgcttccttcctcctttcgggctccaaaggtaactcctccagcccccgggagtcgaggccgacgtaggcacagctcagcctagcttgaggggtggggggaaaggggtgacggacaggcgtgggggccaatgggaggcacctgtgggggtggcggggcggagccggggctggggcggtcccgaggacgcggccccgcccctcgcttccccagggctggccgggccaggccgggtcggcccccaccccaccgccctcccaagctaggctgcggcgctgggagcggcggatccctccgcctgccgggagggagggaggaagggacgaagcgaggcaaagtagggaggcgagacccagaggcctttaaagggatcggtccgctcccacggtgcccctcggagcacgccggccgcccgcccgcccgcctggcgctgctgccaccgcgtgctccaggaggtcctttccggggaggccgtgcgagctgcacgcacactctcaacacgcgccacctcggcacctcctcgcggccccgggccccaggagagttgggaggtgggagtctaagtagataaattaaggggagactggaagtggtgaaaagctcccatctcccccacttggtgtgtgacaaagccccactcacgggcgacattcttggggttggggggtgttacctagggagctcagttgctccctctacctgtgacaggccccctccggtcccagggcccggctcggcagacgcccagcaatttaaagcgacagctcatagttcttgggtgacctaatctccagtgcttgcggggccccacagcacttactgccgagggggcaatttaaaggggcgggaccctaattcctccccacctcccgccgcacagtaaacacccagaaatgtcttattaaagaagcagtagtagctctttaaaattttttatttttatattcctggttgctccagggtgtggtgaatatttacgtgccctacaacaggagtgtgggtgccatgcctactggacaactgacccgtcaggcttcagcatccctgttacttccaagtcctgctgctttctcccaagagcgtaaggaaatgatggcatctggcttagatctcaaagaaccttgcagaacagaagggcactcactcagttcttcacacaccccgaatttttttttttttttttttgagacggagtctttcttcgtcgcccaggctggagtgcagtggcgcgatcttggctcactgcaacttccgcctcccaggttcaagcgattctcctgcctcgcctcccctcccgcctcccgaatagctgggacgacaggcgcacgcccccacgcccggctaattttttgtgttttagtggagatgggatttcaccgtgttacccaggctggtctcgaactcctgagctcaa

SEQ ID NO: 34997 - DNA, 3651 bp, Homo sapiens
tcagaaatttagtgtgaagattaaattagttcttctaagcagattgcttagtacagtgtcttatgctgtataataacccaaaccagaccattgggccaagggctggtctgcaaagaaccctctaggcctccattggctcatgcaagccttaaaggaggtgagttcagtggaattgctctgcaaataggttggagacttatcttgtgtgtcctaagacaggaagccagcaagctcctacttccttggcctcagtttccaacccttctacctgacccccccctttcaggaaacagtgtcccaccgtgtccccaaatacagcttctcagttcctcattggatctgggaggctggggccccaacaccagaagatgtgagttacccctgccaggcagggctagtttgcccaaaagacttcagggtaggcagggggagcccatctgcctcttcccccaaggacagagaagaacagagccctgtgccaggcttgaggctgtggcagtagcaggatgggaaagtgccaacccccctcaagtggggaacctcccctcacttgtggcctctatttttagtgcttccctaggctctagctggagaaaccgtttagtcatcagggtgtttattttccggctgtttccgacgtcaggaaagcagaatgttgagactgaagagatccaaggctgctggaaaagacttcttaggatcaggcctgggaattcagccgtcagacccctgggtcccagatcacacacacacacaaaagaaagtgggcaggggtcagccaagcccccaggagaccaagagagctgggttctcagccacctccagtttcgaggctctccaagccgaagaaccctctggctccagctctacttgaaggagtctctacaaaaactaaccaacccgagaacaaattcttgcccagggccgattcccagaaaccccctccccaacatcctttataccagcgtggtgagcctcccgccaaccacagttccaaccaatctcaagcctgaggtaggcttgccagggctatgattggctgattgatcctcccagtcttggaatgttgggtccttaacaaaggaatgaggaaggaaggtgagtcacctggggagggttttaaagggccaggagcaggagggaaaagggaaaggagggaagagctcagtgggtgagatgcagtgtgctggaccccgaagatgctgccataattccctagagaacagagtaggaaagacagacactacaagtgggatagaatttagaatatagagaaaactaaatgggagagcaaaagtaacaaacacagggccttaattcccatggaagggtaataaagggtctagggaataatgttgttggaagttagattgaaataaggacttcctgaaagtgactcactgaatctttttcttctggcccctgtatttcccattccagaatcccctgggtaggaaatacctgagcgagttcagatgcctcggtctcatttttcctcctcccactctggctacccatccatctttcctagagaaaagttacctaacaggccaaagctgctataaaatcctttaggaatcaaacacttacatgctcattgaagtcttttaaaagtgtgtgtaaactcctctccaccatatcatctttgtaagtttatatggcaaagggacatagacaactccttttgttcaccccttcccaagcatacctaatccaacttaatttgtaaaagtcttcctcatcctcatgccccaagggccgtttctctgcctgcctgtcccatagccccgggaagccattactgctgctccagcctctaatctgtctggcagcttggttggccccctctcaccttccctacagccatctggacaatctccagccccctatgtccatccacctcatcccttccattagctgataatttttcccccagttttcaattgatcccggcagtcccttcatctgccaccttgtcttgtgagaggaaaggccatcagcaggtatacagcagttctgtgtatacatgctctgtgtggacttgggtattattctgcacctgcttgtgtagtgcactctactctgtgtatctgcctcctctgtacacactcctcaccagatcctgggccccttgagggcagcaatctaactctactttgagtcttcagggccttgcaggacctggcatagaatgcgctcagcaaatgtgttaacacgaatctgtatttgtgtgtgcgtgtgtgtgtgcagctatgcatctgagttcagattataaaaacgtttattgaacatctcatttgtccattgataactgtgctagcctgaggatggggctgtggtctggcctgtcccaccaccccgcacaagtcccacttcaggccagaattgaggggaaagggcagagtcaggcagagaggtgtcaggctgaaccggcagagttgtgccccaagctcagggccagggtgcctggggccaggcctggggcaaagggcagacggcccaccctggagctgaagcgggcagggagggggtgccaaagccgggtcctcggtcagtgcatcacccccacagaagctccctgcccccggctgggcaggatgtggtggcagctgcaggagagtgggcaggatgtgggggtgggggcagctgaaacacagcctgacagtcgtctccccaccagctcctccctccttctctcttgccccccccacatccgccccctcccggtcacgtgctcccagccagggcaccgacggactatttccccctttccgcggaaggacataattgtcatcgcaaactctagtcgccgccgacttcagctgtaccacgcctttttcttgccccataacccaggacagaaagtttgccgaatacgcatttctttaaagccctgatcgctaacgagggagtggcccctttaaatgcaaattaaccgccttctctctcgcccccccacccccatcccaacttcgctcctcgtgcccagactccaccagctgccattgacgtcacgcgtgcgtcagcgtcgccagcccaaccagacggcacatggggggaagaaggcagacttaaagggccagacgctcgcggcctgccaggttttggctatgagacttggcttgggaggaacgaaatgggatgtggggaaatgtcttggagcagaaaggaatgcagggtagagccgggcgcggtggctcacgcctgcaatcccatcactttgggaggccgaggcgggcggatcacgaggtcaggagttcgagaccagtctggccaatatggtgaatccccgtctctactaaaaatacaaaaattagcctggcgtggtggcgcgcgcctgtagtcctagctactcgggaggctgaggcagaaggatcgcttgagcccgggaggcagaggttgcagtgagccgagattgtgccactgcaccccagcctgggcgacagggcgagactccatctcaaaaacaagaaaaaggaaatgcagggtagacgtttagaaggacttcccagagtaggagagtatatttgctcatgggagagaaacccaggagcaggaggagcagaaccactgtgaaagtggaggcttggcatttaagactcgcccagtcataatttcagcctttcccttatccctgccccgcatgtgcat

SEQ ID NO: 34998 - DNA, 1441 bp, Homo sapiens
tagctattatctcagtaaaggggttaagcatgactcgggaagtacagcatgataccctggtaaaacagaggtaggggaagctaatgtagtgtagagggggcctaagttacataggcttggtggtgtaaataagaacagtagcttaatttctataccacgccctctgcgacggtttgcaggcattagcacctatggaagtatgtactcgtttccctgttgtataggcgaaaaactgacaccagcagttcccacattcactcagccactaagcagtggggcaggaatcaaggctaactgctatgccatccatacacctttctgaaagagttacaaaatcagcacttattatcaaagggccgttgggagcaaggcatttcggcgtatctggaaatgtgtggcgatctgtaaacgctcctgaggagagctggaatcccaagtggaagggaagctggaccgggtgggaactgctccccagcccaagggctgctagaaccccaagactccagccccgagcggcttccggaatccgcgcgtgctggcccggcctcttcgggggcggggcgagcgccgcacatgcgccggggccgggccgggccgggggcgcgcgctctgcgagctggatgtccaggctgcgggcgctgctgggcctcgggctgctggttgcgggctcgcgcgtgccgcggatcaaaagccagaccatcgcctgtcgctcgggacccacctggtggggaccgcagcggctgaactcgggtggccgctgggactcagaggtcatggcgagcacggtggtgaagtacctgaggtaggcacgggtctcgggtggcctgctctgccccggggcggggcctgggacggccgggccacctgcgcgacagagaacacgaggggcgggactcaggccgcgggttttcctcagccaggaggaggcccaggccgtggaccaggagctatttaacgaataccagttcagcgtggaccaacttatggaactggccgggctgagctgtgctacagccatcgccaaggtcagtggcacaactctcgacctttgggagcagccagggaggagtcactgtcccagccccctggcctaggcacaaaggggtgggagagacagctgggccaatatggtctattaccgcctgaaaccccgccgaaccacccttgactctgccttcaggcatatccccccacgtccatgtccaggagcccccctactgtcctggtcatctgtggcccggggaataatggaggagatggtctggtctgtgctcgacacctcaaactctttgtgagtatgtggggaggggctgtgggggaggagggcgtgagggctctgggatctggggttgaattaccactttcttcctagggctacgagccaaccatctattaccccaaaaggcctaacaagcccctcttcactgcattggtgacccag

SEQ ID NO: 34999 - DNA, 1652 bp, Homo sapiens
ggagtacagtggtgcgatcttggctcactgcaacctccacctcccagcttcaagcgattctcctgtctcagcctccgagtagctgggactacaaggctcatgccaccatgcccggctaatttttgtatttttagtagagatagggtttccccatattggccaggggctggtctcgaactcctgacctctggtgatccacctgactcgacctaccaaagtgctgggattacaggcgtgagccaaggcacccggccaaaaactgatgttcttcatcactacactcttcagtctcttacagctctttgtgctttctcctgtaagaccacacacagcctaacccttgtcgcaataattgaaaactacatgccctggaagttaagagaccggctttattccgccactccagagcacgtaacgcggcgccagaactcaagaatacattcagtcgttatttgttgaactgaatggcatagttaggaatggctttaccggattttcagtggataactgggtagaagctgtgcgccccagtctttctgaaacctgtgatcacacttcgggcactgtcccctctacagtcaatctgtgttttcagaagtggccccaggttcactcgtcttacagcagtcctaaagagccggctgccctttccctaggcttccttgctcttgagggctaaattccagccctcctaccccagtgccacttgggtaaaaatactctgctcctctcacgtttgctaataagcccgggctccgactaccaccgttcgggggaagggagccccttaccgtcattgctgggtccgctccgcggaaacatgtgccggacctgacttgtgcgccgccatcttcccggaaatgccgttttgttccttctaggctgtcgaaaccatagagacgtccgcgggaaccaaaatcacggtttttccaggagaaaccattgcggagcccaatttgccggtatggttgccatagaaactgggacctggagcgtgcccattttcggaggttccgaggctgttccacttgcctcatccctgcaatccttgagcagccaagggacttcagtactaactggccctctcaggatgccaagaacggctccgcgtcctacactgagctagtcccgggcgcaaatacgaggaaggaaaactccagggaagcattgagagtagcctgagaaattcgtggaggcagagtaggtgatagctgtgtcctgatttttcagggttgaatactcatgaatactcagccttcacaggaacagttatttatgaaagcctagagactagacatctcaataggttcatcaagcactttttttttttttctgagacagggtctcgctctgttgcccagacttgagggcagtggcgcgatatcgactcactcactgtaacctccgcctcctgggctcaagtgatcctcccatctcagcctcgtgagtatctggtaccacagtcatgcaccgccacgcctggctaatttctgtattttttttgtagagaaggggtcttgccatgttgtacaggctggtctccaatccctggccttaagtgatatgcacacctcggcttcccaaagtgttgggattacaggcgtaagccaccgtgaccggcctcatcaaacactttttgactcaccattgtg

SEQ ID NO: 35000 - DNA, 1930 bp, Homo sapiens
gccggccttccctcatgggggtgtgagagtgagggtgatgggagagctccgctggcactgcagcatgtctgggggttaggccgcaggaaggtttacgtccagcagaggaggcagagatgcaagaaatagggaaacaaactaagggccaaggggaggttcccagccctgcggtggactgggcttcggggaacgaactgggggcccgcacaggcagcggccagcagagggcgccgcggacccagcacggtgctctgagagtgccgtgtacgcgtgcgccggtggagacgggcagaggggtgcgaggagccccaggatcccgctagggggcgccgcggacttgcgtcctgaggaggcgggaggggaaggggggtggctggctatgtgggggggttagacttccggccaggctgatctggccctgggggctgtgagtcagcggaggttgagaggatgaggtcactcagagaactggagagtgacccagcgcccgcgtgtgcctgtgtgtgtgtgtgtgtgtacgcgtgcgtgtgtgtacgcgcatgcgtgtgtgtgagtgtgcacccttctcccagtgcacagaattgttggtgaagtgcatgtcaggatgcagtctgtcctcatgatgaggatgaatcattgctgcagatcctcaggcacacacggtcacacataggcacacacgtgcacactgtcgtgtgtacacactcctgcatgtgcccacttagttacagcacatcacccacatgggcaatacttattccttctctgaagccagtaaaatccagagacagggagacagatccggaggagcaaaggctgatagtaatacggggagacccagagatagtgggcaagacaggcagacacaagttcaatacagctctgtgttggtgggagctggggctctcctaggccatccctgcccagctcctgggccttccccaccctatttctaaacttgaaaccagctggtctctgatataccagtgtgacctcccacacccacctaccaccacattcctccctcaccccaggcctcacctcccccaccttctgccccccacacaactctgccctgcgtggctagggagcaggggcttctgtttcttaaggagctatagggaagaggatgattctggggccagagtagatcctcactgtatcctgtattaccctgtgattgtccagtcaatgcatttttagggctctcgggggcatttaggtggaactgtgagtggatgaagatcaaggtgggcctttgaaagtagggcctgaagaggagaaggctggggaggggcagtgtctgtccctgggctcttacgggaggttccctgaggtggagtttagatagtatattggattccccagagagcccatggtggtgagctggaaggggctttggtttcccatcaaggcattctcaccaactctccccaagagcggcaggagggctccatcatcttctctgatgtattgatcaggagagctccagaggtagacaggctgaagctggaatactgccctgtccctgacacctgctggggtgttctggcggggcccggaaacggaagccctctcctggctttgttgggtttcctggggaaggcggagctggtccacgggtgactcagcgtcctgcacagagtccaacccctggcccagtccgtgtgtgtgtgtgtgtgtgtgtgtgtgtgtgtgtgtcctatcctggccttgggcaggaggaattggcccctcatagagtgtcagccccatctctggggatgtggagtaggggccacatctgtgtctgcctctgcctccagggcacagcactaatctaacgatgtgctcgcccctgccaagcccctgcatgtgtggttaagctctcagcctccttcccacgtctaaacaggggtcccttcgcagagttttcagtttcctgggaatg

SEQ ID NO: 35001 - DNA, 607 bp, Homo sapiens
gtttttgtttttcgtttttgaaatagcaaatgctcctcctcctgaaatactggagagagtactacagcattgcagaaagaagctagagagacgctgcctggaaaacaagaacaaatgtctgatattaggacacacggatacacacacacacacacacacacacacacacgcacacacgctattgcctgagtctccatcagaaaagggagcgaccaggttaagggccgtcatgggcttaagaacgtttgtccatccttcctacaagtcttctgtataactgcgaggttcaaacatccgctttaggaagttctgttcttggggaagggccccttctcccgcaccccctgccagggaatgttgggtagtggacgccctctggcggctttcagaagtggaagcagcaggaagaggccattcttttccttcctaacgactagcccaagtttatccagcctttatgatgtgcccagtcgtgttccaatattttacttccatgatctgacttaatcttcaaaacaaccttttaaagattctacagtttatgaagtagagagctcaccaagggtgagagtagtagggaaggctttctggacggagtgcatccttg

SEQ ID NO: 35002 - DNA, 2184 bp, Homo sapiens
tcccctttctttgaaggttcagagtgcaacttaggcgccttgctagggggttggttctttttactcagaaagcctctccgttctaagagcctccgcttcttgacaaaatttcggtgcttggcatttccttctaatgcctttttgggaggaggttccccaaaatccagattgagcagtaaagtagacatagggacaatggaaggcggaagagtagttgggaagagtggcttatggatgaaaagaggatgtgggactcattctctgctgaatcctactgtccaacatgtggaggtctgtagtacaccctggggaagaaagtgatcctggtaattgagctcctaggcctgggagaaaaatgaggtaagctcgatctccgtaggacttatggaaggaaagacatcagagcaatctctcagacagaggggaaatgaaaacataacatgaaatgatggagggagcattggtgttagccagcaagcctggattctagtgaagcccaattcaccagccatttggtcttagtaaggtcattaccgcgctctaggtttgagtctcatttgtaaaatgaagggagtggaggggcttatagagctcgaaccctctgagtctaagaggctagaacacgtgcgatctatactccgcctaggaaaggaacatctaggtatgctcaaaaacagtgagaagtatggcgtagataacctctgggctacccaggcatccgcagcgtggaccaccaatagagacacaaatccaggcatccctttcccttggctccaggccggaattgggggcaatctccgcatgcatctcacccaagtccttctcccacgcaaggaccttgacaccatctaccagcgcgggggtgggatcgaggcttgaggcagcccacctggataagcatacttcggatccccgcggtacagatcgatctctcacgctcacaaacctacctcccagacgggtccagctaagaccggaagcgtccggagccggatgcggaaatcggtgcgcgccgacgaagcccgggaaggcaggcgcgcgggttagaacgcgccagaggtcggcgcgcgcacacccgcaccgccccgaccccaggtagtgaggccagtgattccgagtgtgtgaggagcggcagtggcggcggaggagggggcggcgtgggtgggggcgggggcgggatgcgctccccggcccctctagccccgtggtggtacaacgcgaaggtgtgggaaggccgcgataaaccggaactgcagcccgccggacacctccggcttcacttccgtaagaggagaggagtgtacggcaaggggcgggaactggaacttggcccgcctcgttgtgagctgagctcagcggcacgcttttgtggcgtcactgcactgttaccccgccctacgtgtctctgacgctgacaccttctcactgtgaaacgtcgcgacctgtgacgtctggggggcgcctcaaatcttccactccagcatcggatcccggaaaggcagcgtcggagactggacccaaaactcttcctgttctgcctgcagagttgagccccgtccgggtcctggacccgcgtagtactgaccctggatccctgttcactgcgttctcgctccccgcgctccctgctggaccccgggatgccgggcatctccgcccgaggcctctctcatgaggggaggaagcagctagctgttaacctcacccgtgtcctggcactctaccgttccatcttggatgcctacatcatcgtgaggccacaggggcgtgggtgggatgtctctggtcgtgtggttggctaggtgcccacgtcagggagagaatctggagaattagcctctgatctctttccttctatgagtttcagtctttttctgtacaagaaggggttaaaactggagtgatccctccttttttttcagctgacataaataatatttctttttttttctttttctttttttttttctttttttttttgagacggagtctcgctctgtcccccaggctggagtgcagtggcacgatctcggctcactgcataaataatatttctagtacctacctagattgtttttgtaatcttcccagatccaaggtaataaaatgcgtggacattggaaccatgctgcaactatgttgaactcttcttggagcatgtcaggtgttccaagaacacacgtt

SEQ ID NO: 35003 - DNA, 1992 bp, Homo sapiens
acctcaggtgatccatctgccttggcctcccagagtactgggattacaggtgtgagccaccacgcccatccagcaatttaacttttgaatttcagtttcatcatccataaacatttacagggttgtgggtgtcatttaaattattttaaatattttaacaaagcaaggtgcaaaataatgtattattatccctgtggggtaaatatacaaatatatattccagcacagttatatttatggaaaggaaacaagaaaccaaagtacttgtttaaggggagaggaactgtttgggaggtctgttaattccattttgttccttcccgtaacgtttgcattttctaaccatgtgcatttaaaaatatgtattaacggtttatctgaacagtgagatactggctcatttttcttctttatacttctcagtataaaggcctgatgttattttcggaaaaagaaacaaaaacaaacaaaaaaaaaccccacctgttattttcaattaatgctgactggcctaagtgttcctgtgagtattcaacaaatgcttagagaggactactatatgacaaacctaatgctgggaatttcattgccggcatttggtcttcacattgcccagtgaggaaggtgaggttgccagatgcatcgtaaagtcccttttacagacaaggaaatcaaggccctgaaagccggagtgactaccctggttcatacagcttgactaggagcagggccaatcttaagacccgagccttctgtgtgattgctgcaaggagccccttcacctcagtcaatccaggtctgaaccaccccagcccagagcagcttgcatgcccccgagatccttcccttctttcccttcacaatctggagatgctgctggtgagcgtcccgcagtggggttttccctgcatgttctgaaggcgcagtgcaatgtagtggggtcgaaggtctgccctctcaggtcacggctccaaaggcttcccccaccagcctcatcccagacatcgccaaggcctagctgtcttcagcacccacccgctccaaacttccggtgcaaataaaccctggggaggcgactgagccatggccagggaaaaggataggctcttcccgcacctgcctctcggacgggcacctctagggcgggcggccctcacctccactttccgcggcacttcggattttcagcacatgggccctcagcgtcccctcccccgccacgcccgtcgactttctgggagttgtagtccaagtgtaaaacggaagctcaaccacgaatcttacctctcagcatgctgggagttgtagtccgccgctagaaagctggaaacaggaagtttggcgggggtaggaaatcaaggaaaccggaacacaccatgaagcatgtcgggaatcgaaaggcaagctggttcggctggcccgcctggcacattcccgcgcatgctctgcgtggaggccgctgggaattgtagtttctagagaagaaggctccattttctaggtggttgtggcttcctgttcaaggcaaagggccgccctttccagacagggctaccgccaatgctctccctgtccttctctgctggagtgggggcagggcagattcaaaaactgccggtaggctttctagaggaagggatgaaacgtgggcccttccaatgctagtagccgatctagttacaaaatgtcagatctggaaggaaacagaaatgatctaaaccagtcattccacttaactcagggagtactggcggaatttcaccctaccaaccccctccccctaccaccccatcaccagctaagggtggcaggtacccctagcattagcaaggagaaagggttatcctattatttgacttgcactttggggtcaaattgtttatacaaccagcctccaaactcccacttcatggccatcttgggctgtggccgatactcgcatcctcccacaccccacttcttgtgcaaacccttttttaaaaaaaactttcc

SEQ ID NO: 35004 - DNA, 6864 bp, Homo sapiens
acttggcatgtggtacatcctacacgtctttgctttcatcagcctctcccagtacactgtcttttctgctctgaccatggttcttgcagtctctaatactcactcactcctgatcatccttatagcctcagctccgccattacttcctccagaaagcttccctatcactcctggcctggccgactccctaggtaaaactctttcctaagacttcccctttacagtgctttcccagttctaattttacactgattcacattattatttaacatctatgtgcactatctggactagaccagccccaaggtcagagaccagctctgcttttatctgcagcacggtgcttagcatacagtaggtatataattatttactgaatgaatttaccaaacagctaaaaggaagctgctctggctgaagtggaggggtgaggtcaaagggctgcctatccaacgcccgccaaaaggcttctagggaactctgaaaggcacatagtcaaactctcattttacagatgaggaaactgagcccagaaaacaagtgatttgcccaaaataacatagcaagttgttgagggccaggtctcaggtcacctgactaaatcccccgccccacgtgtccccgtggtgagaagcgctgtggtgaaggtgagaggtgcagaaatctgaggtcagggaatccagaggcagtggcctcgccagcctctcccagatcaggcctggaagcccaggccaagctgagccaggggtgggtcgtgggggaaggtggggcgggtggggactacaactcccagcagcacttgcagcagccccagcagccaggcttcccgccggacagaggccaggtggccatgatgactggggccccaggcgcaaacaggagagacagaaaggccaaggcagtgattaacacacagagacagggacagagggcccaactgggggcctggggagacagggtggatgggaatgcgctgagacacacccaggagaaggggtggggccctgggcatgaatctgaggggcatcttgctccagacttggaatcttcaggcttttgggcacctccccgcttgccccgtggcctctggggacagaggtccagcccttcccccccaggaaggcccagcacaaactgggcccttcccacaaccaggagacgctgggtgtgagagcagggggtggaaaggcacgcagttccccctacaaacacgatccccatcgccatgacaacgcaaccccgcccccggggccactcagcaaccaggaatgtgaccgcccctcccccctcccccccgcccccccccccccgccccgccgccttctctccggattggggaggaagggacactaacacaccccacccccaagcctgcagtctggcacctgggtccccggctgtgctggaaaccacagctagggctggattaccgctgcagggggtacggggcgaaagggggcgtccttctcaggaagccagacctggagcagggacagaggagtcggtcctcagccaggacgcctgggtcctgttaccagctagctcccatcctcctcttaacagggggaagcaaaaaacaaaacgagcgcccccaggggttagagatcccaggagacaggcataggacaataatagcaaacgcctttcctaggcctttcttctgtggatctgtgtgcacccagaaccaggggtgggggtggggactgaagggtctaaggctgggacttagagctctgtattttcagtgcccacacctgagccagggcattaagatgcccacagtaaatgcgtgatggaagaggagaaactgaggcttcataagagggtgtgtgtgggtgaaagttcagaaataaggagaaatgaggttctttgcagaagcacagactgcaaagtggctacctggccaccgtctcgtgccaccccagcttcccatggaaagcacactcagaggcagatagctgaatggtgtggcaggggacccaggaggccaccagctgcccagccccagcagtgggggagaaacaaaagaacgaatgggattaaaaatagcatgaggcacaccagatatgccagccctgctgacttctagctacataaaggatgggtctagagggaagagagaggaagacaggggcctgagcagataggcatctccccccaaagcatcatcccacctggctccctcacctagagtataggcacttgtggggaagggccaggggaggtgtgctcttctcacttgatggaatttctaacccttcacccaaaagaggagaaatcccttctacagtgacacctctatccctcaagctacaaagaaaatgtcctttcttacatttggaagtggagggcagttcttcctagatgtagaggttatgaggtctcagggcagccctgtaccccaatacagacatctgtcttccaggtggtgcctttgtatccaggctgtgactcaaaacaagtgagtcaaggctaactgggtcagggtggggccaaatagtgctggggaccccacggtaccccctccactagccagcaataggggaactcggctacctcttaaccattccagatccaggcaagttacttattcttaggccttgcatttgcccgattccatcagacaggcctgagcacatgaaacaccagcctcccaagccacagacaccctctgaggtccaaagagtaatccgaagttttcaggtagagtggggaaagagaactgaacacctctcccccagcctcagactaaaaacagacccagcacttaggaaggcagcagggaaggctaagcacacactggctaccagccagggttctgaccaccacacccagggctgaggcctaacctgacccaggaaccggaaaatctggggcaggagacagttggggccaggaaagtgtggcaagcccaagaggcagaaaagagaaggtacagggggaaggggcaccgggaggaaagacgggtgaggtcctggctgcccaggttttctgggattgtgaaacaggaagcagcaaaagcagaaagggatcaggggggaaaatccctgaagtcttggaggttaattgttaagaacttggagatcccccaggaagttaggcaggcggaagagggaaaggagaaggttaagatggagtcacaccatccttccaggcaggtcctgcctatcacgtggcccctctggctgggctctctctcaagcactgggaccttctagtttcacccagaatcacccaccctccccagcagcagggactgaggaaggaaaatccacacacgggccttctttatggctgaagatttgggtttcctatgagatggacgagtcagtgaggttccctcttacttctcatccatctcaggaagggcccctcaggctctgcctctctagggactaagacacggtccaaggaatggtgaggagactcgaggtctgttcttttggagtacaaggggactgtgtctgggaggtaacagccttgggtgtagccatccctgcaagtatcacaatcaagagccagagacaggcaaagtgtggggccccacctctttgagatccaggctgatctccctaccccagttctaactttatctaaaaggtccaggcctcaacagaggaagaaacgctgcctcccctgtccttcccttctgtcctggaggcccaaagtggagagaaaatggatgggatccctagtcctagggactgcccttactccaaaggccaccagaaacttgaggtcttcctcacaggggccagtgtgggtcctgctgtgtccctgccccttttctctcttaccggatgcagaaggggttccctgcaacccacattccagctaacacccactccccaagggcttagtccagcctctggactttgtcccaccctcaggaggtaggaacagtagagacctgggttcagttcttgtcctacccaccagggccttggcatctgggccaagaagccagctgggtcaaagggtgcagggtaaagtacaggagagttgtaacgcagagagtcccgcttctctttgtacttcactcccaatagcggaagccggtcctcatttgatccatctgaaagtttcacggaaccaggagctcaaggcatgtgggattaggcacactcctgaggagtgggtacagagcgaggaagggtctctgagttttctgagtggccccaaagttggcctgataccctgaataagcctgggccagacagacacagacttacactgagaagagcaccccaaagatatgcagtccttctgcccttggattttactctacaggagtcctacactctaggatactgagtcatgccctcgcccaaaaccaaaggcccctctacaccaactttaagttgccaaatgcactgcccccgcatcccccctcctttcctccagcaactggcaacctcccatcctccttacttaacctgtctcagtccttaggggaaacatgatgagcacaccaggcttggctgcagggccccaccctcccacctggccaggtgctggggttgtggggggggctcatactggctggctgaattaaccacatggcagagactgggccgttctggcggaagatcttcacatctgagcgggggaaggaacttgggctcccctaacccctactaagaggcagtctgtactggacttcctaataccacaagggaatctgccacctcaatcctaaatttgagttggcagcatatggaggaatatttctgtggagctgagggctgatgggttctgacggataatttccaagccaggtagatccccttacgccgcccccaacgatccttcgacctttccaactttagacctcttacagatgccccaaaccaaagtttcctagaagcgaactccgcctccatctagccctctccgggttgggatccttcttaaccatttatccacgaagagaagagtttgaattaggggcgacaatccacgaacaaactaggggtctctaagggggtcttaaagggggtggcggcggcgcctggggtcgggggaaggaataacacgactggcccaaagccagacttcgcgctcgaaacctctgggagtatgggggctgggggcggaactgagcacgcggagctgggggccgggaagtgaccggcgccctcggatccccacgccgtgaacacgccactacgcgcggacgccgtgcccgccaggtgtctacccccacccccgcccgcctccaccattatataaccggcgggtgggcttggaagcgacagagaaagagccggagacctacaagccccctgcccccacctctgcccgctccgcgcggagcgctcgtgcccttcccggtgttatgcaacccaagcccgcagggggttagggggcggcgggccgcgctgctcacccgggccggccagtgtgggtagcccttcatcttggcgaacaccaggtccccgcatttgtactccttctgccggttggatcgcgacatggcggggctccgggcgccccgggctccgcgccgggccgggaagcgcgagcccaagtttgcgcgtgcggcggtggcggcgccgctccgctccggccctcgcgcggcccccgcctcgatggtggcccccggcccgagctccggcgcggccacggcgtctccgcccgcgcgccgcacggacggggcgggcgcggatcggggcaaggctccggcgcggtgggtgcgcgctcgtgcagttgtttgtgtttgaaattcaattgctccctcctctgcgcgaggcctcttcctccaccccccgcccggtccccactcctcctcctccctcctcccggacccactcctcctcctccccccgccccccaacctcgcgctccctcccgcggcggtttgatgcgtgcagcttcttgacgcccagggcctgccacggcccaacgcccaacccggagccgcctgacggcgcgtggcggcacaggcataaggagccgatcgccgagcacgccgagcaggctttgtgtgcccgcggtcggtgggtgcccgcccgcccgggaggagctggcgcccggctggacggagcggcccccgcccttcccccgactccgcggagcgctcaccaccgcggccccagcgcagttaagtgtggacgtctgtacacggtttccgcctgccctctgctccatctcaatccacaaatatttactgggcacccgcggttcttggcagcgtgctaggcgccgagggcgagaggagtgggcgccgtgccgctccgcgcactggggtcctctctggacctcgccgtgcttaccgtatggggggtggccctggaaacgtcggggatttgagccctacgtccgcctttgctaaggaggaaacgcttgagtttggtagccaggagatggccaaggagttgaggcacaaattggccaccttccgggtgcattcgatctcgtttctctaagctactgtcttgccaaggagacttggactcaacggctagctaaccccgcaaagatgagctcagttctagtcggttacggtagaatgccaataaacccaaccccttcagtaaactgtgaagaccgaggggccaggtgctacctcttttcggaggtggggaggggggtctgggaaggcttcacaaaggtgatgactgaactgggcattaaagaatgagtagaattttgccaaattctgcgagactacattttggcctaggttatatgctaagaagtgatagaaccaaaacttgaactcaggtctcttccattaagctaaataagactttattgtaattacatctttgatttgctgtcactgtatttgcccacattccagacacctatgttcccttagaaataagatatttggatcttatgttacggcatatacacgtc

SEQ ID NO: 35005 - DNA, 2277 bp, Homo sapiens
cacacacatacagggcagacaagtagagggcactcagtcacaggcagacaggaagggggcagagatgggtaaacaagaaaaggatacaaaatcacaagcggacagggaaggactggcgcacagcagatcatcacaagcagacataaatgggctggacaaggactcctataaacatggatggaaaggaagggcacttacagagacagatgtaagaaagtcacatacaaagccataagaagcagcactcacagacgtaaaggaatgtaaaggacatctgcaaatggataggtgggaggcacagccaggtaggacggactcaagtgattcctcagaacggtcgccctttaccccactgagctgagaagggattaacctcaagtacctggcccggattgtcagagccttgcccatctttgtctcactggttgctgcagagggaggccaggccccaggctccagggtaaggtgtgttcctggatgtgcaccccgatcctggtgagggagatcacctcctcccttttacgtcacatttatttcaactcttagatgcttattattagacctgcagcctcgcttctttctggcttgcagcccaatttcgtacgggtcccttgggcccttgctctttttgggatgttttattctaattcccagtcccagccgactgggaagcttcaccagttcatttacagatcactttgcctttaagcaattttcctcaatccgccagcttcccagactccctttcgttcccgacatcacttgcagtttctaagagcatcatatctcccagaaatcttagtggccaaggggctaccctagggaacttcaagtaccgaaatgctctcctgtccgtctcagtgactgccgtggtgaccggtggggcttgtagtcacctcggaattgttaggcgacgaaaaaaactactcaccccaggtgtccctgcgtcagaggcgggtttctctcctgtctccctttgctcgcccctaaatccttcctcggactccaactcccgccgtgccttgcgctgagatccctgcggcaaagaaccgggctgtgtccaaagtgttctctggaagttgtagttcctgtattggtgaggcaaggaggaggcggagtgactcggcggccattagctgtgtgtagttgcccgggactaggagcttaagtgaagaggtacgccttgttcggtggaaatcagccgtagccatgagtttctgccggggctagccctagagtacggagcaggcggacttttcggttccccgccccgccaggtggcggggcctactaggcctccgggcatccccggtctcaagtaggcctcatctgccggcaagggcgcccgaaacgcgggaggcgccatgtcgctggttgcttacgccagcagcgatgagagcgagccggatgaggctgagcccgagccggaggaagaggaggcggtggctcctacatctgggcccgctttagggggcttgttcgcttctctccctgcgcccaagggtccggccttgctgcctccgccccctcagatgctggcgccagcctttcccccgccgctgttgcttcccccacccaccggagaccccaggcttcagcctcctccccccttgcccttcggcctgggaggcttccccccacctccaggcgtgagcccggctgaagcggcgggagttggggagggactgggattggggttgccctcgccccgaggccctggcctcaatctgccccctccaattggcggtgccggtcccccgctggggcttcccaagccaaagaagaggaaagagcccgtgaagatcgcggcgccggagttgcataagggagatgtgagtatccggggaaggcacccccaaactgtccatcgggtttgagtcggctgtaggagggacatgtggagatttcagaactccttcctacaaacgcatccgtggattcaaggccactggaatcctcttataatgcgattaattgagctgaagttggtcaacttgggggagtttgggtgtttgcccatgtgggtttcctgaagctgggcttgcctgcagaaggccacatgtcatcatcacctggtactgacaggcctagggacacttggatccgctcccccttctttgcatcttcacttcagtccggctttttcccctttcctcctactgagaacaggatgaaatctggcacctgaagaatgacaggagacagggctcctgaacctttgccgaacatctgggacaaatcttttccttgcctctgaactcaaaagcatcaggcctg

SEQ ID NO: 35006 - DNA, 949 bp, Homo sapiens
ggcaggcccacaggcaggcaccctggaagtagaggtggcggcaagctacacaggcacgagggtcttctggctggctgcagccccccaggcattcggtgtggcagcactcgcccctcgctgtgcaagccatcccatgggggcaggggcacactgtggggagagtggtgtgttagacgttggccatgccccctcagtcctggctgtccttccaatgctggccccaccctgtttctcttgggatgacactcaatctgcacccaggtccctcccattcagatgacactggttgccgactctgttcccctccgatgggattcttgaggacaaggactgtggccgtctgtggctccccacctcccacagtgcctagtcgggggtgtcagagctcaggacagagcagtgaccttgtccatcagggttgttgctctccagcctgctgtcctgtctatcctatctaggcctggtgcccagatcatggctgggcatggtgccagggtgagcgggccagcctctcctgagcagctaggcccaggggcctgggagtgtgtgcagggaggggccgacatctgtcgttttacccatgctcctgcccataccgcccccacctcagctccctgccctgggcaggaggtggctccaagcagcagtgggagggtttggagctggaggcccaatcgcctagaaactgcacagtggtagctggctggctatgggagcgatctgtggggtaggggtcagccaggtcgtgttgacactgtacatgagaggatgcgcagcagctgtgtttacagccaacagggaggcatcagggaggtggggtgcagccgatacagcagggatcttgttactctcccgcccgccctgctgctgaggcgctgggggtgagaggagctgacctccaggagctgagtggaaaagaccaccaggttgggggaccccagatctgctc

SEQ ID NO: 35007 - DNA, 424 bp, Homo sapiens
attggctatcggcactggcaaaaaggcaaggagcaccaccacctggctgtggcttacagcagcgggcgcctggacggctccgagtatgtcatgccaggtgagctggcacagggcctggggcacagatgagtggctggctcataggcacaagagtggatgctgggcatgacccaaagggaagatgaggagtggggaggagggaggaagggaggtcagggaggccaaagtactgatctccggggacaaaacagctctcttggactcctgcccatcgctgagctcaccctgtgcttgtgtctgtcatgcagatgtccctccgagctacagtcactactactccaaccccagctaccacaccctgtcgcagtgctccccaaaccccccaccccctaacaaggtcagtgccgggggagggggtgcactg

SEQ ID NO: 35008 - DNA, 1935 bp, Homo sapiens
gaaaggaaaaaaaaaaggattaataaatccgaaatggcacttggaaaaattctttcggctgatttgtacagtaaaataataaataaaaccatacaatagtatgtacacaacagcactccttccaagtccagtgcaaccctgggaaccaaaatttatggacttccttaaaaaaaaaaaagcttttacattaaatgttttgaaattcttaaatgagccaattgcaccaaaaaaaaaaataaaataaaaatcaaagaacacctgaaatgcaatgctttttacctttaagatggtagtaatgataacaaaccagagataatctctgaaaatattctctccttttctttttcctttaaacttgcaggttcctccacctaccccagcctgattctcagacccagcctacgttcggcctttttctgaaagacaatttcctgagttagttctgctgttgggctcctccacatccaggctccgaaattttctcttgcctcagcctccatgaaacggagatttcgcttcctcccgttcccccttctctctccctctctctcgcccggccagaaagacggctcccttattattcgttcggattattattgtggatttgagttcgaggtgggtttttcttccacaccagactcctggaaaatccgatcgcctgtctcctctcggcctctccttgcctccctttccgcccctcgcctaatctcgcaggcaggagcccgcagtgcctcgcgcaggacgcccggccgggcctcgggctcccggcgccgctcgccccgcgcccgaccgccgtgttccggccttcgcggccgctcgggacgccaggctcggcgcacagggaaggctgcggcggctgcggcaggccggcacgagcgggcgtccgactgccggcgtcgcggccgcgctcgcctccttccgggccccttccccctcggttcgccgctcgctcgggcgcaggcccggccggccgccccccttccctccctccttccctgcgagcctttctccttccctcgctcccgcggggcggggccgcaggctcctcctcctcgctgcgctgcccgccgcccgccggcctttcccctcacgccgcggcggccgggggcgggggcgggaagctgaccgcctttccctgcctcggttcccgcggccgcgactcccgccgaccggcccgcccctgtcccggcctccctgcgcgccctgccccccacaaccctttgccgtcgctcctcggccggtcccctctgcggcccctcagtcgccggccctgcccctcggcgcggcctagcgggttcccatctcagccggatccccggcccggcccgcgggcgaccccggccctgaccccgccaggcaccgcgcgccgtccccgccgccgccaccgccaccgccacccctgccgccttttcgccgcttttcctcggctgcttttcccccttttattgacttctgctcgggagccgacctttgtttcctaccccctgcccgcccagccaccgtgcccgcgccccgtgcccctgcccacgggtgcaggtttacctctttgcgtccaccggcattaccccggcgcccgcagctgcggctcaccctctctccacctctcttctgatcttatttttcaaacatttgttgcggcctccttcgtggtgtcagttcttttaactgtttcctcccgtttctgtggtccttcccacttctaataccaccgacttagggggaagacccttcgctgtttcctctcgggttgggttgggcatcttaatagcaggctgtgtgaagtgtctttgaactctatggaagagcctttccagagcaattctattttcataaccccctctcatagaatcacagtttctaaatctttacaagtaacgtgacatttgtcagaaggtgccgagcgttatgattaaaaatcattaaggccgaggcggg

SEQ ID NO: 35009 - DNA, 2356 bp, Homo sapiens
attccttatcttggaaatttcacctaacctaggatttctctagatcttttgaatattttttctcaccaaacacattaaggagaccagcaagtgtcagtctacaaaactactagcggccgaggacaagataaacaccccaaaggaaggagcagacaaggaaaaacacacacacacacacacacacacacacacactctcacacacacacgagatacataataacgaggcaccggggctgaggcaggagcttcctcttccaccttagtgacaatgagggaggaaaaacacgaatttccccactgctccaggaagctgccctggactcttaactcctaggatgcgctgtcagatcgcgaggccttttaccctgccacagaactccctccaaccatcacgaccctggggtccaaatcccgttgcaacgataacctgacaaggaaaccctctcttgacactccagctctccaattttccccataaaagtccctttcccaggagccctggggcgcctctgcacgcctttcgcatattcactgcaaggacacttccatccaagtagggccactcgtctcaactctgcaaaccacaggacccctgcccttcctctgatcgcgaccactccccgaagagtgaggcatgcacagtctggcgctgcgggtttcccgcagcagctccgggtcctggcttccacagcccccagaacctccttgccattcacctcccgggccgggcttcccttaaccgtggcctcagggctgcgcggggccaccgcatgaacgctgccctgggtccctgtcgcccctcagacagacacgggatcccaccctcccccgccccccgcactgggtgaggcccagctgggtgggtacgcggcctggcggccggccccgattccagggacgccgtccccgccagggtcccggatccaacccagacaccccggcggccgaggcgaggccgggactcacctcttcccggcacggtccgtcttcggtccggtctcctccgcggcgtctccggctcctcctcatccaccccagcaggaagtgacctcctcggctgctttcgtcacttccatcctcagcagagagggcgggggaggaggaggcgccctcccgccggttcccagcctcacctcgccgcacccagcagcgtctccctttcctttctcctttcagcagacgccgacttccgcccgcactcctccccctgcgcgctcctcccggcccgcatcccgcgcatccgccccggcacggcccgtgcgtcacgctgcgggggcacgttacgcacgctcgtggcgggcggccggcccggtccgctgctgggccagggtcctccagacgccgaggggtgacgcggcgcgagggggtgctgagctgctatacgcttcccccgccagtcctgcgccgtgaggcagaacggactttgcggggcgaggcgctgccccggggtcccacctcccgggggaggggacctcgcagaccccacaggaaggcccaggcgccgggaaacagtctctcccacacaacagagaggcggcccgtctttctccagaaatgggccctgcgacctcccagagtggggatccctcacaatgggaagacgggacccgcagacttcagacgcaatttccctaccctttaagaaagggccctttcatatacgtatgaaagaaaccgcaaagctttctctgaagcacgtcgctttggcatttcctccctgggaagactggggggcatgaccgcttccccgctagttcccaccccactgcatttagtcttaattcgtcccagtctaagcagcttgcaagtcctctccctaagtcattaaaacgcgtgtccccttttggttttaccttttgttcctgctcgggcaatttgtctgtccaaagcatgattttttcttcctttagaggctcattaaggataaagaatctcaagcagttcagctttatctgcagtcccacccctgtaaatctgagtggtgtccaggcatagtttcactccagaggcagaagaaagggagtagtgaggatcagtaaaggttaaagaatttagaataaatacgagcgtgggggaggtgaagaagagagatgggattgaaggagaattgaagatcaattttgatcaaatggatcaaaactttgtacctctgctctagtaagacctttgcaccgtctctgccacatgggacttggagatattagttgttacaaaaattgcttccagttttgaatgtgctactagtcactgtgtagctcttgataaattaattagtaaattggctccctctggcctaaaattaccttacctgttttttaaaaaagataacattgttgtgtcttttctagttagaa

SEQ ID NO: 35010 - DNA, 748 bp, Homo sapiens
cccaccacccctctccctctgctttgcccccagccctcaccctctcccctgagctgactgatagggataaaaccctgatactcaggaagaatggagggggtgaatgctctcttgggtttctggctcctcagtctcatcccctggtatcccccagccccctccctcacctcccagctcctcctctttggtggccacagccccagctcttcccttgacgcccctcaggcctgccctccacccctacccacctctgcctgcaggagggcacagcagcactcctgccctggcctgggcagccctgtccttggggcagggcagctcagcttctgggatttccccagcctacagccagaaggaagtctgacttggagaggggaaaccttactcttggcctctgtccagctcctgacaagaccaaagttcaggggcggagctggtttccctggtcagctggggactcccactgacctctacttatcaggattcggggtttaggtctctgggcctggagagcaggtcaggggcagggaaacgaggggcgggggagggtgagagctggagggcagtgtggtgaaggagctgccgtgccaaggcccctgcccacttcccccaggcctggcttttcctgtccctgaaccatgttgaatggtggggcgggggctcttgggactgtctccctctcctgagctgggcatgtgtgcaggtgggcgtggctggcttcacagtgtctgcatcctcagggctgata

SEQ ID NO: 35011 - DNA, 1063 bp, Homo sapiens
gagctgctcagagtttgctccaatagaaaaagtttgtggccaggatgcacaaatggcctgtggaagatatttacctattagtaggcaggataggatggaaattaagccagtattaaacgttatttcttctaagatgttgcagagcagtttgggggagagcacagactggactccaggtgacctacatgaagtcacacagtgagatgggctagcagctgtgagactgcagggtgagcctcaagcttgtccttagaagccagatcctgccccttgactagctgtgtgaccttttacacattgcataacctctctgtgtctcaagccgcatatccctaaaatgagtttgtaagtagtggtctgagtgtgtgggagtggagctaagcctccaggacgatagactgtaggactttggatactggttcccagcaaaagataaatgccaatatttgcattgggtatggggggagtgaacacttcccacaaaggcctttgttcttttgcccacagcttgttacttaggcaactgacaattgaagtttgtggaaaaccagaaaggaaattaatcattaattggggtagggacaaaggaaaaccactaaaaacaggaggggcctagctgagccttgctataagagtatgacttttgtgcctgaccataggctgacactggtgaccagggctacctggggcagagctgtgaacacagggaagctggcaagcagggggaggtgtgtgcgagaacaccaacgggctgcgtgcggagaggggctcttcagtgcagtgccaggaacactacagagtgaggttctttccacatttattctacagttacctactgagtatacactgcaggtgctggaataagctgaaagagctttctttaaaatcgtgggctgtcacaacagaactaactagccagaggtcaaacaagaattaacttgtgtaagccaaaaataaaattctaaaccaccaaatgactaaatagacccccaccccccagccaaggggattccaaaaaaacctgaaaaactagcttaggccatgataggaagtggggggtcag

SEQ ID NO: 35012 - DNA, 592 bp, Homo sapiens
ccacagctctccagactgaacttctttgagaagtgcttggctatgaacactatttgtaaggaaggagaatgcaaaagatgaaccttcagagaggaaaccagccctgtggctagaagccaggaactctggagagagtcagcaatgaacgttccatgctggcaaaacaccagggatgtttaaaaatccagacctctaatctcatttttgacatcccagccatcctgtgcaaaggcataaacatgtacatgggcacaaaccccaaccatgggaattttggtaagttaattacacacaactgcctaatgctggtaatgttttggtgagttaaaggaaggcagcagcagaatgtgtgagtcaccaagtgccagatgggagataagtggagacttctgggtagtctgatatgttattgtccatgtgccttgcatttgtgtttgtggattggaagaagcaaacacatcttccagtttttacagactgtttttggaagacaaagaccttctcctctttggtctccaggcttataggattgcttctcagttctaagttcaatggggttggagacatgttatgtggctttagctgggtccaa

SEQ ID NO: 35013 - DNA, 763 bp, Homo sapiens
gttcatggtagggaaagactgcccctggaccatgactgagcagggctaaagcagggctgcttcagaatctgcaatcagtccaaagttagaagatgtaccaacatgagcacagacagacatatctcccagtgggctcctgggtggctaggaatactctctgcccacaactgggtgagaataagttgtgtttcagaatgaaatcaatagtcacggtggaaatgaggacagaaggggctgatgccaagtgccttgcttcagggttctctgtcaagatcaaagtcaacaggcctgtcgcccaaggcaggggtggttatgactcctctcaggtcccttggcagattgttctggtggcaggaccaaagccaaagagagctatatccagatttactggggcaaagtgttgtttccaggtctgtatccaggaacatgtacagtgagcctgctacctggttgtgaaaacaccctctcaaaacagctctcttcagtcttgggctctcctaaggttttgctgcctttgacctggagtccaatacgctcacaactgtactttggtctgtggaaggctctcaaattcttgttgctgtgggaggatatgagtgggacatcccctactctatattctgctctcaaattttattttacagagagacactaaactacccaatcaaaaagttcaatgaacccaaagtaagattaattcaaaaacatccaaacctagacatatcaaaatgagatgatcaaaagccaaagtcaaacagagaat

SEQ ID NO: 35014 - DNA, 637 bp, Homo sapiens
aaactcattcactatcacaagaacagcatgggcataactgcccccatcattcaattaccttccaccaggtttctcctatgacatgtggggattatggaaactccaattcaagatgacgtttgggtggggtcacagccaaaccatataattctgcctctggcttctctcaattctcatgtcctcacatttcaaaacacagtcatgccttttcaatagtcctggaaagtcttagctcattccagcatcaacccaaaagtccaagtccaaagtttcatctgatacaaggcaagtcccttgtgcctgtgagcctgtaaagtcaaaaagaagtagttacttcctaaatacaaagtgggtacaggcatcgggtaaatacacccatttcaaattggagaaataggccaaaacaaaggggctacgggccacatggaagttcaaaatccaatagggcagtcattaaacaataaagttcaaaaatgatctcctttaactccatgtctcctatccaggtcacactgatgcaagaggtgagctcttgcagccttgggtagctccattcgtgtagctttgcagggtacaatctcactctcacttcctttcacagctggcattgagtgtctgtggcttttccaggcactca

SEQ ID NO: 35015 - DNA, 1111 bp, Homo sapiens
cccttgtcttttcgttctccaaagacatcagaacctgaacagcacacctgccccaagaccaaactgagggtcaggctgcttattctcacagccaaataatgagatgcagatggactgggaaaggaggatgtttatttctgtaacccggtacaggcagaaggtctggaaattatccccagaccaactcaaaattacaaagttttccagagcttatataccttctgaactacatgtctacatgtaaatgtccattcatttaaagacataagtgattgacttcttctaatctataactaagatctgagtcctgaagaccttcctctggagcctcagtaaattttcttaatctaaatggaagcagatgtggagtgattacacttacttcatctcctgctaagacatggagctttgaggagtttcttcagacccccaataaacttgtttgtagaggcctggggactttcttcagatgaaacctgtttaatcctaaatgggtcctgttaagaattccttcattatcttgtcaggcttcaaggcccaggaaaggcctaggcaaaactcttggtgaccttttgttacattccagtctttgtataagggcactgactctttcagcttttaataattaacttaaccagtcagtactaaaacagttgttatggaggcctacattagggagacctggcctgccataatctccactgtcaatttgcgcatgatttctatcatgcttgtatatttatttatcataagaatcatagggagatggggcatcataatgtttctagctacttcctgctgagagggggtaattgttatggggcaccgaatgcagcattggagtggaaaaggtcaatttgttgccagttgtactctctattttgggggcttaggagcagcatctgctgaaacataacagtatgcaacagcaacacatataagtagattgctgctgttttcttctgaagtttaagttatctagtcttcagttttcagggctttaagaaggcacagcttaggctgcagtgatttccaattaggaaaaatgggaacaaaaaaaaaaagaaaaagacaaaaactgaaagcactttttggagatttgtagccagga

SEQ ID NO: 35016 - DNA, 1826 bp, Homo sapiens
tgaagagcaaagctggagggagcaagaccacctcctggcttctggaacgctgggactgtgtcagagccttcattcaggaggtgttgtagcgcatgtgatgattggctgccagtatattcatgttaatataggtcagtagtcccaggacatgaggggacaatgaatcagcccgctccctttcatggtttcagattcaacaaacgcttactcaggctgactgtgagttgaacactggggctggtggtttcactcatgttatctcacttaattttcaaaatagatgtgtgaggcagacacgactgtattatgcccactttacagatgaagaagaattccctgaagacacacagcttggtaactccaaagtcaaagtcctctgttctttctattttatgtgtgtatttttcccttctgtatgaccttcccttcctttatgctcagtccccttggccattccccctctctgcactcttctcctggctcccattcaccaatctgcttctcctgccttgagccttgctgacacaggagagcagatgccaactgctggctgtggctgtgcctgtaatatgtgactcttagccatatgaaccagactctgggtgacctcacagagagacactgaagctagggtttgcgtggagagaagaaagtgagatctctcctaagcactgactttaatatttcacactctggcatgagatgagtcagagctttcagatgcccttgcagtacattcccggctcaatagccacacccccaaagtatgatatcattcatccacactaatctgtggattgataaaccacactgatactcggtttccgcatctgtcaaatgaggtgggattatttactgcacatgtcactatgggagagtacgtaacagaaaccagtcagcaagatcaccctcattctctggaataaagggatagtaggctgggcatgacagctcatgcctacagtcccagcactttgggaggctgaggcaggagaatcaccttagcctaggaattcgagaccagcctgggttacatagcaaaaccccgtctgtacaaaaatattttttatattagccaggcatgacacctgtagtcccaggtgtcatgggactgagctcggaggtcaagcctgcagtgagctgtgattgtgccactacactcccacctggatgacagagtgctctctcatagatagatagatagatagatagatagatagatagatagatagatagaattttattcctagtagcctcttcctacaggctttccaggagctcctgccacctccataggacaggcagggaggtcttcagtgcttctgtttgtgatcaaagccaaagggcaccatgcccactgcctcagacctcccccagctctctgacctaccctgggagggtctggtttgacactctgtggggacttcaccccttgggaatcaaccgtcttttcccttttgtaatccattttcttctcaaagatagttatctgtacctgcttccttttattttattttatttttcctccaggaacctatcatattagccacctgcctacaggagagagtgaaagggattggatttaggagggagaggtggacggtatgtggaagtaagagagagacatggtaaagaaaatcccaggccaggctgtggctcacgcctgtaaccccagcgctttgggaggccgagtcgggctatcttttgagctcaggagttcaagatcatcctggccaacatggtgaaaccccgtctctactaaaattacaaaaattagccgggtgtggtggcgtgcacctgcactcccagctactgaggaggctgag

SEQ ID NO: 35017 - DNA, 2230 bp, Homo sapiens
ttgctaaatctttctaccatctgggcaacaattggtattgatacaaaggtagaagaccttatttaactggactaaacctcaagaagtcaagctaatctccttaaactagaggtctgggaaacacatttggaatctgtagggtcttcctggaaggttatgggcaagtcaggtgtggcttgggatggatcttcaataagagggtggggcttggtgcttgcacctggatttcctttcccccttaacttgactcctctctggtgagcaggcccaaatgcactcctcctccatcccaacataagtgcctctctccacttatggtatcagttagactcttgaggaaccttagagatgtgatcacctgcttccactgtctttggggcctggggaacatgtgggacagagaagagaggccatggtgtgatgctgaggaagtcagcctgacagccatcttcatgagcatcctcctattatcaccatcatcaacaacagcccatgttcatttaactcactgtgggaaaggctctgggctaactttcatgggaccatgttcactggggtctgagtcctggtgctgaaggagcacctagtctagccaggggagccggctaatcaatggcatgtgtaatgtgcttcatgtgtgcatggtactttgcaagttttcaagaacttcatggaggtcgtgaacgtagctgaagtagtgtaagaaggcttcatgcagagatgggctttgagctgaaagctgaatattaagtagcagttagacaaaagaagagaagggcaggcaggcaggaggagtgccacgagcaaattcttggggagcgggggagatatgtgagatatcagcccccgtggcgctgctgagataagtaatgagtgataagactgggaaggaatggggacagttcctggaggatcttgaatgtcaggctggggcattcagatttccccactaggccccggagagctagtgaagctggagtctgtcctcgctctgcctggagctaagacctagcattttcagaccattctcttaatacctatttccttccctcactgtctccccaaaggttagactggggactaaaatcctcctgtgctgtaacatcaagctgacttagagcagacggcctttctactggggcctgcatccagaggcctccacttcccctcccctccccggccttcacattccaattccccggctgcgaactcatgtgagatcataagtcacagtaccataaaccactccagagtgtgtaataagtgaattatttaccaatgaccctggctaaatgttcacagggataaatgattaagccgcagatctgtcaaaaagttcccataaataagtaattctgtgccgccttaatgggctttgtaaattactcattcatgccactgctggatcactctctggggtaaattcctcacacctgctgatttactgctgaggtctgcacacggtgatacaaattctgctagccagctgggcagacaccccaggtgccaacccacctggctgagcccccagggatgaggataccagaaacaaaaagtctcccgcgtcatctgacaaaaatgtggggtccaaggtgggctgaccttctgggccacttggagtttgtcctgcagggcaacactgcagtgtcagaatccttctcctacaggcatccattcagtgagcatgtacttagcatgtcctgtgtcctaggctctgtgttagatgcttagaccccaaagacacagaagtgtgctccaatgggcttggtcacgggaatgaaagaagactggacatacagtgtaactgatgccatagcagagtgctacttgagcccactgggggaatatccaggacagctggagaaattgaggagatggcaaaatatggggtttgagtttcactttgtgctaaaaaagcctcactccaattcagtcaagatgggctgagccctgttgctatgatagtgaacagccctacaatttcagtggcttacaaccacaaaggtttatttctcattatgcaatctggagggtcagttgagggctctgttcaaccccatcatcatcctccccctaggacctgggctgatagcacaacatcacctaggttattgccagtcgctgtgaccaagggaaaagagaacatggcagagcataacttggttcctaaaacttctggccagaagtgacacttccactcacattttattggccagacaaagtcccatag

SEQ ID NO: 35018 - DNA, 1165 bp, Homo sapiens
tggaggagaaggaataaagagctgaggcatagctctgctcctgtgatgttagaggaagggaaggtggaaaaaaaaggcattgaattattctcagacaatttcagaaggaccagatggattctggaaggaattaactctgttatgtcctgtactagtatcattactacactctaagatgggcaaacgaaaggatttggagcattttggcagatactctttgggtgattgagagggggaggtaggagggcatggctgttggggtgactatatgggggtcgcatttgggctgaaagttaaggccacagacacatcccaggctgagctccacactgacccccttagactgaggctttcactcagggcacttaacttgggtggagggaggcaggagtggaaactccaggcctaattgctaggtctctctcagctcttccagggagcacggggcaggaaattcctcaaattccaggcttgtaggatcattgctgagcttaaccgcagagcaagagaaagaggcaggagaggcagagaactgccttctctccatctttttttcccttgcaattttaaagctgcagcaaatcagaagggtttggaggggctgatggctatgagagaggccccaagcataacacccccgaccccggtaaagaaagtcccaagtctgggaatcccagagaaattagtcctgaattgagtaagtttgaagtcaaaaatagactgctgtggcccgggataagcatttttcccagggtgaatttttttagttcttcagaatagccagtggaaaggaagttgctttaggagcaagaactgtcttgctgaaataaatgatggctgtgcagggagcacattggaaggggtcttggggtggacagaatttccttttgctctaagggtgaaaccagtcaggtctctctctttctgagctctcctcccagagcacctggtcaggatatcccagtcatcacctccgggaagatgatgttccctggatagcccatacattttctcacctccatacctagctaacactgctgcatcagtcccaatgaccccacttcccatcctttactctctgagatctggatttgccttcaagatgcaccccccatgccactttcttaaggtagtcttctcaactccccccaaagaatgaactatt

SEQ ID NO: 35019 - DNA, 921 bp, Homo sapiens
aatggcagtgtggatggagaaaagtgggaagatatgtaggtggagaactgtcaggaattgcttactgatgagacgtgggctcgagggaaaggcgaaggaagcttctctttccctacctctccttccaactggccctagaattgctgtccggtttccagtccctgctcacacttcattcaatggtggaggaatgcccagctgctgtcccatgggggtctggaggtctatgggcaccaacagtaccatttccacagtctttccagcagcgataggaggcaggctgtgcctcgagtgtcatctggtttggaggccgaggtccccacgtttaagtgacttgcttaagaccccacagctggtttgttacagagtccaaatttcactctcagctttagggctcttttaataacacttcattgctgcatcccgaagttaagcaaaagaaacaaaataaagataaaaaggaaagcactgttccaaatgcatagcctggagcatagcaaaatatgtaattaaagacccgcgcctgatgtcggggagcctcgatgtgcgcatgcgtcccaggctgaggccgccggaagaggtcaggcggttcgccggcgttccaagttggaggccagcccaggacaaggaggggaagtgcgcatgtgctccaaatcatttcccggccgaggaaattggctaagaccgttagctggtgggaatcggaagagaatgggtcactcgggctgtgcgcggggcactatgggtgttgtagtttttgcagggtggtagcagtttgttcttttaagaggaaatcttcgcgactagttgagtcacgaagatttttgagaaaatcatttgagaaaaagttgcttgcacgggggaatcgagtgtggactagctacgtgggtgtggcttaattctgctgtttctcttttggat

SEQ ID NO: 35020 - DNA, 824 bp, Homo sapiens
ccccacccccgacatcttaaactcccagaggtgccgccgccgccagtccagctccagcctccactgcggccgcagctgcttgggcttctgcagccgccgccactgctagggccatcccgctgctggcgtactgtcatatactgcgcggagccagacctcggactgccatcgccgccacctgccccaccctctggccccgcgccccgccccaggctagtctcattggtctagttccctcagaaccgtcctcatcggccgccctccactttcacgggggcggggcccaaagtcgctggagttttgctcctgggactggacgtccgagaggtaagagagctatcacaaggttttctaatccttatgtttcttttagtggatctccaggttactgtggtttgtattatcaggctacttacaaaaatgaatacctctttaaatcaggccattttacagcaaactacggtccttgatcaccattatgctctgaataaagactatgagcaattgcacttgaatgctgttaaactttattgactgaactttgaattgtttgattttgatcaggttggcttgtggaaagtgctattaagaagagttctttagttcgttggtattatcctcctgatagctattataaaagtttccctgatgtgtcctctcaagaatcttaaattctcatatgcagctatcctttgtacattaaatggtctccttatggttaggataacaaaaacatgaagaaagcatataagattccaactaatttgacgttgtgaattgtgaattctgaactgaaaccaagtaagtcccttatgatcaggctc

SEQ ID NO: 35021 - DNA, 1178 bp, Homo sapiens
ggaacactgaggtggaggaatcctgggatatgacagttgtaaagaattgtagccaacctaatccagttctctcaatgtgcaactgaggaaattaattttcatgcgtttactttattgtaaatgtggtacttgcacttgagaaattttggaaaacataaagatgtaaagcaaattaagatcactcatagtctttccacctagagacatgtactgctaaagcaaggactttgatccttttttccctttgcatttttaccatggttggaattgtaacacagacacaaccttatgtcctgcttccaaaacataaataatggttgtaaagcgtcccacacgttgacccaaagtctcctttgaaacaggaaattgagacacgccggttgtgaaacctactgaagtgagcggcggcgccaggattcctgggaccccgacctctttgcagctcgcacagctaagggcgagggcgcccttcggcagaagcagcaaaccgccggcaagcccagcgaggagggctgccggggtctgggcttgggaattggctggcacccagcggaaagggacgtgagctgagcggcgggggagaagagtgcgcaggtcagagggcggcgcgcagcggcgctccgcgaggtccccacgccgggcgatatggggtgcctgctgtttctgctgctctgggcgctcctccaggcttggggaagcgctgaaggtgggtggaacgagggcgcttgagtgcactcgcgggagggcggagagagggagctgggtagggacggggagggcaacgcctgatggggactggtgagacccgggacgcactggcgcgatctaggtagaaaactcgctgctccctggctccggggagaggcagcgcggcacagagttcgctggcatcagccgcctcctgaagctcatctcctcttgtttctttcttccttctctttatgctggctgctctcccggccacttgctacacgcctccaatcttcattctctcccagtcccgcaaaggcttttccccctccgctgcctccagatctcgtccttcgccaatagcagctggacgcgcaccgacggcttggcgtggctgggggagctgcagacgcacagctggagcaacgactcggacaccgtccgctctctgaagccttggtcccagggcacgttcagcgaccagcagt

SEQ ID NO: 35022 - DNA, 847 bp, Homo sapiens
aaaaaaattatgctagcttttaaatcaatggttcccaaattgtagtaacctgaccaacagcctcagcaggacctgggaacttgttataaatgcaaattgttttgggcctcatcctatacccgctgaatgagaaactctgagtctggaagcaggctcaatagtcaagccccctggtgattctgatgcttagctaaagttagagaaccactgttcttagacattgtgcaatgttatacaacaacttcctcaaagtgctaagtgaaaaggacattggcctggcgttagtcagggaaggcgtcctggagggaggggaatttgaagcagagctttgaaaaacaaaggcagtgaggtgaaccagcaagtgcactggctgaggggactggagttctagcctctgaaccagtttcctcctgtgccaaaggaggataataattatctattattgattatctcctagacttgtggagttcaagtgtgtaatgccttaaaagatgtggaggctgttgctgtgtttggtaccacattgcccaccctcacgtggcgctcttcagcttaggttcctctagcagtgtcaagtttgtgaaccaaccccactggccttctgcattctgagggcacgtgtgttaaagtctctactgatgtccttttggaaatgcctctgcatgaatttatggtagctctgactcatctttaaacaattttaatttatttagaaaataaaggcttatctctccaggaaattttttcttccttcaaataaatactcagttccaaatatctcagagaatcctgagaattcattttagaacatgttaatactctttttatgagtatcatgtttcttact

SEQ ID NO: 35023 - DNA, 573 bp, Homo sapiens
aagaaatttagaaaattacaaataggtggaaattaaacaacacactcataagataccaacaggtcagagaaaaaatcaaagggaaaatcaaatgtacatggaaataaacaaaaattgaaacactacagctttgcccagatgtgtctcctcatccccatggaacaggaagctagggaacctggaatgcccatccaggccatcatctgaaataacagagaacacttgagagtaaacaaagatcaaatacatagccatctgcttatgttacggctggctcttacccttaagccccatctactgctccacaggtcaaattgcactgcctaatataaaaactgctaaaagaagtgaaaaggggtatagaaacaaagccaaaagaccctactcaacatactctacagttgcaccacttagagagaaggggaaaggaaaaaaatatataaggaaagaaaaaaaaatcctatccacacaaaaataattacaaaaattagaagtgccatcctctccagatgaaagggaccagtataaggattctggcaccataagaaatctgaatcttgtgacatcaccaaa

SEQ ID NO: 35024 - DNA, 1305 bp, Homo sapiens
cagcaggccggggacagggagaagaatgagcaggctgtgtggaagaacaaaacgacctagtatcccagtttattttttttccagtgctatgatttctttcctttatcttaaaatctttggtaaacatgtaaatgaggttttgagaagttaagattgaaattccatgttcatgttcgctgcaattgaactggagaagtgaaaatatgacaaatggaagtggcagccctaagggctggaacaagagatgcaaacaaaggctgggatggatttgtggaatttgtaacaaacacttcctaggagtgatttctcagtaaaagggggcaacgaggctggtgtagtaagttagcaaacaaattccagcagccttccctgggggactttcatgctgaaatgcaatccctagtgttggaggtggggcctgatgggaggtgtctggatcacggggggtggatccctcatgaatagcttagtgtcatcccgtttccctcatcaacatgcattcccagaaatgccatgaaaggaaagaccaagtcttgactgagaaacggaccgggcagatgagggactcccacatatacctgtttcctgctcttcccgaagacattttgccacaagcatataattcagcttctgaaaaatacggtcttcctcactgcagacaccatgccagcgttttaaatcaagttggctactcgtgctgtttagagtatgcagtttgcctgtggcaatattaaactcatctggaagaaagcacttaaacctatccagttcctcatcggtgatgttatccaggctggttagcaagagtatctccttatatttactctccatctcacgacttttcagcttataagggatccaaactatgtaagattataccaccaaaagtgattcaacattcaaaatgaagcaaggtgagctgttactattttttaaagggaaaataaaatgtttacagtacagtaaaagagattttggtgaaatataagaaataactttttaagcaagatagtccttcttcctgggaaagacatcttcagagggtatacaaccacctccagaattcttagaaaatgggatccattttcctgttatttttaaaacagagttattcaggcataactgacatacaacacaatgcacatatttcacatgtgcaatttaaattttttgacatgtatacagtagataaagctcaatttttcaatttcttctttcatggatcatgtttttggaatcatatggtttggatatttattttccccaaatctcatgctgaaatgtgattcccagtgttggaggtgg

SEQ ID NO: 35025 - DNA, 1431 bp, Homo sapiens
aatagatgctcctaccaagatctcctcctgccactgccactctgtgcacaggaaaggaggggagaagaagccatgttgcttctcttatatttgagcatcatttaagggaatataagtctctaatgactcacatgtaagtctgctgggtaagaaagttctaatgttggaactcctttcagctatcgaattttgtaagaaaaaaaacttatttgtgtttatatacatttatgagatacaagtgtaatttcgttacatggatatatgccatattggtgaagtcagagatttcagtgtgcacatcacccgaaaaatgttaactgtacccattaaagtaatttctcatcccccatttcccctcaccacatgctccagcccttgccaggaaactgttcattttctctgactaacagaaacgaaagctaaaaacactggtgggaggagtctccacattgtttcctactccattttctctggggcaatagcagaataggagcaagccagcactagtcagctaactaagtgactcaaccaaggccttttttccttgttatctttgcagatacttcattttcttagcgtttctggagattacaacatcctgcggttccgtttctgggaactttactgatttatctcccccctcacacaaataagcattgattcctgcatttctgaagatctcaagatctggactactgttgaaaaaatttccagtgaggtgagtactgttcctgattttgtaaatatgatcttgttccttccttgaagtccccagaatcacaaggggacaatcagtattggttattcagggtcatgggatgatgggagtagggctgagtattcagaaaagtgaaaactgagttgcttgatatgaatccttcatttacttaggaagataacaggcatcttctattccaccacaactgaggactgaacaagagaaaatgcattttgaccgttgcagattttaaaattaattatccgagtgtatactggcataagttggtacttagaagagggcttctgttattttggctggaagaagtgttggaaactcggtagctgtggtgggttctcaagatagtgacatgaaaaaagtatcatgaaagaatattaagtaaaaaacatatctgagcatagagatgtattatatgacatcatcccaattttacaaaacataagaacaaatgtacacagagtagaaaatttttttcagtttcacaaacacagttactcaagcacatggtgtcttaatattttcataagtatattgatcctttactttagctccattctgcaccgggtgctagcggcagaatttcaatcattttggaattactctctgccctcctgaaagttaatgattttttttttccttgtggcaaggtataggggagtggaggggaaggcagttaggaaaaggttactatt

SEQ ID NO: 35026 - DNA, 1299 bp, Homo sapiens
tagggttttgggacagagcccctgtagagataggaacttggggaggggcttgtaaaataaaacaacaataaattgaaaataataataataataataatatcgcaagcaaaactgctatctatgaaatgcttgctctgtgccaggaatgttgtgctttctgaatgggattcccctaaatgttctttgagggcatcaaagatcaaacttatttgaattattttctgttttcagagtatctataaatgcaagctggagacaggactcggtcacatagggcttcaggatgtatacgtggtattatattttctcaaggcattttgaatttgggagaaaaggaaaccttatttttaggtgagctaggctaaacataggcctaaatctttcttacaggagccaaacattaagtttagaagcaaccttttaattcattaactagtcaatgatttgactctgtaaccagatcttcattatacattttcaagataccagtcatcgagaaggatatgttcaaaagaaggccagtcccttctctggatgagacgctatcctggctcagtcctggatatgcctgagagcagggaggtattggtttttgcctatgagtgcctgggctgtgggcccatctccacacacagagagaatcaaaggcgtagagaaatgtgtttagttcgatgacagggctaaggcccacagctacaatttagtcaggacattgccctttggctgccgctcagtgcccacaaattcaggatgttggcacagaaacaggtggtgtccatctgggctggtgaaagcacatgatcttctcttaacatgtgatgaagcaggcacccagagcagctcccaaacagcaggctctgtggccgccttcactgctgattccattaccactccaccacaagaggtgaggagcagctgcccctccgaaggccgtgccccaggacccacttgctttcaccttcacttctcagctccagccctcccccacagctgtttcagaggacaaagacactttattgcaatatgcaaagctctcaggatgcaaactatatctggattaacaactataagtacagttttattacttcagcttggcatttgctgacacagaaagcaagtatttattgtcatctccatcctgcttcccagttttaacttttgttctcctgccatccaactccaattccagagttattttctttgcttcctcagattactgaggagataatgtcctttctatttgccctcaggtccacacctcgttttaaagccaaagctatcaccctgactactggattc

SEQ ID NO: 35027 - DNA, 1381 bp, Homo sapiens
actacagtgggatgcaagtacttgagtgaaggcaaatttcagagttttcttactaaagattttgaagaaccaaaaaatattagtttcaaaatgctgagaaaaatatgaagcaaaatatgtgtttattttccttgaagatgtaggaacgggccagttcttaaccattcctatgtaactgatattcatggtgtattactgagcaagataaacctcaaatgtctatgtaactagaaagtcaatcctacctacactaagcagaatgaaaaaaataaataggtggcagaagagaaaagattgcactaagtttgtgcattcctgcaattgcaactcctttctcatcatccccttaggtaaacaatgactcaccaagatagcaaaggtcctcatgagtgataacgctagattagtaggatcatgatagctgaaacaaaatgccaacttccttctgtggaatccttgtcactgagaaaaacggcattttgcaacactttctgttcccttgtattttggattgttagctaaaaatatctctctacccctaaatttttttttaaatgttcttctagagaaatcattttctgcctagacctgacaatgaattctgggccagaggttaaaattattcatttcattgttcaagtctttccaattggaagcaagctagaaaagcccaggtgcttcatagttttcagtcctttgaatataactgaatcataggaccttagcgttaggtggtaattttaaaagcacagcatttctcatgaacagtccctcaaattctgcttcactgcttccaatgattggaaattcattaccttgtaaataagcatttcctcttttttttaaagatacaaactcttcttgaaaaataaaaccaggctttttaaattataaaagtgctcataggggaaaaaccgtgggtacagaaggatataaatggaaaagttcattttctcctctacattttcttggccagaggtaaagatgattcatgggtttttgttgttagtattgctgtttatttctgtccagaaatattttatgtacaatcatgcatattttcacatcatttcaattttacgcaaatggaattaggcagtacataccaattcacaactagggtttcccatatattatatcctgactactttccataatagtattgtgatctatctcactctttctatttccaatggtgcacattatttcattatatagattaatatagctgtactatcatcatttctattttgattgactttaattcttagaaaatattaattcctatcaactcaatatttatttgcttgcaacttaccacctcccacatcattccactttctattttctcttcaatatgattacacttcaaatatttgaa

SEQ ID NO: 35028 - DNA, 1659 bp, Homo sapiens
ctccatgttgcccaggctgatctcaaactcctgacctcaggtgatccaccaaccttggcctcccaaagtgctgggattacaggcgtgaaccactgcacccggacagtttttacttttaaatatgggaactacccaggacttaggagaactaggattcagtttgtgaagcatctatatgaattcttaacatctttatcatacttagctcccctgagatatctaaaaagccatatagggggagggagactttggactgcaagccaaaaagctcatgagtaaaaagaaaatgtgactaaggtattggggagaatacacagaaataattatgtacttaagatgaagctgaatcagactgtcatagagaacatggagtggaggctgtcccaggactgtcatgtagatttggggtttgagatacagatgagcaccaagggaagaataaggatttgctgtcaaatcagtgactaggctgggcctcagacctggtggcagtatggtctcagggcacactttctactaggctgaaagtgtggactctttaatcagaaaagcctttgaacgaacaaacaaacaaaacagccgagatccaaaggacacatgtatctgcattccagaccataatagaactactagggcatttttcaggattaacaaggtcaatggcaaaaataaaaccatatctaaagttctctaagaacatcataaggtggctaaaagtaactaagacaagttgttaactgacaagaaaaaaaactgaaaaaagcaaaacattgctggtaaagattttgacaggcattcagtaaacattcatgaaatgtttaccagttattcaataaacattcataaagtatttactatgtgccagatactatgctagacataaaaaaatcttgaaataagccctgtactatcccttaaatagtttccagtcttgaaagggagatgggtttatgcagaactcaccgtaattcaatgtgatggagaaatgaacaaagtatgcttaatatttaatgacaaaaatgtaagcctcgggatattttttcctgatctatataaagctaaatctcatcaagctaagaatggactttgcacgttgaagttcagtgaaataaatgcctgttacctggacagtaaggttgccttgatctgtgtgtagtgctatctcctggggccaaaggctatgtagctcctgctgggcatcactcagaacatttcatcaccatggaattttagaacatttatcactcaggtttttcagaaatcttgtttgaacagaatagcttaacagtcagacattatggaatcaaatgttttcaacaatccctttttttggaattattttagtcatcattcatgctctgtatcactgctttcacactgtagccccttgccacaagacaatttcccaaccattatctcactaggtcctcagaacaatctcaagggagacaaggataaggctctcattatacagataataagattgagatagaaaaaggagtgaaggcagaacttgaacttgcaccagttggctggcattttctgttttcctagaataaatcctcacccaagggcgactcacaatggagatagtgatgtactagagaaatcaaactaggcaaaatttacattctccggggcctcaaacattccaaataa

SEQ ID NO: 35029 - DNA, 3483 bp, Homo sapiens
tcagttactctttaattctctgctgctcagggtaataaagaactgattaatgaagatcttaataactatacacaaagccctctgtttaggaaaaaaaatcattttacaagcttaacaaagcatttaaaaattaaattttgcaggcaacttgaagcataagcaatgcaaaagtagtagcagaaacgtaaggaaagtaagctgataatgatccaattcaaatgccaatcatatttatttctgagttcttagatggggctcggtgataaaaaacattttactctagagttcagaagtgaactcttttccattgctctagaatatcaggatggcagatgtacctcacttatacacacacacgtaaaagaatctctgatagccagattacttccacaaagaactggtccttgtggaacccatttccatagaaatcctactcgtgtcccaggactgtcttggaatgagcccacaaaatatccctgctatagaccttgcctcgccatgcctttctattgacccagggtccagcaatgcctcaggaggactcctaaagctagtagcagtgagcgctagggtggttaaatattcaatgatttggagagcaacattttaaccccactgtacaaactgtatttttttaattctcaacttaactagaactaattcactgtctttgtactaggttttaaagaaatggagcctgcaggtaagggtgaagctaaagaaggctcaagaacaaagtaaatgtctgcagaagtttctctagctgtagaaccaagctcacatagtaagtagtagattctctaagaaacaagaacttattcttatgcatgcccaagaaaaagaaaagaagaaaaatatttacccaacaaaatgttaggtaagaaaaaagcagattgaacccttttattagcagttttttttcccacttttcccacatgccctccagcccaccccactacctctcctatatgtctgagcaaagtccaatgccagcagcaagtgtgagcaggctacacaacaccctcacaaagtgctaagtgtctcactagttaggggagcttctgccacagagctcagaccatttacagtttacctacatagggtaggaggtggagggtgttgaagagaatcaataatttggatttttcacttcttcacatatctatgtgtcttgagtctgagcttcagaaaggtagaaagagaatgacctttggctgagaaatcagtgatagttaattattaaaactaccagttactgtttgcctcccaacctttgtggcccagattccagtaatgagaagatccagaagcatttgaaagtattcatgtcaatgaacagccaaagtagagaaaagatgtatacagccaacatcttcatgccccaggagcccaagtttggagatctttgtttcattctcaaaggacagctctacttatccttccaatgatcactgccaagttctctttagccatggtaaggtctccattaactctggccttgtggtctaaaggacaaatccttagagtatgtatgttgacttctctcacattgattagaacagtagttcccagaacaatgacaatgtgctccatcttcctccctccctccctccctcccttccttccttccttccttcgttccttgtgctttttgaatattcactatgagcattgcacaggcccaaccttattcatcaccctcactttcagcagattgcatcaccttctcttttatagagatctaaggagcctttccactcagaacccaaaaccccacagtgtaaccctctctctctggcctagtatcctctggaaaaaaaagtgtccctattgctgcacaaattctggagctaaggacaaacaccttcacaaataattcctgtttcacgtgatgcagtctgaagaggatgtggaaaatgctgatagataatgctatggagtcagtgtcatttagggaaaaaaatcactcaactgctgattctggaaatattattctctataatcttaactttaatcatttaagtttaacccggttcctttctattctcaagtttaaaaccttgctattataaaacaataaaggtttatcagtgtctacctaaaccaataaaggtttatcagtgtctacctagcacaatttacatttgataggtacgcagcatatttcttagggaaacagatatctcctcagtgcaaccacattttgtttattttctaataaaaattttttacatttaaaaataaaaaatatatatctatcattattattgtaatcctgtgactaaagtcacagtggttcttagagattattgtttcctcctcttctcaatacatcagaattccttccactattgtcatgagaatttggaattgtagtaaaaatttggaggtcaattgcagtagattcctagaaaaatattttataactctcaaaattcaacagtaagaaagcaaacaatctaattgaaaataggcaaaaaacacattaatactatggaatattgatcagcaatataaatgaatgaactattgatatatgcaaaacttggatggctcttacattgagtttgtttttctccatctagctttttaagatagaaagatagatcactgattttatcccattcctctaatcttatataaaaatgcaatgctatgatttctccctaagctctactttaacagcatcatgacaattttttaaattttcatttaatttaaaatactctctaaactttcttttgatttcttctctgactcatgggttatttaaaagtgtggtgtttaatttttaaacactcaggtattttatacatatatttatgttatagtagaagatactctgtattatactcctttttaatgtattttaaaggatttagacttattttaaattccagcaaatggtttctcttgacgattgacccatgaacacttgaaaggaaggtgtattctgccactttaaaatgaagtgctttataaacaacaaagagctcaagttagctaaaactgtaggtatcctttttttattcttcaacattttcttcctttttcttcaattctttttatttttttctttaattttattgactttatgtctacttgttacaattattgagggagaagtattaaactatcaatatagcacaatgtaattgtgagattgtcaatttttcctttcagttttatcagtttctgttttatttattttgaaactctggtattaagtgcatagatatgttatattgttatgtcttcttcattcttgatgtcttttatcattttggaatgataatatttatgataattttcttgtcatactactcctatttatccatgataatgttctttattctggagtctactttgtctgacatatcatatgaaacctatgatgcttactgttttgcatggcatacattttccatccatttacttttatctatttggtatttataattaaagtgcacttcatacaaacat

SEQ ID NO: 35030 - DNA, 1382 bp, Homo sapiens
gcaccgggagcaatatattgaatttaataaaatgttatttcactgaaaaaaaagagagagtatcaccatatatggtttttaaacttccccttaaatggctggggtcagaagataacaaaactgtcagtcaaccgctgacctctcagagaacggttactaagtatctgggaaggcaagtcataatatgaaaagggaaagggagataggcaggtgagagatggtcagaacaattcctcagaaactagaaaggatatcctccaattttttgaatctccttaacaaaatgctggcatattatactaaattaatgggggcaggggatagattttcagtgtttatatcagaaagcagaaacccagaatgttctacaaacagacgactacttcgcagaacaaaaaagaaagaagaggacttgtttccacagcccgttagaggcccaagctcagggagaccctccacgtggctcaggagctcatggaagaacacagggtcctcagacagagtggagagtagcatgatgccctcttgacatggccagcccagcccctcatctcatccataacactgaagctctgtaaccactgtctttccagcagcaaaatctgggtcacaggactcggagctctagcagtcacttgtgtctaataaataactcccattgattttccagcccagggtctcacccttccttccccagcagcagctctgattgctgacacccagggcgcagggctggaaaattactcacacattattggtgctcttcctcccccatcctcacccaaggtgcatataaaccctgaatagcctgcagcctaagaatgtgaatctctacataataactaagttagaagctgggtgggcacaaccattgtgctatctgataccctcatcccggtcactgctgctgctgtaagagcccaagctaagaacatggacaagctactgtttgggtttctgtcctcactagcctcgtggaagccattgctcagacaagtagggaggtcaaaggtatatgactatgtggagtagggtaggtgggggtgtcagggatagatggtaggaagaaaagacaagaggttaccgaatataaaattgaatttgtgatttttttcctgttcacatttcaggtgaagattatatcttttttttttctctcacagacatgattgggaaggtgtttatttttcctaaagaatctaatagtgctcacgtgagcttgatcacacagctggagaaatctacagaacttcactgcgtgtcttcatgcttataccgacctctcccatggctatcgcctcttctcctacagcatccagaccaagagcaatgagatggtcatttttaagtctcaaattggggagtacaatcttatcattggg

SEQ ID NO: 35031 - DNA, 522 bp, Homo sapiens
taggacagttctggggttgctctacccatgaagagctcttgctcctttctttatggcacatccgtagacccgttccagtaaaacacatgcatgtaaaccagggcagcaggactatcgggaccatatgggccaaggtgaatcttcctcatagccagtagccccagaagtgctgtatataattaaagatcctacaatgtcccacagtcatcaagaaaatatgttctgaacagtactcatgtcacctttgcttaaaatcccctataaaattcccagacacttgcataatagagttgtcatttgagcctgcaaaggtttcctaaatgctaaggaagagctgctacatgtatttcttacaagtcccattaactggtaagagaatggtaagtagaccaggataggcaggtgttttgttgatatgagaaatgttttactttcctctgccatctcctgacttacacatattttctgtttataatacatgtattaatctgttttcacactgctataaagatactacctgag

SEQ ID NO: 35032 - DNA, 1372 bp, Homo sapiens
ctctgtctcacagtggatatacatgacaattttcttaattacacatgtaactactcaccaggaaaaagtgtaagatatgagcagagaagaacaattcagaagaaaaattctactaggaaacacaaaaataaactttaagccgcttatcccactacctctcacccacccagaaaaagggaaaatcagtacttggagttttaaatgattgaaaattgtggtccacgcttagagaagaacaaccaaatccacttacccaaaataagccaccactaatcaacagttaccatgcagccactgtggaattaataattcctaaaagccttcaaggaacaagaagataaatgtttaagaagaggaaatccagatgaaggcaccattctttgagaagagccacccatctgttctctttcttctcagcttctggggctgcagcaataatgtggttttaaaaagtctttgtttcctcccacagaagtaaagggtacttcacctaaacacacactatttaagtggccagtggggacaaattcatggaaagaaggacctctctttgctaaactatttatttttcaatcagcacatggtaaggaaagcctttttgaaatgtcaattaagggtcataaagctgaaatcacggagctgcagaaagtctcaggtggtccctgggattctttaactgaagtcactgctgccattatcatcagtagttctgctccactcaaagacaaaagtcaagcaccaaatggccaggtaaagtgggagctaggaggattttcaatcaactcgctcacacataaaaataagtcatcaaaatgctcctggagtgccactcgcctctgcagtaatgtgcaccctgagcagaaatcctagattctgccttctttctagaagtagaaaagcagtctaagtgtttgaaccaattcacaacagaactttctatttggtcttcttatgagatgaaaaatgtttatgagcaggaaaaacattgccctggactaaaggtctcctgatgaaatgagtcaatctgttaagaaatatttctgtccacagctctgtacatggtatccttggcctccatgtacctcagagtgtaaacaacagtgtccagaggcagaatgaatgatgataatgtaggtctcttatagaagacctgttttctattgaattcattggcttgtgcttgaggtaagcagtacaagcacagacatatagacaatgaccatgatgaggtgggggttgggggacacaggtggcaaagacctcagattaggaaattctaagcacgatggaggtaacagggatgtcaatataggaaatgcaaaccaaacccatggacacctgcacacatgtgtggtgaataaaatactgttta

SEQ ID NO: 35033 - DNA, 4494 bp, Homo sapiens
gcttcatggggacagaaagtttattctccaagtccctctttccccttagctttgcctggatgtattacttgatgttgaattagtcaaagttgaaggcactttttagggtcttcagcagaaagcagaatcctagaatatcctacaaatacaagacaacttgagaactataaaagaaagaaaaggccttgttcccatagcccacaagagggctgagctcagcgatacactctgtgtggctcaggagcttctggcagagcacagagccatcagagagggggcccagagagcagagagaggctctgctgacatggccagcccagcgcctcatcccatccataaccctgctgccctgcaatgactctcttcccagcaataaaatctgggtcacaggagttggagctctagccatcacttgtctctaataaataactcccattgattttccagctcagggctcaccactccttcaccgtaagcgccaggaggcagacctggaaaatcactcacatattattggtgctcttcctcccccatcctcacccaaggtgcatataaaccctgaataacctgaagtctaagggcatgaatatcagacgctagggggacagccactgtgttgtctgctaccctcatcctggtcactgcttctgctataacagccctaggccaggaatatgaacaagccgctgctttggatctctgtcctcaccagcctcctggaagcctttgctcacacaggtaaggaggtgaaggaatggtcaagaatcataaagtgagaaaataggttgaagctgagatatcttttccctgcatttatactgaaggtcattatctttctttctttatcccgcagacctcagtgggaaggtgtttgtatttcctagagaatctgttactgatcatgtaaacttgatcacaccgctggagaagcctctacagaactttaccttgtgttttcgagcctatagtgatctctctcgtgcctacagcctcttctcctacaatacccaaggcagggataatgagctactagtttataaagaaagagttggagagtatagtctatacattggaagacacaaagttacatccaaagttatcgaaaagttcccggctccagtgcacatctgtgtgagctgggagtcctcatcaggtattgctgaattttggatcaatgggacacctttggtgaaaaagggtctgcgacagggttactttgtagaagctcagcccaagattgtcctggggcaggaacaggattcctatgggggcaagtttgataggagccagtcctttgtgggagagattggggatttgtacatgtgggactctgtgctgcccccagaaaatatcctgtctgcctatcagggtacccctctccctgccaatatcctggactggcaggctctgaactatgaaatcagaggatatgtcatcatcaaacccttggtgtgggtctgaggtcttgactcaacgagagcacttgaaaatgaaatgactgtctaagagatctggtcaaagcaactggatactagatcttacatctgcagctctttcttctttgaatttcctatctgtatgtctgcctaattaaaaaaatatatattgtattatgctacctgcatttgtttagtgcttgtcatagtcccatatctttatcttatgtctactacttatctatctactaattggtgtttcattggtaattggtgtttcattatcctgaaaactccaattgccaagtacggggaggaaaacctgtaagtaactagaaagatatatcacaaagccagagcactcaatgagcacaacagtggcaatacttaaaagctactaacaatcattttaatgacgattcaaaatatgtgtggaattgtaatcacaattctcctatttgtttttccagctacaaatcgatcaaaaaggggtctgaggttgcatcaggtagacaactataatgatataagtaagcaatagttgagaacctgacagcaagtaataagacaggaagaataaaactagaagaagtcagaatgaaaaccaaaaaagtatgagactgggatcattttgtatgaagacaaacataactttatgtctcaaaaacctcagtaggactgtacaatgcttgattttcataatgttctcttgatgtcatcaaaaaatattatactctgaatattgctcacatgaatatgctgtctaaaattcttccatggattcacacttcttacaggacatgatttaaacctctaaatatgacattgccctctataacctggtcccagttactctctctgaaatgtacacagagagtatacacagaatactctctgaaatggactttccatgtacatttcagatacaactcttagcagagcaagccacatcctaactatcacactgaaaaataattgtcagatgctattactagtagttatttttatggttatgaaaagcatggaacacagtgcctggcacatcgtcaacagatataagttgcattcccagagaagcaaggatcccagagggagtttgagctacatatatgggaaataagacaggcttttctcactgataataagtagagcatgtagtcagtggaatcagaaagatagcatccagaagcttcaggatggtaaccaatgtcatgatttcaaactcatgaggccatttggccagaatgaacagaggcagtcaccagatatgaagaagtaggatagaatctggaaactccataatgggacaatggggtggaagcagaggagagcagacagaacctgggaagatttgctgaagtacttaaatggagcagcaggggcttcataagaacatttcaacctcatttctggtgaggtggtatgatggtttggatatggtttgtttgccgccaccacacgtcatcttgaaattttattcccaatatggtgttgttggaaggtgagtcctagtgaaaggcatttgggctatgggggtgggtccctcatgaatgttttggtgctgttcttacggtaatgagtgagttctcactcttatgagagtgcattaactcttgtgggatcagattagttcttgccagatgtagctgttataaagccaggatgtcccttagattttgttctcttcgcacatgttcacttcgcctttgaatttctccaccatgttttgacacaacacaaaagccctcaccagaagccagaggcatgatctttaacttctcagcctgcagagcgatgagccagataaacctcttttctttatatatcactgagtctcaggtattcttttatagcaacacaaaatggactaagacaagtagaacttacttagaacattgagttggttaggtagacagggattttagcaatatgagaaattattaatttctgattgacagctcatgagttaaggcttgctttacgctttctcaatattaacgacctttccataaacttgtactgtgagtactagaaaggtctatctattcttgcataacagatatttctatcatgttcactaacactgtgttttggtttaacaacccctttgcctaggaacccaagacaattttagaaatgaaaccagtgtacttccaagtgatataatccattcattcaactatttattgagcaacttctcaaaaatacgccaggcaatgccaggtactgaaaatataatattgaataaaacaatcatggtgcttgctattttagaatttacattctaataaatctgtgttaactacatgtgggtttctcctaacaataatcaggctgtactgtaatccatctctcacatgtttaagctttcttctatctcaggttgatatcatagtccacctctcactttcccctaagttaaaggtattatttattcttggtgatcatttgcaactacttgcatagatctcaggatacagtgtttgtgacaggtttcttgttcttgtgaaccctctgcctcttaaaatggctcttttgaacagaatccaaaatgactgcatgtaagctctttcttctatgttgtctgtatttcagccaaaagaagcacttatacatctcttgtccctataaattctagaagtctcagatggtcttaatatagacaactctttcctatttacacagtggttgcagctttctcaagtcctttgagtctcccaatagcaagagggatatttcaagcttccgcagtgattccacagaagcccccacattaggcttgaggttgggtaaagaagtaaaaaataataatcttctcaagatacaaataacataacctaatactccctcaaagcagcaacaacagcaaaacagcagctctctgcaaagaagttctttggaaaagttccttcctatctccacattctgtcttctttgggcaccttgttctagccaaaaggtagaagagttgtagagatggttcttaatcatttccttcatgaattctttatttgagtgaatctgtgtatattatttttatcattaatatctatcatat

SEQ ID NO: 35034 - DNA, 3230 bp, Homo sapiens
catcactgtgaaaatgataaaagttaaagttccctatagcacccccagcacaatataactgttaattcatgataatatcaagttcatattctttcagacttttttcccccacatatgcaaatatttatgaacatccacaaacacacacacacacacacacacacacacacacacacatgcaaatattcctaaccatatggcagcatatcatagtattgttctctaaatagctcgttttgtggttgttatttaatgtattccacacatctgttcatggtaggacaccataacagcacagtccagcataacttttaccaacaaaagaaaatgtttgatagctgagctatccaatatggtggccactagtcacatgtagctttttatcacttgaaatgtggctagtatgaccgactaagtgaatttttaattctcttttattttagttaatttaaatttacacagccatagctccatcctatcctttctaaaaagctgcttggagttccactgtcactctctttaatctttgcctatccaactggtatctcagtggtctcttaaggcaaattcctttaattttagtgacacactcatttctactcgaaacatttgcctcattttccatgatggactattttctaaaacacccacaatatttcctagattcctagtggcagttccctaagtgtgccaaaatcccccagcctgttagtgttacttgttatttaagcaaaatgattcaaatcatcatttgatacatgatggaaatcccaggctcactcaccaaatttctagcaaatattgtgtgtgcttgtaagggggatgggagggcaggagaaggccttgtatttcttctagtcattacaagctagtggtttttcttcctcagtctggaacttactccttgcacatacctttttctgcactgtgccatcatccacttctctttacttcctaactaccaccaactgaaaattatacatataaaagctttaaacaaagtctcttgaggctctcaagggagtttacattacagtatagttcagcaaacaattttaaatcaaatagtacacctctttattcttagaattccctctgccaaaaaagaaatcagctacttttttttaaattcaaggtccaactttctgttgtgttgctgattctcttctctctttttccaacgacttccacttctctctctagtttacatgtctccaaaccttaagcctctgttaatactttcacaataagtcaattttgccaacggtttgcctcccctagaccatctaggctgggcccagaacacctcatcttcactcccactgaagtgttcctgaaggtcagctctcactgaccttgattctgctcccctacactgtcaccagaagctatccacctatggttctaattcagtaagtccaactctctcaccccctttttttgtctcagctgtgtgggctttcccaggatggcatgcaatgggacccctgtgccatgcatattgtaaaggaaaatgcctccctccatgcgctacaaaacagcacatttatgatggcactttgaaaagatatgggttgtggtgtcacatattgacaattccttggccagaggcttaacagtgccagcagtgccagaagattaagaagacagcaaaaacagaaaagggagaagatggtgaagtagttatataacatgagcgagaatgctcctgattacaaagcagagaaattgactttttttcttagtgttttctatagtcattgctctatccctgttctagaattcaagtcatgataagaatttcttcacgttgacttcctgcattgctttcagacattgcaattaaagaatgcgaagaaagaacctcacagaggtaacagagtttgttttcctgggattctccagattccacaaacatcacatcactctctttgtggtttttctcatcctgtacacattaactgtggctggcaatgccatcatcatgaccatcatctgcattgaccgtcacctccacactcccatgtacttcttcctgagcatgctggctagctcaaagacagtgtacacactgttcatcattccacagatgctctccagcttcgtaacccagacccagccaatctccctagcaggttgtaccacccaaacgttcttctttgttaccttggccatcaacaattgcttcttgctcacagtgatgggctatgaccactatatggccatctgcaatcccttgagatacagggtcattacgagcaagaaggtgtgtgtccagctggtgtgtggagcctttagcattggcctggccatggcagctgtccaggtaacatccatatttaccttacctttttgtcacacggtggttggtcatttcttctgtgacatcctccctgtcatgaaactctcctgtattaataccactatcaatgagataatcaattttgttgtcaggttatttgtcatcctggtccccatgggtctggtcttcatctcctatgtcctcatcatctccactgtcctcaagattgcctcagctgagggttggaagaagacctttgccacctgtgccttccacctcactgtggtcattgtccattatggctgtgcttccattgcctacctcatgcccaagtcagaaaactctatagaacaagacctccttctctcagtgacctaaaccatcatcactcccctgctgaaccctgttgtttacagcctaaagaacaaggaggtcaaggatgccctatgcagggccatgggcagaaacatttcttaatgcattattcctctatataaatatacatttagtcatagaaatgtgtgtccttacttacattaaacaaccttacgactctgtcccatgcagtctatgctgcaatgggatgtgcatgtcttgctttggtatatttactacaaaatcttagtctctgtttccatatatttcaaagttttgtccaggcattttcaactagggatgtgagaggtcaaggagaatgggcatgatttttaggaaagagcatccaaatttctaggatgaagaaagggacttttaaaagtatattaaatatgattatattgtgtttaaaaaataaaaagcaatgtgtctcatttttgtaatgcaatctacagaaaataaaactacaaaatcatcgcagcaaggtaaggatagtcaataatgatggattcccttgaaagaaaatagtatcagaattgtcagggaaaagtga

SEQ ID NO: 35035 - DNA, 1548 bp, Homo sapiens
ttgtgtcaaagctctcagtgaaggaatcctgctcctgccccaggatgatgcctgcctctgtccccacagtgtatcccttcttcagactcctcctcatcatgggcttcccatccacccagaacgccatgatccctgaggcggactccagtttacacggaggtacacagtgcaggagaactcttaggagacttgaaaactatcccacttccacccacggatgtgctgtagcctccggtcttttccttagagaggaggattcattatctagtcctcatggcataagaaaaaaaggctatgttcacaggtcaggtgcatatagacatggagacacacaataaaggccttgagtgccttctttagctctgcagtcaggatcacaaaggaattgtctgactctgggaaaacacaaaaccctttttgttcacatctgtaggatagaaagcagagagaaaaaaggtcatcagttaagcttgtcaggccacaaagatgtattcctcgcaatgtaccaagagattggacttagaaaccacagcctgaactctgccccaggccacaacctctcacccatgctggcccttttccctaacttggctttgcacagtcatatttacaggacaagatctcagccatcagcggaagcaatgcctccctgtctgagggaaagcactgggaagctgatgaaaaccaggaaacatggaaaactccatgtttagagaccaggaaactccgtgttccctccctgctattggtgtgcctggaatttggatcattctcttgaaaaaaagtatcagtggctgagattctgggtttgcacatctgagatccctctgtttcaagtctgccccacctcgacctcatatgtgcagcagtcaggatgtctcagctggtaaatgattttccaaaattgcccccttggagccatgaatcaaagctctaagagcaaagagagcaagataaatcacaaaatgagagatcaatatgggttatttattagagaatgtgtgatgcctgctgctgctccaacaactctgtgtggcatcgcctggtgaattaagacagtcacattttgagaatccgttctagggaaatgatgcaaaatattgggagggggaacctttttcacaaagacaaccacttaaaattacttaggatagcaaagagaaaaatggggcatgtttaagtaaactgtatatgtctacatccaccaaatagaatagatagccatttaaatgttagtggtgaattttatactataacatgtaaataaaaatgcttttgataaaagaaaaaataacagacttgtatatacactatttttaaaagaagtgactattttagaaaaaaagtgtaaggaatgcttccagacaatatgttcttattataataatggaattatggaggatttttttcctcactaacttttcataatgggattgtattgcttctaaaatgaagtgtgtgtgtttacgtgagtgtgtgtgtgtgtgcatgtgtaattaagaaccaagggaagagggaatgaagatcccattttatgaataggacacc

SEQ ID NO: 35036 - DNA, 3627 bp, Homo sapiens
ttatggatataatacaaaatggcttaataagaataataccagaaaactgttataagagcttactatgtgccaggcactgtagtaagtgctttgcttgcatgattttctttgattcttatagcaaccctttgagctaattactattatttctcctgctttgtaggtaagaaaactgaggcgtaaagaggttatatcacctaaggtcacatagctagtaagttgtaaagccaggatttggacctaggcagtctgattccagaacctctgtgcttaactagtttaccatatgccttccctaggtaaccatttgatatgcaggaagccccataattcattcctggctatggtctttatggagtaacttctactggtcacttagtactgaaagacagtgttgaaggacacttctggaggaagccagctgctgtcatctttgaggggtctgtttctacaaagaacttgaacccgctggggcaagtgcattccagtcactgaacctggcagcagatccatggatctcaatgatctttagtttttgctcctcaaattggaataatgatagaatgagagtactaaaacccccacaactggccctacatgaatggccagctatctcaaaagagggactgtgcttgtcagagggaatcccttcaggggactcttggacaggttaaagtgccatggatatgttgtgtaatgggaagtgtaaacttacagggacttgatttcaaaggtcattagagaagttagtcacaacttctaaagcaactatcagaaaacagcttggactcactcaagtaaacaggggctttattggcttatagacctgggcagtccaggtgtagatctggttccagacaaggctgattcagagactccacgtggtcaaggctctgttgtttgtcaatcccttggctcctccacttccagtttggcttctgtcctcacagtctctctccatgtggcaaacaagatggctactggtggtcccaggttcacgtcctctcagcttggaaatccagcagcaagaagatgtctcactcccaaagtccataactcaatccttgggaagactgtagttggtcctgctaggaacacgtaactatccaactatcctccagatagggagctggggagatgggagatgggctcctctgacaggacaccctgtggttcacgtccactcttgtggcctgggtatattgggaatgcggggatgaagaaagaattcacagccccacaaggttcgtgtggaaaaggggaggagtttcccagaagagccataaaattaagaaagcactgcaagcaaacaaaaaccagtcatttaagttcttggcagtaacaacatatttatacctagtgcttcattttgctctggaaaaaaagcagatctgctctgctggggcaattctaatggcctttccagtgtgctttgagaaagtggagggactgcgtggtattgctgggcttcccatttcaggagacctgggcccagcagttctatgacatgatgatgagcactctggacccaaaccagacacctggccagtgtcctgattctgagactgaagagccctgtgaatgtgggcaatgccctcctgctttctgggggtcatgggtggggaattaaatagaagatcagcgcttccttctcagctcttgccttatgagttttttataacatcatttctcctttctgggtgttagttttctcatctatgtgaggtaagaaattatctccaagatctgtccaacttgaaataaaaatgaaaacaaaacacctcaaattctgattcttttggaccgtttcccagcatagttaacgagctcccagaccagacactttacctccattctcaggcgctgaggagggtggagcaggcctgcaatgcatataggggaacaaaggcccagagacagagacgtgggaaccatgcagtgtaaaaaagcgggaggtaccagagacagagacgtggggcccatgcggtgtaaaaaaccgggaggtaccttcaggacccacagctgggcctcagggccacagctggggtttggtgaacacttcgccttgcacttcatacttcagtgcccgccagttcaggacattaggactgaagggcccgccaagatagatggtgttaatctcatctggtgacagcacaaagtcccacatgttcacatttccaatgtctcccaccagggactggcttccttcaaagttcccaccgaaggaatcctgctcctgccccaagatgatgcttgcttctgcccccacagtgtatcccttcttcagactcttcctcaccctgggcttcccatctacccagaactccacgatccctgaggcggactcccagcttgtacaaatgtgtactggagctactgtgacttcaggaacctcgaataatatttcagacccacccactgtaaaactgtatcctatatccttagaccaaaatatgagaatctcattgtcttgtctcttggtggcatacgagaaaatactgtacccacgggtcgaggacagttccgtgtagaagtggaggcacacagtgaaggctttgagaggcttcgttaacggtgctttgagggatacataggaagtatccgactctttgggaaacacaaaagccttcctcgacatgtctgtgagccagaaaaacaagcaaatgtgagaggtttctcagatcacacagatctatcccctcacttacgtatagaatttaagattgagaaacagactgaccccttctccagttacacaccacacacacacacacacacacacacacacacacacacaccatgaaggatgctccactgttctgttcatacagtcttttttttttttttttgagactgttcatgcagtcttagaccccacccccatacctcagatcaaatctctcccatagcctggggtggcccttacctgtctggccaaaagcatgagagaggctggtcaagaccaagaaacacaacagcttctccatggtcacgtcctgctgccagtgatacaagggcctgaattcactcctttggaaaagatgtattcggctgaaagttcaggggctagaagtcctagatctcttgccttagagctacctcctcctgcctggatttatatccaaagcagtaagggagtttgcgccactatgtaaataattttccaacattgcttgttggggcaggtgtcagagcttcgggaagaggggaagcaaaattatttcagaacagagaaatcaatgtgagttatttattacaaactcctatgactactgaattaccaattctttatgacaggaaaaatgaagaaatctctcagggctccactttggctatctatcctgcgaaaataatgggaaatggtaacatattaaacgagtggccatctgggtgcacgtggtagctgcctctccaacacctacttcagcccaaatcatagagtttgacaaaggaaatctgacagcttctggagatggacattatcactaacccctttcaatttgcttatttacagactgggaaatgaggaaaacaaacatgctcctcccagagccatggacacatttttttattattattatactttaagttttagggtacatgtgcacaatgtgcaggttagtt

SEQ ID NO: 35037 - DNA, 2769 bp, Homo sapiens
tcctgggatcattcaagtgtaaagcagagtcatgcagggtcaatgagatcgtgaaaagtgtgcacaaccagtatggtctgaatgagtcggtgaggggtgtgcacagctggtgtgaattcagagggcaaattaggtctgcttggcctgtagaaatgcacgttcattaaagcctttatttctcttgcagctctttgagagcatcctttcataataactactcagtaagatcagggaaacttggaaatatcctgtggtcatatagagaggccatgcccacccctccatctagataagtggtttgtaattagggcctgccttcatggggcagatgatacaggtacagatacaagtataggtggttcctcttgtcagttccaaccaggcgccactttgctgctgtccttctatggccaagtttcctccggttagcaggcttcatacatcacaacaggcaggtttatacaccttaacccaaagccagtactgctaacaaattaccttgacatgttgattgcttgccttaactcaccctggaggcctccagaggccttcttcacatcaccacaaacacttccaattagtgcattggtttatcaggaactcttttcttggtgctctattctgctctccatgaccttggttgcctgagtgatacatcctttaatttgttcctacatcttgcttggattttcccctgctcatctctgtctctgcttatacaggatgtgttttattgccacacagacttagctggtagcctctgtggcatcatccaacactgatgtccctcagtcaactctagaacacccataggtggcctctgtaagagacgtttccaggaacagaatgccaaacatactgtttatcagagttcttgagttgcacaatgggaggaaattgttgcttaggatttcaaaggacaccagagaatttcaacacacacctggaatggtgccctgttgcttgtccagtcaatgccaagttaatgatgggaaggaatagctggtgtgtcacgtgattgccaagcactgtcgcaaatccttcctgaggtcaacactcccaaccccgccaaactctacagctcacaaatcagctgcaagtggagcataaaaaatgcaacattgtggaattaactacttatgggccacacctgaaattgcctgattttggttaaagaagtggttacaacacgcccttaaaatcatcatgagcttctaagagatgacaatgactcatagatttatctgtcatgatcagttaaaattctagacataaactcaacctgaattcttaagatcaatggttcgaaagaactgacatttgagaatccatcccattttactttgtagatgcattgatacatttgtggaaaatgacaagaaattaatcttgagctcctttgcccaagaggttacccatagttgtatactctcaacatacctgcaagacaacatgccagagctatgccaggatctgatattattgagtctggttttcccaaatgaagatcttgatttggattagttatcttgaatgtggaaattctccttcctttaataatatcctattgaagtaagttaggatttcacacaggtaaagttactacagctttagtaactttacctaccacaattttagtaactttacctgtgtgaaaaactgacttttgttcacttttggaataaagaaggagcagcagaaattattacccatgaatcctatataaaagatcctgtgtcacagaaatgtgtctggtcttcttcggaaaggtagaccgaccccaatttcaggacaccgcaggaattcaatataaatttgaaactctatgttacaatttacagaggtgtagctaactcaacaactggaaagaataacaattactgcctcttgtttacaaaatttttttctgttcaagacttcttcgaactcttattacataaagtcaactccatgatcagaaaggccatgagaattgtgccaaatgctagatgaagatgtgactttctcaaccccttcaccagtcctcttgtttacctggttgcccaatgagatcgagtctctctattggatcaagactggtgttgacaaagagtcccagagccaaggtgggaagccaggtagaaaaatacaacaagtctaagaattacaggcaggactgggaacgggaaaagtcaaaaaggctccgagccaaatgagaagtcagaaatcacatgcatatcaggagtccaggttaagtgtgtaggttaaaaatcaagccagcagttagaaaccaggaaacccacaggcaccagggagcaatgcaagtccaagggtcagaaaacaaataaaaggccaagacagccaattaaaaagcaccatcatgatgaacttcacgaaagtccctgctgtttcagggaagaaggctcttccttcatttctgtgggagatgtgaccatgcgaggttgtgcaggtagaagccggggatccatgttaaaagagtggagtcaaatgagagaggcgctgtgtctggaatcatgctgaaagacgcatcatgatacctctacacagtgcagtaattagccacctatgtcacatcaggatttcagggctcactggccaagaacagccacatccctgtcagtaccatttttccacctcctggcaccctttcccttctggttcccaaacccaaaaaaattcatactgcccaacggtgatccaaatccttcctgggaggcacagtgctcagactttcccatttcctaaagccttccaagtgaaacaaagaaa

SEQ ID NO: 35038 - DNA, 1384 bp, Homo sapiens
ctgggtaatgatcccattttcatcgccagttagttgtgtgtctttgcaagtcacctaacttcactcaacctcagcttcctcatttgaaaaaaaaatgaaagatttgaacatataactttagtcactcccagatgtgagggtctctgccactgattaccttccctagcagagagaagactggtaaaagattgtccctgtgtggggacagcctatccctagatgatcagatgtttgcccaacgcagctctgaactcacccttacacctacagttcccaatcctgcctctcatctttggaccttgctcaagagcacaaatgaatttctactcctaagaccagacataaacactaatcactaatacatgctcatccaaagatctaggataatttgctttagttacctgtgcctcagttttctcctccgtaaaagtaggagagcaatattcacctcaatgaatttttatgaagattagataagacatgtttgtgaaagtaagttatcgcctgtacagcattgtacaacactaacatagcaactatgattattgttgatttacactgttggaaacactctatggaaaacagaagagaagttgcattgagtcgggacaccatggttcatccgtctgagctcctgccttctgtgggttttctaagcatagaagaatcaggcagaatggcattgaattctgctgtaatcagatattgattttcttcctaactgagaaaggaggattatttaaactttcatttataggaaactggcaggaacctgtttaaatggcccaagtaagttttcacctctttagcaatatcctacccatgtgatcagaggtttccctatttcaagaggtaattgcagaatttcaggaaagccacctattactaattgtaacaaatccatcaatctctacaaagaacaacagacctgtccctccagagccccactcttaggctttgctgggcttactgctccatggatcaccaggctcctgtggtcacaaggaggctgtaagaaatgcaaggccatctaagaggaagttgagcatgctgctgtgttcctcagggatgtcctgaaatgccccctgtttgcagtgttgtgaaatgttgtagattctcttccagaattttctcctccataccaaagtctaaaaactatttgttgataaaggttttaggcaattacttcagaacatagctccatgtgttgggttttctgagcagtcagctatgtagaagcttcagttagcattctttctctctctctctctctctatctctctctctctctctctctctcatccttcccatccacatttgcaggtagcatgcccttggcagcgttgatcccataaacagaatagtaagcaactacttgcctggt

SEQ ID NO: 35039 - DNA, 1750 bp, Homo sapiens
catcctttggtcaagtttattaacctctccagtgcctctgttttttcatccataaaatgggattcactagatcacctatcttataagattactgtggcaattaaatgagtcagtatgtgctaagtgcttagaagactatctagcacataataaatgctcaataagtcctgaggagcaactggattgacaggagaagttggtgctggttattattattactataattattaccctgggtaagtttttaatagttccagcaatgaaaaaatgagaatagcctccttgcagcagtaattccctcttactggaacagttcaaaaagtcgctgataacgaccagtcaatcattagagaggagactcctcgtcctgggagaaagccgatttgtcatctcttaaaccccagggcatccagcgtgaaggaggtagaactaggccggcccgcgaggaggcaggggcaggcgccagtgacgcaatgactgcaacatgccgccagggtgcagcagagcccgaccccgggttgttccatccgcagcaaacaattcctaactcgctccaggtcttccttcttagctgagtgggttgaaccccgtggaagtaaccccccgcccattatgatgatccagccaatcaccgcgtgatctgctcggacggggcgggatcgcggcgcttccctcggtcgctcagagactgggttccgcgttccagccccgccccaggttctgggccaatccccgcggctgggcagagcgacccgagggcggcgccctgcagaccacgtggcccgggaggcgccgaggccaggtaggtggtgagttacttggctcggagcgggcgaggggacgcgtgggcggagcggggctggccagcctcggcccccatgacccgctgtcctgtgccctttcccagcgatgggcgtgcagccccccaacttctcctgggtgcttccgggccggctggcgggactggcgctgccgcggctccccgcccactaccagttcctgttggacctgggcgtgcggcacctggtgtccctgacggagcgcgggccccctcacagcgacagctgccccggcctcaccctgcaccgcctgcgcatccccgacttctgcccgccggcccccgaccagatcgaccgcttcgtgcagatcgtggacgaggccaacgcacggggagaggtcagcgggcggggtcagcgcagggagggaggggcctggaaggtcagcgggggacacgggcggagctggggagaccgggcctgggataacttaactgggctcggggaggcagacagtagggccgggagactgggaagccagtgcgggggagggaagcgctaaacggaaggaactaaagagagggcgaagcagtgcgaactgggcttgaggagaggcagtgaaaaccagctaatactgtgagttgtgaaggagaagggtgtggacagacacctgggagaggtgggggttgaagtcaggtggaggctgtttaccattttctagagtaaagctgtccaaatataatggaacctaagtggctccatgtaatgttaatttttctagcaacggcattcttaaaaagcagggaagcagataaaattaactttggtgatcttaatgagatattttcattcttttttctactacctcttcataccctgttgcgtttttcacactacatctcagtttggactagccacatttcgagtacagtagccacagtagccgtggctactgtcttctgtattgaacacca

SEQ ID NO: 35040 - DNA, 828 bp, Homo sapiens
ctgggcacattccttggcccttctgagaccagtatcctcatctaaagacaaaatggggaacacattacagtaatatccacctcctgggcgtttgtgagaatcttctgggagaaggcagtggttctcagcgctggcactgtaacaaatggcatttctcagagttgtgaggcgtgtggccaataatttatagctataaatagttaaaccagggaaggtggcaaacggcttgttgttttagtatacatagcgaattcaatgttttctctgcaatgacatcactctccctgactagcattccacaaagccttcctgaatgagagataaaggatctaatcccctgggaatttgcccataggctgcagcctatcttatctgtgccacagcctgtgggagtgcagcaagcaagcaaatacagtctctcccgaggtgtggtgtggcaaggctaagcgtggtgtggggatgaggctgacagccatggctatgaagaattggcattgggcctcgcccctagtgggtgctttttggaagagggagcctcagagaagcaggggaacaaaaggggagagaacaaaagctctggatacaaacctgtttccctcaggcacagtgttgtggctttctcctcctaggagacagagataccctcaggtagaaaaggggaaaggggcaaggaaggccaggcctctgggtgaggctgatggggctggaacttaatgtcagactggcccagcgtccctcaaattccccctggggagacacagagtctgactgggaagccttggggtaaaggtaacacctagtggttagaaactatgggtggggctccca

SEQ ID NO: 35041 - DNA, 5429 bp, Homo sapiens
tttagccagtgagacccctgttgagtctgtagaactgtaagatgctgtatttgtgttgctttaaatcactaagcttgtagcaatttgttacagcagaaataggaaactaatacaggagccctgggtgatatttttggggaaacctggagaagagaaggcaagacggggaaatacacaggagggtttctttaacttcgttggaggagcttgattagcaagaactgggtggtttcccgaccaatggcctgagttggcggacctcactgtggcagtgtgttcccaccacactcaccacctgggtctgacactcaggggctgagcaagacccgggcatggtatggatgccaaggggagccaagaaccaagaatgggccacagtccccattttctgtcccatccccaccctggtttggcttttctctcttctccaaaacagagctagctgtcaggctgctcacgaaaggggacccccaggacaggcatctgcgttcaaggggaagaaagagagccaccccttctaaccacatctggctccaggccaggttggccttcagggatgaagtcactccagctccccctctcccacacacccaggttaaacaatcccgtcaccccctctcaatggaccttggggctctgcgaaatacaaggggaccagcctgcctcaaaccctcaacacctctcggccgcagaggctgtgtcttgggccagtccctcccgtcccgactccaacatggctgctcctttttaccccagcttatcaagctgcacatttccggcagatcctcccctaaatcagttatttttaaacctcattaagagcaacccgccccctccacttcccccagcccgaaagctgggccagataaatgtcagtctgggccccgacccacagcgccaggcacacacaccatcagcttggggaaggcaggcggggtggggtggctgagttctgaggagaaaccaagagaagcatccctgcccttcccagaggccactccaccatagaaacctctaacctctgatgcacaggggaatggctggaagacaggtaggaagaggaaggggctaagagctactaccaccagtaagccccctttccgcagcccagttccagacctctctcctgggagtggctgtgctcagggctgtttccagggaccaagtggcctgaggctcggggatcaccatggcacaggtaaagaaagggcaggagaatgattaacctagacactggggttaagagcagagagaaaggcctgaagccagacacttccagtgccccccaaccccccaaggcaggacaaacttggcctcccagacccaccactgggtggaaagtggatgctgaggaaccccctccaccgcccaacgctggggcctggacacagctggcagggtcacggcctccagctgcagtgtatctgctccactctggggccattgccctcaagctctgaggtgccagagccatagggcggggtcctgagaaggggcagttccaaccaggccaggcctggtcagcagctgtttctcttccccacccccacgggcaggcagaagctgatgggctgcggctgctggagctgggaaggcccaccctagggacacccaggggacctgcccctgccttccctcaaacataaagaaaacagtaagcaagttgcctaccagggtgagaagagatatgcccagctggaagacaggtgtgggggacccccagagctggggaccccaaaggaaggtgacagctgaacaacctgggggatggactggcagggagcaacctaaaccctagcgctactgcagctgtgagaacaaccctcaccctcaccctggagttacaataggcgggaaacggggaggggccacgcaaggcactcggccccacccagaccctgggctggaagcttacctcaccaaagccaaagccaaagaaaaggcggacatgggtgggggcagggaggacttcagggttcttggctagggtgtttaattgggaagacaaagggactctccatccaccgtgcagatggaacacaggagaacttcccaactcagatttgggacagggagtgttctcaaagagcagcacagtgagggcaccagcccacagagcgaggtgccacagccagcagcaaggatggggggcggcccacaattaagggaaccaccgtagggcagcccctcaccaccgagagtcaggagcagaagagaaagctgaggctacacaaacaggaagctccaaagcttgcgtgggaggaggggatgaggtgggggccgttgccatggcttctgtgtaccaaacagtgttggaggctgggtgggggctccgggcagaaacaccctgtcaacacagacgttgtggtgagcaggctgtgagcacgggagcagaagtgggatcgtctcagcagtgctcgggtgtagccaggtgcaagagattattccaggagacagctatagtggggatggacagcgtgtgggggaagataggaaatgacccgtgttggggtgaagaagaggactcaggaagtagttgttcaggagaagaaatcccctgggaagggaaagtgttctgagctagagaacccacagctgaaaattctggagggagaagggatggaatgaagaaaggattaggggccaatcccggggtgggggacaggggcagaggccttggggtgagggagggagttgcggttggacaaaacctatttgttggttctggaatggtagggccctactgggcccgccctgccttggcctcctctgcagttgtaggtctgccccttgtagtggggaggagaaactgggagggggctagagatagagagccattgctgtctggtgctttgaagtcaatgagaacactgggggagccccgtcccagccgcaggtcttctacatcgaatcccacactccatccccactctcaccccgtttctctctgccccacagataccaactgctcacagatctcccaggacaccggcttcaggtagccccaggaggcacagggcgcggggggaggcggcagtccacctccggtcctgcaggtccggcctcccagccgccgccccccacccccacgaccacaccctgggccgttacaacagatgagtcacccaccgccctcccgccgctggggtgacgcagtggtctgggcagcccgcccgtccgcccgcggccaccaccggctttcccagcagcagggggcacccggtgggggcagcggcgctcgggcagggtaaaagcagccaccaccacccccacaacctcacacagggcaccccggggcgcagtcagggctgcagcacccagacccccgaggtcaggggaccgtcatagagatgactggagcttcacagaaggtcaccgtgcgacccatgcagagccccctagccccagcccgtgacctcaagtccccagaatagcaagctagcaggaacaggaatgaaaagggcggcctcggggactcagagggcacgcagtgctcacacgtgctcctggaaccaggaagtgaagggtcgcgcgggaaagcccaggagcacgagctggcccagggccggcgccacgacccggggtcactcggggccagccagctaaagtccgacgcccttttttcccctcgccccagtgaggactcagcgatggagcccgcgggtggggctcagtccctgagtccctgctccagacggacgccctgtctatgcatgggctaacctcgcctgacctcatcgtccaacaatgtcgggtcagggcttggggacaggacctgacagcacggggcggggtaaagtagtcaccggacccttgcctggtaccagcccttgatccccgagctcgctggagcaagttcaaagcgctggcttcttgctttctacacagcacgcacatgtccccgacccccgtacccccgacctgctcaccgttcaagcgggctggagagcggcgcactgactcaaggcaagggctgcagctgcaagtggtgcgccctgcccagccggggattttcaggagggtcccgcctcagacggggcggacccggggcggggcaagggccaagaaggtttaaaggcgccgcagcgcagaaggagggaggactgcttgagacagagggacagtagaccagagcaagggttaaaggttcggggagtctgaatctacaaaggcggctgcagtggtctccacccgtgagtacctcagcctccaccgagagcccgtagacttgtgccccagtaggaaactttctgcctagaaagttagctaaacactgtgggcgtgtttatgtaggaagaagcctcctagtttagaggctggcaaggtaaaaggaggcacaggaaggccttcccccgaccccaactgactagtgtgtgacaggactgggacttgcaggccgggacagcacccccacgtgatcttgctcacctcttacttcaagcctgggcagggactaacagtgaggtcactctgcccagggccctaggggtgttttcggtgttgggacccagggctcagacctgtcttctccctgcctttcatctccttttctatgacctggtatctcttcctaaatcctggagggatcagagggggagacctcagcgcgaggaggctggctggggttcttttgtctctgagggtggaggacagcacagttcaggggtggagaaagagccccccatcctttcaggcttcagttgaatagagtcccccggggtggagttctgcacacatgatagagtcctcccttgaacctgagattccaggatgtcaatatccagtcctgtccaacctttctattattctctgttccctccccgagtcctacacagccctatattccagtcccactgattgtcaagcattctcactcttctgtgcctttacaaaggctattcctctgcctaggacagtttcccttccttgactggctccccacctgctctaccctttacctgctgtgtgactgttgtgcattctatgcttgagttccctggtctatagaacagagctaatagtactacctaattcatagaattgtagagaactaaacagtccacctatagggcttagagcagtgcctggcacatagtgaatactattattaccaccatctatctgtgagggtcctgaggactcccccccaatatgtggcatttgtcccagcacacgatattagcgttcactaaaggtggccttgaatgcaacatcttcctttgtgctacaataaccaacacatagctttatcacggaacttatcatacggtaactatttctttgtccgcctcactgactagaaagaactcctcaagggcaaaggcgtgcttccagagctttgtattttctcagtatctacttcagtggctggcctttagtagctggcctccgtaagcactcaataaatgttcttgaatgaatgctgaatg

SEQ ID NO: 35042 - DNA, 496 bp, Homo sapiens
gggaaaggcctggaaaagataaatggagaaggaagcaggtggagccagaagggcctcagaccttgatgcgtctcacagtctcagctgacttagcagggagctctggcaccgactgcccgttagagaaggcctgtggtgggcaggcatgtccaggcactgggactctagctgtgcaagactgtcctggtgccaggactcttgctgtgcacagccatgggctggggctgccgggaacagcgtagatcccgaaggtgctgcagctagagcctgtcggttaactgcacttcttgcagccaaaaatgtgtttactcttgaagggggagccgaggctgctacagtgagtatgctgatagccagaaggtaactgttcagatttattaaacctgtctccataagtaggcataaacagtccatgatgcctattgaggagaggaaaataatttccaccccactgagctctccgagtccagtgtggagaaagtcacttctgagagca

SEQ ID NO: 35043 - DNA, 1296 bp, Homo sapiens
ttgctgcaacttattttcctaccctactttcttctaacctcatcttcctaactagtattttatcttgcgacagtgtgtacattttctaagacgtgtgtgagagtttagccaagtgtacagtcagaaagaatacagtctacacaggacagccctcacttctgataccaactgcaagttcaaggagttccaaaaactaccctcagttttaataatttgctagaaggattcacagaatacaatgaaagctgttatattcatggttatgtcttattgcagaggaaggacacatattaaaatcagcctaggaaagaagcgcacagagtccagggaagtactaagtacgtcctttcccatggggttaggacaaggtactcttctggcatcagtgtgtaacaatacacacacaatatttccaaccaggaaaactcgcccaagcctcggagtttttactaggactaaatcacacgctgcccacgtggctgactgtcagtcaccggcccttccaaaggtcaggctgacacctttgttctccagtccctctggaggtagaaatgatagtgcttggcataaatccctcatcataaatcacactgttgaactgtctgatggccaaggcccttagacaaacaaagacactcttatcaggcatggcattccagggcctagagatcggcagcccacagcggagggcaaaggccagacctctctttgggaaaggctgattcttcgctaggcaacaaaaattcatctttagaacaagccaacaagaaggaaggaaggaaggaacaaaccaaccaatcaaactggactcctcaatcctgccctgcactgacaatgacactgctggagaacaaggtccctcagggagaagtccagggtgaaggattctagcagggaccctctgtgctcatagccgttgagcccctttatgagctggtaccctgggttggagaaggggggttaagggtgccacccagctcttagtgaggtgaagagagatatcacatagtgtcctctgagaccaaggaaggtgcagagatgctcaagcacatcaaggctgacttggactcgttctatcacctcattttattgggtaagattcccaggcagaaggttaggacgtgcagtagaaagtgggcgtcctggcagctttgcaggaccatttgggaaggacgcagggtcagggtcacagttgacacccaggcccttagagctactttcgtgaatcttcaggccgcacctggacaaacagctattgtttctcccctggcactctgaggagtcctggggaactca

SEQ ID NO: 35044 - DNA, 984 bp, Homo sapiens
aatcgtccaactacttggtttgaaaacactcttcaaaataatccacggatcaaacaggaaacgaaaactgcaatttacagaactcttgggcaataatgataatgaaaataccacatatcaacatcaagagaagacatccacatctgtaatcagaagtgtaaaatcaactttagcctaaagctgcagacttacttattttaagttcggtctaaaggcttctcagtacatcgtgaactgtaacctacctggatgtataaacagactgtagcctacttttgtgccaatcaagtttgggccaatcacaggctgccaaccattcaaactgtgttcaaataagctaaatgcctgagctgtaaccaatccagctgtttctgtgcctcacttctgtttcctgtaagtcacttttcttttcctgttcgtaaatattgctccaccacacagcagcgccatagtcactctgatcctattctagtttgggaagctgcctgattcacaagtcattatttgcccagttaagctctgctaatgttaatttctctaaagtttatcttttaacagaagtgacttcaaagggtttgaggaaaatggtaatgaacatttgttgagcaattactgtctgccagacactgtgctaagcacttttacaagtggtttctcaatgattccccataactaacctgaattgctttaattatcaaataagaaagaatgagaatatatgaagtaagcatataactcaagatgtcaaaaagagggatgttaaattaagctttagaaacagaataaagtaataaagttaagagatgaaactcatgagaaacctgtgaaggaacagaattgatcaatcagccccagcaggtgtacatagcagaagctgtcatgcttctcccatatgctcagagccacatcacttcagtgtcttccaaaagaattccaatgccagtgtctgcattcctttgcctaccagccttttctgagactgta

SEQ ID NO: 35045 - DNA, 1499 bp, Homo sapiens
gctctctgcagtcaaatacagcatgtagaagtacggagaaaagttgtgacggatatcccgcctagtcaggtgataaaagtaggtgtgttccaaaaattcccagccgtactcatagtaaaaaccaaagctcagggcaaaaaacgtgagtccagcaactgctacaaacagcagcacagcccgattacacagccttttcaggagctcgtacaaacaagcctggaaagtgtaccggaattgacggaggcttttgtcattgtcgcgatctggaagcaggtggagggttatgggaaggatgtaagtcactggatatatcttcatatgcaccgcgaaaccatagaatacagctgcacacgcgacgagtcttttctttatcaagtagaggaccatcaggaccagggaggcgacaatagagtccgcattaccgcggctggatactgccataggcagggggttaagaagccaaaagacacagtagccacaagcctggcggcgccccagccccttcagcagcagcaggcggtataagaggaaagcggtgaggaggtcgcagctgatgaagagaaactttccaaagagctcgctgaggtagatgttgggagtgaggagccaacccagcagcggggtgtaacggtacgtggctctcaggtaaggcgagcgcccctccgtgacgaagcgcgcggcgtcggtgaagacctggtagtcgatgtccgtatacctcacgtgcagggtccggtcctggaagacgccatagaaaaccagggcgactctggctagaaaggccacaccaaagacgccggctggagccaccttcaagttcaggagccattcgccccagtgcttggtggagcccatgatctgaccgtgcgacagctgcttagccccagctccaaactgccttcgtacttctaaccttcccttcggttctttgcagcaggtggccgccgcatctcccacccgccaggctgccaaccgaaacgactgcagactatcacatccggcatgaagccccgcccccgtactgctacctgtctccagccccgcgcggtcttctcagccgcccgagccaaaaacttgccttcctctggatggacggtctcgcttccgcttcttcttccagcggaggcgggatttccggtccgtgggaggggagacgtccgcttgccgggaaatccggcactggcttgaggattttatggagtggagtgagatttctttgtaagtgacagcccgccgccccccgccctcttcccgcgccccatttccagtcctcagaggaaaaccctccgacgagcagcgagctgcgggctgcgcgctacatccttcagtcctgggctggagatccgagagtgaaaaatgtaggagtgaaaggaagataagccttctcatgctttactccactagctcgccggtattcaccggggatttgtgggccccggacaggacaggatgagttgaagggggctgagtgtgtatgttccatgcaatattggaggcatact

SEQ ID NO: 35046 - DNA, 683 bp, Homo sapiens
ctgcagccaatcgctcagcatagggagctccagcctccacggccaagtctgaccggattcccaccacttcctgcagagttgaccgcccaactggtgcctcgggcacagatcgcccaaaggacactgccaggtgtgtgtgcttctgtgtgcttgtcctcgccaggcagcccagtgccagctcctgcccctcatgcaccgtcatgcgtgggggtgaggttggggcctggcggcctcggggccctgggggggcagcagacacctggaggacatctggaagaactggagagaacagctggagtgagggagggctgggagctggcagcccttgttactgtttcctgtgtatagcctatctccctaaataaactgtgagctcccagagggcaaagatcgcatgttgtattatttcttctgtaactcagtggtgccaagggcagtactgggcacagcacaggcgctcaataaatacttgtagaatttcatagaaccagcccatcgcctactcacccttatgtttgagactgacctctgtttgaaatactgagaaaagcggctctttcttctcagaagacaaagaaacttaagagagtgagaatgtcacatggtctaactccttccctaactctactctctttcccagatctgggtcctgtactgtccaggagtagaggctattcaaccca

SEQ ID NO: 35047 - DNA, 2180 bp, Homo sapiens
caaaaacaattccactgtcattatccccatgcatccatgcaagattggcccagaacaccccaccatgaacacccaccacagcaggcacaaggtgcttggagatcccaggatcagtctccatggaacctggtttctcctgaggcaaggaagctggaactaagcggtgtgaaaactgatgggtggctgcagagccaagtgccatttgggagacaggaagaagggcaaagagggacccaacccagggtggagatgggggtgagagagggaactgcccccagttgatgaagtgcgtggagcgcaactgggagagacttacttcaaagatcgtgggcagaactggcctctgggcctccagccaactctggggcaattatgaagctgggcaggcactgccctcgtagggcgggcacccaaggccaggcctggagctgagtgtggggcagaaaggagtcgcagcatttggtgcagcgaccccagtacgtgggtatgctagctgagatgtgtggcctgccccgggaggccgagcagtgcctggggcagcaccttagtgggtcctctctacgccccagtccctggcttagagctggggagcctgcactcttcccaagactggctcggcggacagccacaaagcgcagctggacgccgaccccggggaggctggaggtacccctgacggaggaggatgtgaggagccccgaaatgctaggggggtgctggatggcaggcacctgcccggcagggccgggaaccggaacgggggcctggcttacctagcattagcagcagcagcagcggcagcgaaggcggcagcagcgtgggcctgagggcgcccatcctgcgcggccagctctggggaggctccgggggatggcgcgggttctggggggccggaagggtggggggcgcatgcccaggttgagggcaggaagcggggcagcgaggcgtgggtgcgccgagcgagctgaactggagctgccgaatcccctccctccgcccctcccgctgctttccctccagccctcggcagttctgaaaccattctcgccccggcccgccccggcaccgccccttccaccgccccgtctaggcccgccccgccccggacccagccttggccctgcctgccccacccccgccagactccggcctttgctccgcacctggccccggccccgccccgcccctcgaaactcacctttgagtcgcatcgagtcccagccccgccccggccccgcccctccccgccccgccccgccaagactccagccctggatccgccccgggcctcggcccagccccagttccggcccctcccccgccccgccccaccaggactacagtcggactccaatcctggctcctccccgggccccggccccgccccagtcccaagccgcaccccttccccgtccccgcagggctaacgtcagcctccaatcctggctccgccctggaccccggcctcgccccgcccctggccctggctccgcccgaggcccccgcaggagtgagctaactgcacctctgcgcatcgaaattcccacccaccctcgcacagagcgcattccaccccgcacctgccagcctttcctggagagttgggtgcagggtccctgggattggcgaggtgactgtgaccacgcatttagaattcagttatttgctctgagccatagtcctcgctgcaaaccctgctgaagtaggggttggcggaagccaggagttcctgaatgcgaagggtttgagctgaagggcgcttccaggatccagaaggtcactggagacctgtttttcaccccctcagagggcaaaaccaaaagaaaaatggattaggagagggggccgtccatgtgacgtcatttctgggttgggtgatcctagcccagttgtttaacctccttcaacttcagttttctcctctgcaaattgaattgaggttgatcacatcacccaaagggttattgtgatgataggtaatgtacataaagtgtttggcacaggaaactaacacaaaatgggagataaggattattttgttttaggttttgaattattatttgaactgcttcctaagaggcttagtttagacctggcatttaggtgaaggagtctctatgttcagtgacagtgggaagagatgaacattgctctgttctaggaagagtggggcttgccct

SEQ ID NO: 35048 - DNA, 2155 bp, Homo sapiens
tctcctactaccaggaggccaagagctccaagatcatggattccttcaagaacatggtacctcaggtaagatggcagggctgggctctgggctaggctgtaaggttttggcaagagtccagctcatcttttgtcagctcccaggctctaagatagagatggacagaaaagatcctccagctttccatgccagcacctaattgtttatggggcttctccttctgcttgacggtgtgggagaccagcaggagaagaaggcaggggcagagacaagcatttcatgagctgcctgtggctccccacagcaagcccttgtgatccgggagggagagaagatgcagatcaacgcagaggaagtggtggtgggagacctggtggaggtgaagggtggagaccgcgtccctgctgacctccggatcatctcttctcatggctgtaaggtgaggaggtcataccagagcaagcagttgagtctaaggagaaggctgtgtgcagagctgagaggggcccagtgaggtttaaaggtggagagacccaggtccaaatgtcaacaccatgcctatgcccctgctaaaccttctctcagtgtggggtgcttgtgcagtgcctccttgcatctgtgtgttatgaatgctctatgccccaggtatttctttgttgtccactttttagcaatcatgtattgaataccaattatgtgtcagctgctttatatatgttcgatgtgctatctgatgtaattctgaaagagtggtgtaatcatgcagggctgctgaatgtggccacacacgttgcatcctgaatgaccccaggaggtgcattttcataactacagtgttagtgtctccccctgtggttgtgcaaggcagagattctgtttacattcaccattttacagttgagtacatggaggctctcttggttaagcaagtaacccgaggtcacataagaagtcaggaggagtcagaattccaaaccagggcaggggcaatagatgagtaatgccataaatatgtgatgagggcaagtgtgactttgttcctcgtgtcatgaagattgagtgtggttggaggtggttcaggagacagctgtgtgcatacaagtggctctgccagtctgatgactatgcactccttcctcctcaggtggataactcatccttaacaggagagtcggagccccagacccgctcccccgagttcacccatgagaaccccctggagacccgcaatatctgtttcttctccaccaactgtgttgaaggtgagaagccaggctgccccctgtaggaaagagtctgaatcctgaatccatagtcaggatgaagggctctggtagtacttacctggcaaaagctctgccattggtggggcaattgaggggtcagggggccctgaatattatggaaacaccctccacagagcagggtattgactgagggcagcctgactccatgggaaatgtatctcccttccccagggagatctctgttctgtccaccccaagactgagtggatttcaaagctttcaggtattgggttaagaaccccttacgcatgcgcacacacagatgcacatacgctcagaaccaacctggattcttaggagtctttggatttgattgatgcttctattccttgtggttctgggcctcgctgcccccttcgataacctttgctttggccagggccccagggtctgggagggccaagaaggcattctggccaggtgaacacttggggcctacttcaggctgcttctaacctttgttacatcaaaagacatgtttcaccatgcacagactacccagtttgccccatccctgttctgggttctagagataaacaaaggtcaataagaactcccagagctgccatcacttaatggcaggggtccaagcacaactgaaacctgtgccctctgtggtaaagccagtgagcagagtcagggctgcatcagagaaggagtaggagggaagagacagaaagaggcctcactagaccagtggcctctgaaaatagggcaaaggaggcctcatatcccaatccacacttcccctgtccattactcatttctcctcagtgtattatgtttctctgtggtttttttcccttcttcgacaagttggaattccactgcttggaatccatgaggga

SEQ ID NO: 35049 - DNA, 603 bp, Homo sapiens
cagggaatgctggggagaggaaacagcagagaaatgctatgaaacccagagcagcaggaacttgggcctcttctaggaatggtgtagacccaagaaaggaggggctcgtttgaggtttctggaggagtctctgccaggtaggaactgagatgagatgggtgatcctggaagtggcacaaacactgaggggaatcccccaacctgggcctgctggagttcctggcaggaaggacctacccagggtcagacttctttccagggccaaaccctgcccagagctgaggcaagaccccttaggctatagagatgggggtgaaaacagatgcttctccaattcttcctttcctcttttcagtctggctgagaatctgggggaggaaagtccctggggtagaggggaagtgagagctgccacattgggcctgggcagaggggcagagctaggagatggagctaagtgtggctttgcaagttgtctatatttgcatgctgagctcactgctgctctttttctccccagaaaataaaattacatcatggtagggggaaggcaggagtggggcatgtttgggaaaggtgagaggcacgcaagagggcctgaag

SEQ ID NO: 35050 - DNA, 1759 bp, Homo sapiens
acctactctgtgcctcccaggggtcctaggcaccgtggtcatccaaaggtcaaaaggggaggagggtgccctactgggtaagaattaaatatgagaattgtttcgcagttcagggggaagagaccgtctccgctccagccctccgcccaattctgtcccccatcctaggagtcttccagaaccccagcccctcggtcccccgccccctcctgcctctccatccctccccctcctcccgccattccccgccccccgcccctccccggctctgacatcaccggccagccgggtggagtgagcggcgctgggctcgggctccggctccgcgggcggaagaggcggcggcggcggcagaagcggcggcggcggcggcgggagccgaggaggaggttccggacgctgcttaggaaccggggactcaggagtgcccgcgccctgagcgctcagctccagaggcggtgagaggggcggagaggagacatgtcgcggggaaggggcagatttcggggtctaggcttggaggggcaacgatctgggacaccgggggccagacggggagtgtggggaccccggacgagtccactttgtgtcaggcctcacggggtccgtccctcggtcggtgcgtcccgagcgccgagcgtgtgctggaggcggcgtggctccggccagcccgttccacgctgaacggcagtttgggagtcggaccggggcctgtggattaggatgcagcctgcttcccgcccagccggctcggccaggccagcgcccgcccctccctccccgctcaggcttcggactcgcctccgctggcggtctcccggcccagccctgtctcggttccgcgggcggctggtaccatgtgccctcacccccagctcactgcacctggggaagaggtgggcttggcggaaagcttgtccagagggaaggaggagctgggggtgtagagaagtgatgtatatctaacgtaaaaacccttattaatttcatataatccgtgtcaaaactgacagggaaacacgcacacctataaggcacgccagcacacacagtgacacacacccatgtgacttatacacatagtctagcacactccaaatcacaaacgtccctggactacgcatccggccgcccaccacacccccactctgtggggtggggcatcccatgaggagtcttctgaactgcgggctccaagtcatcagtccgacaggacagctgagtggacagaaagggccactgtccccaaatccatcctgattttctggcagcttttcccagccccatggtttcagattgttcctctttaaaactgtggggaaagatgggagaaaatcttggtctcattcctctaacacaaggagacaggattttgcggactaatgagggtaggggcttctggtggcttctcttcctgggtccagttagggcttagcgtgctgggagtggctagtttctgggtaagagtggccaagggatggaggaggagggggtggaagaaacggagaggaaaaagaatgggtatgagtcagccaagaatggaacccaagtcagagagagaatgagaggaatgtgtgtgagaagcagacagacatctccagagaggtctagagatagtcagggaaccagggagagggaggaagtgagagaaagagatggtcagagaagtgcaaacagtgtttgagagtgcactaaacaaattagggaggatgaaggttgggggagaccactgggagttagggaaagtggtacgtgtgtc

SEQ ID NO: 35051 - DNA, 646 bp, Homo sapiens
gcaagacacagtctccaaaaaaataaaaaataaaaaatcttttccattaccaaagaatacagtcttaactttataaactgaggtctgcagagaacatatttgattcaaatccaaactatcttcttcacttttcactgtatttccaacaaatccactatttttactttgatcaactttcatgtaaaatctagtccaaagctaatcttgctgaggttggaaaagctgatgagctcactgtcccaggtagttggaggagtttaattagattagctccactgttcctactctaaaaataaccataactcctgccaaactgaaggttaaagagtaacccactggagggtgaggaaaaaagacccaggtgccattttaatttcactaagaaattccagtgacctagatttttcttgtcttaataagaataaagccttaaatttttaaccaattacatgacaaaatattaactaaaaaccaggcagaaagactttactacgctggataagagtactctgtaaaagagataccaagtgtctcttgtttaaaactactggggctgctcttttcctctaatatgatgaaagatctgcataagagactacgtatcccttgtccggtgtatcctcttacccaaaatgcttggggccag

SEQ ID NO: 35052 - DNA, 2586 bp, Homo sapiens
agaagcccacagacaattaaacttgtaaaagtaattcaaccagagctggaacaaagccaagaacaacactcaagctctttgggaaactggtaggaattttatgactttagtggtcagcagttgagcatcagcgcagtctgtcttgaactcaagaattttaatgcctccaactcccactcacctttcctccttttatcactgaagtaaggccaggctgagctcctgagaaaataggtctgtagattcactgaaggactgagaaaagttaaaatttacatggcaaaggtgtgtcttctactgaacataataaaaatatttatgaatacactttagtatttttaggccttctcaaaactacttaaaagcagaatactttatctaattctaattactgaacaaataacccacacacatatggaaataaaatgaaccaacatgaagattagaagccaggcaagtaatctcccagctccactaaaacgtaaagtcatttaaaaggataacctgaatcttttcaacgctaaaccataaccaaacaacctctcaacaagaagccacagagcagggggggaaatcccggagagaatgtgatagcgctagtgccggtttgtttacagagactccagtaacaatcatgagtcagaaattcaagccaccagatgctttccaactaacagggaccaaatgggaccgttctaagatatcctaaaagatttgggagttagaggaggtaaactaagataattatattacaaagggtacaagaccacaagacaacaaccgactccggaattcttggacctccgccttccgtacaaggtgctgggcctgggaacttgggatgggggagggggacacattgcgcggtggccctgaggtgacggggagacgcagggcgagccgtgtccctcaatctaaggggagaaataggagcgcacacatgggtcacccaacgaagcaaggcgtccctgtgaactgtgcggctggctcttgggggcaacaccagggctgacctgaggaaagggcaaccagtactcccagcgatgacttcgggtcggcggaaggaaaagacctgagcgctaagagcttgggatacgggtcaggcccatccttaggggaaaccggctgggaagcgagggggggcgcaggccgagccggaacgagacacagaccgggtaggtcaagggagggggggtgtccggctggggcagttacaagcacgggaatcggcgaggctcagcagcccgcttcccgtcttgggtcatccttctgctagcggctgctccgactgttccaggcccagccgccccgtccactgccaccaccaacgccgccgccatcttacactggccagcggccgccaccaccaccgcctccgctctctgcgcttgcgcctgcgctgccacgctttccggccccgtttgcgacgatgtgctcgagaagactgagggaagagtggtcgcgcgagctcacggctcgcaaccctcctcgaaggacgcacaaggggcggggcttaaggccaacggaaaacagagcgagaggcgcctgcgcattaccgaagaggcaaagttgtttttgtagtttcttcgggcttgcttatcttgtgatactctaaacaaatgcgagttaggggctacccagagttgtgatagaaataaactaaatttccagcggattggcaggccacttcctggatgatggccagttttgccgtttttgaacactggaacgagcaatgattgccacaaggatttcttctgaaaatccccgtttcctttcagggctttgtttccttaagtggtttctatactatcgaggcccattttcccctgagagtccccatttacgtatttttaaagaaggggctcagtagcttgaggtgtagctattccagaagctcttttctgaagagaggtggtgtgggtaaaggttcccaagagtgggccgggtgatgtggggtgacttttgtactctgtttcgttatgacacctacagtaaccctgcagaggattactcccagctgccaggctggggtattttttttttttttcttaccagaagcccagggtgcaaaaatctgaccctttctcacctcccctaccgctactctcctattccaagtcattacatattacttaagactaccgcaatagaaacttacctcgtttgtctacttccattattgccattacagttaaacataaggcagccagagtgctttttaaaaatgtaaggtctggccgggcgcggtggctcatgcctgtaatcctagcactttgggaggcggatgtgggcggatcacttgaggtcaggagttcgaaactcgtttgaaaccaggccaacatggtgaaacccgtctctacgaaaaatacaaaaaaaaaaaaaaattacccggcatggtggagcgcgcctgcaatcccagctacttgggaggctgaggcaggagaattgcttgaacccggaggcggaggttgcagtgagctgagatcgcaccactgcactccaggctgggcaatggaatgagactccgtctcaaaaaaaaagtaatgtcgtattatttccccagtccccaccctgctcaaaacc

SEQ ID NO: 35053 - DNA, 1538 bp, Homo sapiens
atctatagtgtctcccttgccacaccctaacgattccctagaaatcccatacaaatacccaacagtagtagagaacacagatgtcctcatccctctgaactcactctggagctctaaaaggaataacttggtgagaaagcacaggacatcccacccagcttcctgttggtactggtaccagcacagactgagggactacataccagactccatggtacggcattaaactatcttctcttattctccagtttagtgctccccaacaaccttctagagctccctttggcctgatctctgcagataaccgtacactaatttacacagtcacttggcactcctcagggtttctgttcatttttctgcctgcccacatctccgtgattgagcaagcgattacaaattcacctctgccctgaaaagcctgtgtcctcaccaccattctgttcgccaggcctagggagagagcactggccctactctgggcaggaagtcaacaggggagtggagagtaatgctaagaaaacatcccccgtctttcaggagggtgaactgctttcccctgaaatcgccacatcctcagtttctcaaaataagggaaaggagtccgcttgagctactgacaagatgaaagaactgttaaggggcctaacgagagaaagagaaaaggactaggaggagaaaagtgtctttcgtgttaaggaagacaggacgaggcacacaaggaccggccacgagcttgctaggagttaatgtaagcaatcagtgagtgcgtagttcgctacccagcaagaaccaaatgctgctgctgctgctactgctgctgaagtcgaactttaagaactcagtaacctaaagaggagtttgaagaggtatcatgaaacgccgtcctgcggaaacatccaccatccggaccactgagggaccccaggtgagctccccagctccagtcgccggggtggggcaggatgacccagagatttttggggggctcgggggtcagactctccgcccccatttaacctttggagagcctctcctgcccgtccctaatatctcaggttcacttaacccccagaatgggtcctcacacgtgccctcttcgggcctttcccactatgggctcttactttccagaagctcctccaattccctgtccgcttcggccccgacactacagccttcctcagcggcggccatcttgctacctccgacttgccgtaggaggcgggacctcctcggtgccgacacgccctccaccccttcgctcccgccctcttctgcctcgggtaaccaatggtattgttgaccagtgcggaaccgccatttttaaagggccaggaagctttgagtgtttgtgttttgggtatttttcccttttctcctgtgaaacagaattagggataagatagggttattttctgtctggttttagaggcccggactcctttctttcaacttcccaaattacctggcgaagctctttcattattttttcctgagctgtgagtaggccagattgagacaaactgcctacaaat

SEQ ID NO: 35054 - DNA, 386 bp, Homo sapiens
ggcttaaaataccccaggatattataaatacttatactcctttaacttcctcctagaaatatctcaccatcatgttcatcaaacttgtcaatgagagtgcacatccgatagtcccataactggatgaccccattatgtaaactagtcaggatccaaggtcttttggggtgaaagctgagccctgaaaaaaatagaaaatgatacaatgagctaactaagccccatgatgtcaccttctgtcaattctgataagaaaaagaaacatcaaggttaatcctaggttcattcattcgacatgcttgatgattttttactggatgccagacatcgtgaattttatgtttggtactagatttttgtcatattcctttacatattcttgggct

SEQ ID NO: 35055 - DNA, 2041 bp, Homo sapiens
attctaacgttctgaggctaatactgcgatctcagtatttgccctccacccccaacgacccacactcgagctctagagctgccgtacttagcaaataaaaatacgagatttccagataaatttgaacttctggtaagcaacgacagactaaaaaactattcattgtttacctgaaattcaaatttaactgggtatcctgcattttatctggcaactctatcaagttgagactttattggggttataagcctcaagtactatttccgggtagtaaataaagccgaatggaggcactgatgttgagatgctgcagccaaggcctccttaagtgaggttgccactactcgtctccaaaaaggctactgactcgggtgcgagtaacagagatcgagactcagttcccagggccactccatataacacagtcatcaaaaagccaacagatcacagggcctttggagcagaacaacacaaatcgggagcacagccaagagagaaagggggaagaaagaatagggagggggtctaaggaatcccctgcagtgtgggagccactttataggtaaatcgaagcccaaggacacaccaaagaagaggggactggagaaccgctagccaggcccaacctctctcccaccctccgtcttcctccgggtccgtctggtgggcccatttcgaccaacacctctacccattttctcttccccggtgtcagcgccgctcctgacatccaacctccatgttcccccttttattctccactacctttgacccgcgcgctcttggtctcgaatttggttaacatctctcaggtctccgactccgatgtcttaatccgagccccgacacaccctgctgcccttcggacgcctccacgtcagcgaccctctcccgcggtttccggaagcgcctggaaacacgaacttccggtctcttaggctccgggccacagagacggtgtcagtggtagcctagagaggccgctaacagacaggagccgaacgggggcttccgctcagcagagaggcaagatggctacggcagggggtggctctggggctgacccgggaagtcggggtctccttcgccttctgtctttctgcgtcctactagcaggtgaggcctccccgcccgtgagctccgttctctaaggggaactctcggatcggccccgccgcgaccgccactgtctcccttctggttcctgctgcccctctgtccccccaccctgtaaatcctctttctttttcgttcccacgacagaagttccccctttgcctggacctgaaggtcccttctcccccgcagcacgtcgtgtcgcttcactcccttctctaggcctcttcctggacttcgagcctgaccctctcccactttgtccagatgtctcgtttttcccacaaccccagccacccaccccacagtcgaaaggaacaggtgtgaaagttagctttcttcctcgcgtttagactttttgagacgaaagcaatcttgttctgtgggtgctgtgcggcgcttaaaaggtggatttcttatttcttcctctgttgattacatcctaagtctgtgtccccctgccttgcctcaggttttttttttttttttttttttaatcagtaaagcaagaataaggtaggatatgggtactcttaactgtgaagaccctgaagtaacaattcaaggaacttttggcatttataatgtacttaagtgtttgctgatacgcgttcatttactgatacatggctttttagttggtcaagccctaaaatgcaaatgcctgtatataactatgactgtgccttcccccaattcacattgtttttaaggatcctcaaaggagaaactacagctgccccacactgtgggcacacaaatgacctgctgatgttaaattaactgacccgtgtatgtcataaggtttctctcaattctgttcacactcttggaaaaatgcctcagaaagttttcttagcccagcacctgtgtattaaccaattagtaatatacatacaggatatacaagcagaagtgtgatcac

SEQ ID NO: 35056 - DNA, 2709 bp, Homo sapiens
ctggcctcaagtaatccacccacctcagcctcccaatacaggcgtgagccactgtgccagggcttaattataaattttcaacttataagttattacatatacaaagccttataccacagcaatccattggtcctttctgccaccagatgacattagcatggccaatataaccattatttgtgttttggaaagatcactctggttgtggtgtagagaatggattggactgggagcaggcacgactgcaagaggtcaagtgctattgtctgggtaagagatgatggcaacctggactactgtagttagtggtgaaagagaggtagatagattgtagtgacattcaggagttgtgttggggttttcaagaccacccccagattcagtcattcagtaggaggactcacaagactcagcatatagccatagtcatggccgatttattacagtgaataaacacaaagaaaatcagcaaaggcaaaagggcaaagtccagaggaaaccaggtgcaagcttctagagtcctctcatagtggagtcaaacaggatgtatgtaattccttcaacaacatgttgtgtcatgtttgaaatgtaatctaccaaagaagctcgatggagcctaggcatttagggtttttctctgcaggcagtaacgtaggcaccctctacctagcatgcaccaaaattccagaatccaagaaagaaagcagatattcagcaaaaaacaaattgttgtgccaacaatttaggtacagtgtaagtaccttatcagggaattcttatcagggaatggtaggaaccgtcccaaagtccaagttctcagacaccagccaagggccaaccttataagcatgcccttcaaaggacagcagttttagccctgctgtgttaactcttctgtgtctcctgcatagcaggtaaaatcaatattttctagtgcatttccaaccaagggttttatagaatctatgaaggtaatatacttcagaaataaacagtatacctggctttgtcgttgatacatatgccaaaggattgtaacatgccagctaacacagttaaaggctgataagctattgcgtcttcaataattaaagtattacaaattgaggactacttgcactgggtcaggcactgtggatacaaatggtgacaaaaccacgcatgatctgtgtcctgatggaactcacagtccagtgacggaagagaggaattaataaaataatcacagggagaaatatttaaagacaaaattgaaaactgctgtaaaggcaagaggtgttgtactatgagcgcaaaacacgggcatcagatatggcctggaggaacagggaaaacttccccccaggaagggacgcttgagcttatcccagaagaatgaatgggcattgtgtgaatgagtgaagctgtgtattggaggtagtgagggtaaggaggtggaggtaatttcaagctgaaagtcctatggctaatgtgtagatgaaatgaaatgaaatgtgccaaacctcagaaagcactggagaaacactagcgaaatttatcttctcaaacggttgctgtatctgcctacagagtttctacacagggactccgaaattctacatgggtagcagtcaatttcaaccccacaagaagatgtaggtggggagctggaagaccaggcttatctgcaaacgctggctcagaacagagcagctgtggcctctgataagcagggaatagaggaagtggttttgtctcaggcctaaaaaccatttgctatctcacagcgcctgttagtaagtcacctccccttcagtgtttaccaaacattcagaggccctgcacctacagttctgtggaaaccacaacctcattctcctcagttaaaagcccagtctttttatccctttcctccaagtggcactatgggtgacacagagaatttctactctccaatttgggactcggactctgaatgtggtttccaggactctctttcctcttctgatatgtgggtgccaatccaaattcagttcaacaaatacttactaagctctgctaggcattggctcctgtgatagggcactgtgagtgaaaaatgaataagacaaagcttcttccctggagggagatgacccccaaaacgtgatttaagtcctcaatttcctctctctaggttgaccaaggcagaactctcttctccaccttaaccaagcacctctgctgccctccgggttttttctgtttctggcatttgtccttcctgtctctagcttctcagtctcctctcaaggtcccaatcatctctctacatcagcttttctttttttctttgtctgtcttataccctcaatcccttggtctcttgtgtccactcagggcctgggttttcagacagcacagggcttttatcatgtggactgtctcctttgctgtttcatctgtttacttcatttttgttgctctcaaaaaccaaaacaaagtaaaacacaaaatagatgcattataaaataatatttattgtgtcctgctgaaatggagcttgtagtctcatttcttaggcacttacaaggtaaaatttatgaaccatactttattaatgggcatttacaaatgcctgaaataaaaggtgacttgtagaagggataatatatcttattgcaaacatgacacctagcttctggaatacggttagtggcatttgccactagtgagcataatttccatgtt

SEQ ID NO: 35057 - DNA, 826 bp, Homo sapiens
acttcaaaactgtcaatagaaatcttcaaattacttaggatagagttgtatagattaactagagtactgggtctttatcaactcagatttattgttcaggcatctaaaaagcacagagaagttaaatggcttccctaactagtaagtggcagagtcaggattagaattcagttctgctaattcctctaccagggttttttccaccattgaatatacaggatgaaggatggagagcaaataaaagtgattctgagctcatgagcccaggaagcatttcagatcatgaggaaaacagaaaaatctgaggaatgtggagtcaggaagtgataagcccagtgttcaaactgtggaatcctctctctccaaacaccctgagatagttaataatgtcgacagtgagatattactgtatttctcttttccaaaaaagctgagccaacaacaaggttaaaaaaaaaaataccaagagcctttcaaaccactatgagggttcctgctgctgattatttcacacctcctctctcctcaaacccacaacctgcctttccccctcctctctcatgtgacgactttgctttttgtttcactgaagtataaaatagaaaacacaaaaagagaacttccacttattaccaccactaaatcaacctacctacctggatggatggtctacattcccacttaagtcgagcctcttcctccacggagcactcacctacttcaaggctttgtttcggcaattgcctctgtccctcacattatcaggtttttttttactaggttatttccatcaatacacaacatataaacttgtagtttccttata

SEQ ID NO: 35058 - DNA, 731 bp, Homo sapiens
aagttcttatcttacttgctttctcaggggtacttgacatagttcatccatccctccttcaaacgctgtcatcatttggctcagggaacaacatactctcccggtttttctcctatcctatataggttgcctctgctcagttttcttggcaggagccttctgctcttctggacttctaaatactggagcatctcagtactcggagttctcattctcatccacactcatccagtttctcacccaattgcacagtctgacatatttctgggatgctacagggttatatctcccaaccaaaaccttcactgcactcccaactgcctacacaagacaggacttggaggtctaaagggcatttcaaacttagcaaacaaactcttggttccagaacaccttctgcaaacattataattcagccaatttgtcaggccaaaacactggaaacatccttgattcctttctttctcgcatactccaaactcaatttttttttttctgtgagatggagtcttgtgctgtcgcccaggctggagtgcaatgttgcgatctcggctcactgcaacctctgcctcccgggctcaagcaagtcccctgcctcagtctcctgggtagctgggattacaggtgcctgccaccatgcactgctaattttttgtatttttagtaaagacggggtttcaccatgttggccaggctggtttcgaactcctgacctcaagtgatctgcccgc

SEQ ID NO: 35059 - DNA, 552 bp, Homo sapiens
ccatatataccatatatagctaacatctccaagagaatctaacgcaacccttgtaatagaatatggtatagcttttttggaattttagaattgtgggtaaggaattgtggacttgtactgaccttatagaactgttgcaaggttcaaataaccatgcactttgtacactataaaacattaagaaaacattagatcatattaatttctttatcattgttgggctcaccttctgctccctaaggcctgctccccagatactgtggcatcaaagggaagccctcctgaatatgccttttgtgtcaaatggctgtgggtttgggatgaaggaagggtcaaattacagtaggatctggggaaaacaccgctggcccaaagtttactctgcaagtcacaaaatgctctgtttccaggaatgatcaattgttccctaagttcttgaggtcaatgccttcccattactgtaaattatcatggtgatgtcagtccaaatttctaaatatttccctggcaataaaacaaatttctatagtttttttctgcaatataaaatac

SEQ ID NO: 35060 - DNA, 1017 bp, Homo sapiens
cctgcctcagcctcctcagtagctgggattacaggcgcgtgccaccacgcccagctaatttttgtatttttggtagaaacggggttttaccatgttggtcaggctggtcttgaactcctaacctcgtgatccacctgcctcggcctcccaaagtgctgagattacaggcgtgagccgccgcaccaggcgccattgttttttttaaattgggcagcttccagaacctgcccaggctcagatagactccctatcaagcttttgaatttttgccaatcagataggtaaggttaactatttttatcccctcttacttatctccagcgaaccaggcctgttacgtagcatcactgtttagaagttccatgtcagactgggcgtggtggctcacgcctgtaatcctagcactttggaaggccgacgcgggcggatcacttgaggtcaggagttcaaaaccagcctggccaacatggtgaaaccccgtctctactaaaactacaaaaaaatttagccaggtgtggtggcgggcgcgtgtaattccagctactcgagaggctgaggcagaagaattgtttgaactcgggaggtggaggttgcagtgagccgagatcgcgccacagcactccagcctgggcgacaagggcgagactccgtgtcaaaaaaaaaaaaaaaaaaaagttccatgccaggagagtctggctccacctagtggtagcatatctagttgcagaaaaagtaccttttcttcgtagctgtgcctttgtacttacttttacttacctactaaatttcctgctccttcctccctaaatggaaaaaaaacctgcattctaatccctttcctatgggttgcagcatgtgccacactctttgagggaggcttccatgtggtccttattgggcacttcaacatcttaaatcatgagttgggctcaaaggtaggaggagtggtactgaactctagggtccactttctcaacataccagagacaaggaaatgaggctggtttgttggtttgt

SEQ ID NO: 35061 - DNA, 632 bp, Homo sapiens
tccaaatttttctgcaagctaagaaagttccaataatccctatactctgccaaacgcccacctccctctctcccaccaggaagtgctggaagaaagttccagcactatctgaccccttgataaggttatcatcttcatcacccactctactgttgcaatttaccctctagcaatacaaaactacttaaaattcctagcaaagtctgggctgtttcacaatctctgcctttgctcatgctatttctgctatgtagaacacccttttccccctctttatctgggcagcagtattcatccacattattttctggaaaacgacctcccacatgcccagtcctcaccatagcctcacctaagcctctttcctaggctttaattatcccatgcaaaacactgtcaaagcaattcccacattataatgacatcatctgtgtacaagcatgtctcccatggtaaaccccaagtgaaaagggaccatgtgttatttaatattctgagtatcccacacttagcataataaaactggtacaagttgacattcaataaatgttttctcagcctgggcaacacagtgagacccccatctgtaccaaaaaaaaaaaaaaattaatcagctgcagtcatgcacgccc

SEQ ID NO: 35062 - DNA, 2019 bp, Homo sapiens
aggtgatccacccgcctcagcctcccaaagtgctgggattataggcgtaagccactgcacccggccgatttatttatttttaactttaattttaggctcaggggtacatatgcaggtttgttatatagatgaattacatgtcgtcggggtttggtgtaaagattatttcattaccctgctaataagcaaagtacccaaaaggtagtttttctatcctcaccctcctcccatcctctaaactcaagtaggccctggtgtctgttgttcatttagggaaaaaaaaaaaaaagaagaaagaggaggagggggaaaaggagggaaaacagtcaaccagtctctctctggttttctctaagaattcatccaaacttccctctgggcatatgagactcacaagaccccccagttgccagggagctggagccctgcaataggaaggatgagtcagggcctcctcaccccaccagctacagcatacccagtttaacttcatgttttccccctaatctctagcacagtgctcagaacatagtaaacaccaatgtttgttggattaacaagtgaatttcacactgcaatacaattagaacctggacctagagcttccactctggttttccccttcctccccaccactcaccctgtagagattgaagtaactcccataagggttggcctcctcgtaaagatcaagaggctccatgggccagggaagttccacagggaagggcctttccggggtttggggtagaacagtttagaaatgtgtgagcaagaggaaggctctgtgaggccaacaacaggctgggctatgtctaaatagccatccttggctgcactttcagtgatgtcgatcagctggctcgggtcctctgaggatggcagaaagtggtaatggcagggtaagacaggctcgctttcactccctggctccctcccgccctctctgcagaatttccggttctacctgctcagctcccccgccaccccatcttcccagtgcaagggaaggtcgagccttccagcgcaggacttacttcaggggcccagcacccacttcctgccagccagctgcttcctcctgttccgcccctacattgtgaaacaaatgacgcagccggactttagacagaaaccctgcttatcagggagtccaggcagatgaactctgggttctcaatgccaggaaaaccctagtgtgtatccactctcacagtatgtgttcactcatactgctttccacaaccgtcacacaatagtgaaacctcatcctcaattatgttggacgcaaggtcatccaggtctttcctgaatctctgaaacagaaactggtttgagtttagagatctccagggtctctagtcaaacctaacagatgtgataaacaagtctcattattatcacataaaatgtgcatggcatttaaatctatttttgggtgtggtggaaacgtgtgttgcccatttatgtgtccacagaacaagtgcaaattgaactcagctgacttggaggggggtgggatgtatcctaacagccaaggccacaatccctagaaaccaatatgggccaggtgtagtgactcatacctgtcattcagcattttgaaaggccaaggcaaaaggatcccttaaagccaagaattcaagaccagcctgtacaacagatgagaccctgtctgtactaaaaaaataaaaaattagccaggtatggctcaccactcacacttgcctatagcctcagctattcaggaggctaagactggaggattgcttgaacccaggaggtcaaggctgcagtgaggccaggcacggtggctcatgcctgtaatcccagcactttgggaggccaaggcaggcggatcacttgaagtcaggaattcaagaccagcttggccaacatggtgaaaccctatctctactaaaaatacaaaaattagccgggcagctcacacctgtaatcccagcactttgggaggccaatgggggcagatcacaaggccaggagatcaagaccatcctg

SEQ ID NO: 35063 - DNA, 2812 bp, Homo sapiens
atcagtaaaatagaaagaggatgatatatgcctctggtccaatctctcccaagggtttatgttgtgataaggtagaaatgagcagtcaatccatctaagggcagggaatctacatacaccaaactgattgtaatcattcatttaacactttctaaaacaagaaccttgggggtggggggagactcatgtagaacacatactgacacaactactcacacaacgacacgcacactcaagaatcagataaacacacaggtactgccacaggttgactaacgcacaaaccaaccgactaaacgctcagccccacacaaacacatctagagacagaggcatgccctagcaagtgagcctcattgttcctcaggaaagggagtttacaaaggaaacaaaaactctcatacacagccagagggagggcagagctctggctctgatgagaatccagccaaccaacagatacactctccccctgggaagagtcactcaatcaacaacacgtattaaggactcctgaggtagttattccataaaggaacttcgctggaacctctgctgcgcttagagaaatttcaggtttctattgcatttcctctttagactgtgcacccagacattttcccagagcaaccgccgcaattcaaagattcagaagagccagagactccttcagcaaaagctaggggaagagacttccaccccagaccacctccatttgattttcttcgaagaccgttaaaggagccaaggctcccggctgcgcagcggggttcgtggatgctgggtggccgttggaggggcaggctggcccttcccaggtgcgtgtggagcgcgcgctgggtagatgagtgtggaagggtccttggcccgacggccctctccagtgaggacgaggagtgtacctctggtgtgtgcagatgggtcagctccctcctggtggccgtgaggggtgcggtcacaactcaccagtgtgggggaggggagccagccactcacccagctgtgagagtggtgaaagagggaccagccaggggtggaaaagataattcgcagaacgatataggaaggtttctgagctcctcccctcccgcgggctaggggcgtggggagagccttcctccaacctctgacccgaccaaccgattcctcccgaaactctgggaacttacacaacaggatcgccaatatgaagaggcacaacagtttcctctcgacttgcgcctttgtccccatcgcgatcaggctcccgacacaacagccgccgaaggactcctgggaacagacacagctccgcgactacagcgaggggactgagagccagccgccaggtggaaccccgcccggccccgccctccgcgcctgattggccagctccccacccctgcacgttccgattggtgtaaggaaccgctgctcttcagaacgagtcacctcggccaggtgttaccccgccgccactccccgcctcggcgcactggcgcctttccccacaggagctgcctcagattggcccaggagactgtcgcgtcaggagacgaattccgcaccttcagcaggtgacggccccctgattggttggtgttcccgaagtagcgacttcctgactggctgggttctcagttggagctagagggctgagaagtacctctaaggaggaagtaggaaaggcagtcgtggtgtgggatttacggagaccggcttggcttggggttttgtgtttgtttgaatgtaagttgcttggtgcaactgcacctgcagtttggtcctgcagaaactttggtcctgcctcttggcaagtaaaaaacaaatattaatatgggagggtaggggagaagacccggagagaaatggaatgttactttggcaccacctccaaactgttcctctgtccaccccaccggctttgagagatgagctacgctgggaggaagaaaggggaaaaaaaagggaaagggagcactcaactggaaaatgggagcctgggcagtatagtcccagctacttgggaggctgaggtgggaggatggcttgagcccggaggcggaggttgcagtgagcctagatcgcgccactgaactacagcctgggcgacagagccagaccctgtctcaaaaaacaaacaacaacaacaaaaatttaaaaacccacaacaacacaacttgggaagagcagaattacgttatctcaagaagaaagttaaacagatgtacacaaaacacacccagatgatacaaactgagctgaacatgctctagaaacatctctgggtgactggatatgtcctttacacatatttgatctgtgaacaggtccctacatttcagaattgtttgttttctcactgtgactaatagttgtgtgctgactaagccaccttttttctatagacaatgttgatactcaaactttctgttaatatttatattgctacatcatttttaattgaaattcatgctcaacacctttgctagttgtagtttctattttacgatgatttaattttaactgtactaagcatatgcagactgtggggaaaaaacttccttagcattacctcattgcaagggaaaagaccacatttttatccaaaagaatgatattgtttgacattttgcctttttcacctttgctctcattcctttgtccccatctctttggccaaagttctgcttctggttccattcaatttaaaccacctactgggtgcttaatagtcttggccgggtgcgtggcacacgcctataatcccagcactttgggaggccgaggtgggtggatcacctgaggtcagtctgactaacgtggtgaaacc

SEQ ID NO: 35064 - DNA, 606 bp, Homo sapiens
caaagaacctcctgaacggtctctattccaccacctgggcgtcccctctccaccctatacccgggatgttgagcgcccctgggatggtcccagctgccgcctcctcgcgagagcgcacgtcgaagagccgggcccgtccggaggctaggagtgaacggagttcaggaagcgagaccgtgggcgctgaggaaggggcgcgacagccttcaggaagagggggcctaggagtcacggccgccatggcatcccctcacctggcagcgcccctcccggtagggtgtgcacgaagacccctcagccacgccccttcgctccgccaccccactccctgccacgcctcaacccagaggaccaagagaaccgcggccccaggaatcccccgcaggtacctccagccatggtgcgcgtagcaaccgcgagtctccggagtgcggccctggcccgccctctcggcgcctgcaacatctcccgttccctcccagagctgagaccggatccggaagcaagggcaccgcctcccgcgccgcccccgcagcacctgttcgcggcgcctctagcaccaacccaccgcagaagcccttaacattctctagcttgggccaaaaa

SEQ ID NO: 35065 - DNA, 2086 bp, Homo sapiens
acaaagcaataagataatcccaacacaaaaggggcaagatttttggaaattctctacccataaggtcctccaaacctttcctatccaaggaaaattttcaatggataagcctcggaaagaccgcgtccgaggaaaatgttgaaaaaggaactgaaagtgaaaccgtacagacgaagtaacgctgcaaggagatcccagtcgataaggggaagtagcactagtgttttgggaccacctacatttccatcttcaaacctgaagaggaaatgccctgcgaagcttgccgcgctgactgcaggggaaggcaatgaaatagagggcccggcacaggaggcatctctattggccacagctgtcagccggggcagtctctgaggacacccagcaacggggtcagggtacttattcaaatcttagttggacatccggaagcatttcctaggcattagggatcggtgacacggaaacagggatgggacgttgtggtgtgcacgctcaggccagaagggcccagtaagagcccttgctaagtctggacacaaagggaaaaaaaatcaactcccgaaagaagtcaggcacctagaccttgccttagaatgaggcgtctccctgcaggctcaccaaccagaaggcgcttacggagctgagcgcccgccaggcgcgagcccgggagcctgcgccgtgaccccgcagccccgcagtcttagccccgcgccccagctgctccgcggaggaggcaggaaagggcctcggggactagggagctcaagcgcccggtgccggcggctgcggcgcgcagctggacagcgcaggagggctgggacgctcgcgctctggggaagggagagagtttggcccacaaagcagggtatgagataaagaaccagcacagccccctcccccaaaacaaaggcttcctccccagcagtgttctctaacttgaaaaacggaaacaaaatcaaagctgccctgccttgccagtccacccagtttccagacttctgcccggtcctacactcaccggccaaggccgtctcagctgccgattttctccaactgtgttctccctctcccggcctaggtatctccatagacagctgctcatgcgcacttccagcccgcggccatgttggtgaggggcggaagtgtcgctctcgccccgcccataaactcaaactcagaactgccccacttccgctcactccatcttgatgagagttggtgtttgtgggttatttgtgaagccggaaagaagccgtgtcctggagaatgtagctgaaggcctggccactttcgacaagaacgggaaagagacgactaacttgtactaatatcttagtgcttggcagggcattttttcattccaggaaagaagagaatccagctgagatcaagggagggacgtccgacggaggcgccatctttaacaagggctatttgggaggccatcttggcgcagggcgtctttttgaaaggttacctgctagagattacgacctatcggggcatgcatagaattggatatgttccttgttattcgcgtcagcagtcactcatccaaagaccccaaagcttctagtgttctaaaggctcacaccttctgtgacaggaatcttgattcccattcttctcaatcaagacctaccctgaatggatttggagtagtgtggtataatgggaaaaattcaagcttgggggccaggcagatccaggtttcaaacccatctctgccacttcttacctctgagacctttggcaaacattttgacttaattgagccttagtttcctcatctataaactggagatactagcaccaaccttccagaattgtgtggattaaataaaatcaaggacatagattttgtgagcacaggatacttagtccagttcctggcacataatgaacgcattatgtaaatataagtttctcttccttatttcctgaccaccatgaacctagctctagtttctggccactagtctccatgacaacaactgaggaagagcacccaaacaagaagaagaaaaagaatgttttgccaaatatgtgaagatataatacctatcaccaaagactttaataa

SEQ ID NO: 35066 - DNA, 1681 bp, Homo sapiens
aatgttggtcccacccagcccagcctgggagtccagctaaccacccgcacccctcccaggctttttctcctcctggcactggaaagaacagggctgccaaggaagggctgtgagtgagcttgggtaggggatctccagcacaacatatcctctgcttcaaacgctggtgtctgtgaaggtcacagggatcccaagacctgccccattaggacactcaaacctttctaaagactatttctgagacaatatcagatggcatattttccatccctattcctatactagccaaccacctgctgcctccccaccactaatcacctatatttcccttggaaaataccttcttagggtacagcaggcattagatacccagcgcatgcctgaatgtcaatcctccatgttctcacctgtgagtccacgatccccacccctaggggacacactgaagcttcacagaccgaggaacccagtaaaacaggaaattcccttctggatatctcccacagatcctcattgttctaaatccactacttagtaggaacatctcagcctgaggcaacaccctcctccagctgcatacccccctaccaccctagggtacaagagaagagaaaatagaatttgggccctagaatccctgtccttgtctaaacagacccagaagtccaggtttccaggccagggcaggccaggactgcctcctccttctctcctccacccagtgtcagcctggcgtcagcatgatgatgtcatcagaccaaaggagacacattgcctgcctggtgaggtcaccttgagggcatgtggtggccaggccaggccaagcccagggacccttctgttgcaaattgtttactgaggctggtggactccggctggttagacactcctccctctgaccctcccacccctcctccctggagtaccaggacgctggtcaggagccttggtgactcagaagctgcctcacagcagcaagcctagccacagccaccaccaccttgcgcaagggagagaacaggcccaactggccagacgggatccctgcccttggcctcccccaccctggccaggcccccacgggcctctttggagcccagccctttgtgtaccccgcccgctcccagacaggccctccattccaggtttgggctggctggctcttccccaccctatgcctgggtctcaactttccttcctatgtgagcctggcctctgatctcaggaggggaaactgaggctggcacttgctgacacccagccatcaagagcatctttaaggaagtatcttttctttatgaggggcctttctccatcagtatcccctgctgggacttacagatgtgaatgtaggggatcgtagaggtgggtctgtgagaaggaggaagggagtaagtatgagttttttgtgtatggggagctgtggctgagggcctggccaatcttagtgctggttcaaacgcatgtgaggctatcttcttgcataaactggtgggtgtttggcacatatatgtgttcatgtcttatcttaggggcatatacgtacttacttgtctgtgtccagagggaagagctgtgtatcagtatgtgtgaatgtgtgtgcacacatgattccgtgtgcatgtcacaccctctgtatgcatggagtgcattcttgtctcgcggaactctgcacacatag

SEQ ID NO: 35067 - DNA, 1747 bp, Homo sapiens
cccagtcccagaggacacagatcctgtttttgccccacaccagctgtgttgggaggaaaattctgtctgtatttcctccttcagctgaaagcagaaagcttgcatctgggcctcttcagttatcacttggtcctgggggacagagttaatatctggaaactggcttaaataaaagatatcagggaagggtaggagtctgtttttctcattttctcactcttcccccacttcacccttctaaggctgcgtgggttctctctctctctctatctctctctctctctctctctctctctctctctctctctctctctctctgtgtgtgtgtgtgtgtgtgtgtgtgtgtgtgtgtgtgtgtcacctgagagactgggttctgctaccctctagtggccagagctgaaaggactctcccacccaatcaatcgggaccttcaagcctttgggaataaacgaacagcctatttgatgaatgacaaaactgagaaggcctagagagaaacaatgcctttgagggtcaggggcatagttgggactagaacccaggtctcctgtctctcgggccagtggtcagtccactttcacttccccaccctctgacttttgcttctccttccttgctcatccctggggtggttagcccgagtaagaaaccctgaagccaaatgatccctcccggccctagtggagcagcacctgcacctcaaatgtcaaaatcgcaaatcagttcacagcggagatcacaggggtttattctaaggacccgactgtcctccgactttctgaggttaacaatcttgcaggatttttattgacctgatacagctcccgtagccttggtggcaccaccatacggttcccgatagccacccaggtgtcctgtctccacggtaactgctgctttgcgaccttcggtttgcagcggtcgcgctgcagccgctgcagtggttgctgggcgaccacggagagaaagccgggacttgaggtgggaaccccggctggcgtccggtagggggaggttcccggggaagcccgcggaaggcgaggtgcctggcctgccatgtaggggctcgttccaagccgcagaccccaccgccctccctctccccggggcccatggcggtggccgtgcccccgggtcgggccgcaggctcaggctgggcctggaggccagtggcgcgggacgcgcttttggctagagctttccattcatgcaccgaactgcggggacggttctatctcgtaggtggtctcctagcaggaggagcgagagagcccagcagcgatacggtggttttcgacccagctaggggccaggccgtacgattgggagcccggggcagccccccgcgcagtcaccacgacgcggcacccgtggacgggcgttggctctgcgtggtgggcggctgggacgggtctcgccgcttggccacagtgaccgcactggacacagagcgcggtgtgtgggaggcgtggacagggacccctggtgactgcccccccgccggcctcagtagtcacacctgcacccgaatctctgaccgagagctgcaggtggctggccgggagggcggtatccacactcagcgacgctatggaagcatctacacattaaggctggaccccagcgcccgcacctattggtatggcaccctccgcccaaaacctttcactctcatccacactctcgaaaaacaaaagcctaagcagatttctcaggcaatttatccacctcctcactctagca

SEQ ID NO: 35068 - DNA, 3271 bp, Homo sapiens
tctttatgctgatacatctgcttgtattaattgttcaacaaaaactgaacctataattaagacagctgtaggccgggagcggtggctcacgcctgtaatcccagtactttgggaggccgaggcgtgcggatcattaggtcaggagttggagaccagcctggccaatatggtgaaaccccgtctctactaaaaatacaaaaattagccaggtgtggcggcgcgcgcctgtagtcccagctactcgggaggctgaggcagaagaatagcttgaatgaaccacgaggcggattgcagtaaggcgagatcgcgccactgcatgcactccagcctgggcgacagagcgagactccgtctcaaaaaaaaacgataataataaagtagctgttaactgttttcatttctattgtgtagctttcctcccactcctatttttccacttagcaaaacacggttcccaagccacaaagggttttctaattaacttatcaaacgcttcccgatgctaggcactggggaaaatgcaaactcggattagaaaggggtttctggtctctaaagaaattcgatctagtaatgaactcccgaattaaaatagtatatagaacactaggctgttcgagtatgagagtcacgtggctctgcagcgtgacggcgattgtcaacgtgggttcaggatcacgtaacagactacacagccagcccgttaactaattctctagggttagtttcgagctgtcttgcccagccataacctgtttggagaggctgaggagagatagagaaagcagcaaaccatctcccctcagacctgtgcatcttcccagaccctacatgtcagggctttccccttgctcaggctcacccaccacctcacggaggcgtggctctcacctacccacccgtctacctctccgaaggggttcggctagcttttccggggacccttccctctctaggtgccacgcacatgtggtgctggagtaaaggcctgcacaagccacaggctcccccttctcgctagtattccagacccaggtgggtaccctgcttcgcgttagccactcctcacctgctctgcggacaccgcccccttccccgcgccgctcccgctgctcttgccggcgcgaccgctgttctccgccatcttcgccgcctgctgggtttccggccggcgcagctcagcccccgccttgcgtcacgtccggcctgcgagttaccgcccactcgctgcggcgcttctggctccagaccgccctccggatcggaccctgcgaatggttttggctatatcttcatgtaggacctactccctatcccgtcggccgcggtgaatcccacctgcggtgctttaacttgtgtaacagagatgctgcctctgggagaggcggggagggacgggccaactggagcgggcggcgggagggtggagggcggggcgcggcttggggcctgggttcctttgccccttgcccaccagggaggggtgggagacgagagagggtgaactttcccctgcgagattctggtgaaaggggaaatatgcttcgagtcagtaaagctgcgcaagtgcacagtcaaggagagagtcttgggaaaaccaaggatagttcccggagatgacttttggactgcggaaacgtttgtcagaggaaagaggcttcagtttaatgtgagatcattggaagttgaactattcaggcggcgagcagagcccctttctccatcttcccactgtatggtcttgtcccttagcctataatttcttataaagagcgttttgaagactaggtttttactggcagggccctgattcaggctcacagtataaagagagaagtcagagaatcctagaaatttattgcttgaagaaggggttggtgtcctcatatctcaccttcctcaggctgggcttcatcaccaggcctcctcacagattcctgtcccttctgtgtcctggactccggatacctcaactctcagtactttgtgctcagcccaggtaacacgttttgttgtgtcctcagtgcctggcacttagatgctcagtttgttaaatggatagtgggagacacaggagtgtcaactatccacacatttgattggtgagccctactagccctgggtcaacgtgccctgtaagagcatgatcaaaaggaagtccagctttcctgcctctccacttgcaccccttagcattaaatttgcttccctgtgctatgaaatctgagaatcctgcctatgctgttcacaggcccagagccatggctatctcctcttcctcctgcgaactgcccctggtggctgtgtgccaggtaacatcgacgccagacaagcaacagaactttaaaacatgtgctgagctggttcgagaggctgccagactgggtgcctgcctggctttcctgcctgaggcatttgacttcattgcacgggaccctgcagagacgctacacctgtctgaaccactgggtgggaaacttttggaagaatacacccagcttgccaggtatcagggaaatagcgagggagaggtagaatctttgttggacagtgtccctgggttgccagatatgagggtagagccttgagaagtcagtgaagagttgtcagtgtcccttccccccagggaatgtggactctggctgtccttgggtggtttccatgagcgtggccaagactgggagcagactcagaaaatctacaattgtcacgtgctgctgaacagcaaaggtgagactttataaccctttagcctgcctcttcccatgctcttctacctagattctccagaattgtttctcaactcttatttccttgacccaaggatttaggggtggtcctacttcagttcctagcctataaactatctcctccttgggaggagtaagcaaggcttctagaacaccagcactgatattccttctttcttactgtaggggcagtagtggccacttacaggaagacacatctgtgtgacgtagagattccagggcaggggcctatgtgtgaaagcaactctaccatgcctgggcccagtcttgagtcacctgtcagcacaccagcaggcaaggtaggagttgtgaaaggatgagggaggggaacaggaatactttgaactggcagtagaggatagaaagccctaagagagggggtaatggaaatatgactagatgctgtgacaaacagagcaggaagactactaagtaggctgtttttcattccagattggtctagctgtctgctatgacatgcggttccctgaactctctct

SEQ ID NO: 35069 - DNA, 2333 bp, Homo sapiens
ttccccattttcccaagcaggaaaaacaagggaacagtaagctagggagtcttttggaaaacaaacccagttgaattctcatccaaccccaattctgcaaacccacatgaccattcccttctgcccttcccaccctcttaaaagctaagggcctggcaattagaattggctgcaactgatgctgcttaactctgttctctcctcctctccaccggggaaagggaaacccccgaacctctatcacccgtgcagctccactgtcctatctcccattccactccccttcctcccaaactttcttcctcccagtctctcactttctccattacctcctcccaccgacactctctccattccccaagcctccgttctctccttttccacccaaattctcccctaggcccttccccctcccacctccaatttaacactttcgaagccccccagaaacgtcttaactccaattctgacctttacccacctcctcgcaacacccctcatcagagtccagtcctccctccaaccacatgccacagcccccttccccttcacaccctcagcctctccctcctgctcctacccccttcaatacgagcggatcgcagccccactccccacctcggcctctctaatacccctggctgggcccagtctcagcccttgtttacgcccctccccatgccctcactcctccgtctcgacccctgccctctcccgcagttgccatctcccctgcacgcccccctcggcagctcccctcccccacctctcagcgtcccgtcacctccctctcttgaggttctcaggctggacgtcgccaccgcctccccctccactttccttccccaagccctttgcggccccgcccggccccgccccgtcccgctcgactccctctccccactccggccgcccctccgcctcactctcggctcaggctcggcgccgccatgttggatccatccgcgccgctctcccgggcctgcctcacggcgccgcatccgggctccagcagccgccgccgccgccgccgccgcggccgtgggggaggggacaggcgggcgggggtggctgcatcctgaacggcgcctcccggaacccggccggttagtggcggcttcgaggccatagtgagacatgagccggagtagccatagtaagtgagggcagcctggcagcggcattaatcggggagtggatagcttcacttcgggaggagagatagagattggcagccatcttgctttggggcaagctggcaacgccggtttgtcttgacggctgcttagggcggtaataagggatcgaagaggatagcattcttgaatgggaaacattggtggcgccacagctggctggtggcgacttcaagacccactggaaggctgggattggcagccatgactcataagggcggaataccacggggatcggtttgtctggcgaacttgagtgaagggtcaagatctggatttcacctttcctctgagcttcctgataacccggacgttccgtaaacccggatccggagccgaaagtggtgcccagatcccgtctcggaattcatttgttcagcatttaccttttgaacgccggtttcctgtaggaagtgtcgcctagctgatccgtgtagggctgttgggaattgggggtggggaggatggtgcgggtacgttctggtgtggcttaagaaagtggtaatagataggggaagaccagattatgcgaagccttgtaaattaattgatttttatccttaaggcaatgaaaagtctttgaagaatctcagcagaggtgtgaacaatttcatttgcattttagatcgctgcgtgcagtgtgaaggatgaatgaattgaggagaatcaaggagagcagttgtgaggctcttttccaggcaaggatgatgatggtctgcctgtggaagggagagtgcggatggggagatacagattggtttaagaggtacgaatgttgtgacttggacaactggggaataatgataccagtttctttctcgtttaggggggagataatgagttttaggtgcccctgggatattagctaatgtgggttgggaactcaaaagaaaggtttgaggtgtgtgtgcgtgtgcatatagatagctgttgaagccatgaagtgggctggagaggatacctgcatttgcgggataggatgagggaagccgaaaagaacactgagaaggggcaaaccgaaaggaaagaagaaaaccatagagaactatcaaggaaactggtgaaagcgtttagtgtaacagagatatagtaaaatgctaactaaaatatatacatcagggccgggcatggtgactc

SEQ ID NO: 35070 - DNA, 1378 bp, Homo sapiens
caggactatatataagcaaaggaaaagttcttcgaagaggaaacacgaatcgctcgttttaggaagtcagtgccttgaaaagcgccttggggttgggggctcggggctgggggagggatagcattaggagaaatacctaatgtaaatgacgagttgatgggtgcagcaaaccaacatggcacaagtatacctatgtatcaaacttgcacgttgtgcacatgtactctagaacttaaggtataataaaaataaataaataagtaaaaatgccttcagcagcctgaagttctaagagctttccaagtttgggaaggtgtccgggttttctgcgattacttctctgagcatgaacggaagtcaccctttgtgccttatgcggtgattttaatgataggtgtcatatataggacggagtaatctgtttacattctgttcttctcgatgcactcacaagcgggtaactaggtgacaagaaaacaaagatcttattcaaaagaggtcttacagcaacccaacgtctcatcttcccatagtaaagatgacggcgccttgaggtaagctacaggcaacaccacttccgcgtttctcttgcgccctggtccaagatggcggatgaagccacgcgacgtgttgtgtctgagatcccggtgctgaagactaacgccggaccccgagatcgtgagttgtgggtgcagcgactgaaggaggaatatcagtcccttatccgggttagttgtgtttctacagtctaacgcgtagcataagggttgggagaaatcaggtgtcctcaataataggctccgtgtggaagccgcttccggtttttaagtttaacgcccaaattcatagaaatgggactattgtggggctcggggactaaggagggatggtggggagagggcaaaaaagactcgggtgaggtgcacagtggggccagaccttgcggctaaaagcagcagttattttagggatacgcttccccagaaggtgacgtgtctccctggctacaggtgtttgttcacctggatgtgaacaaaaatcctcagggcgccaactcccagtccgcatctctctgcccccttcttcactcttcactgttttgtttgtttgtttgacggagtctcgctctgttgctaggctggagtgcagtggcgcgatctcggctcactgcaacctccgactcccgggttcaagcgagtctcctgcctcagcctcctgagtagctgggactacaggcgcgcgccaccacacccagctaatttttgtattttcagtagagacggggtttcaccgtgttggccaggatggtctcgatcccctgacctcgtgatcctgatccacccgcctcggcctcccaaagtgctgagattacaggcgt

SEQ ID NO: 35071 - DNA, 1521 bp, Homo sapiens
tgggagctgttaacagagggcaagtgggctgaaacctgaggcacatgaacagctacgccgggttgggttgggaaagagtcggaaataggggatgctctggtcaggagtgggaatgaaatgttgactgttccccctgctgctcagatctacctttgtcctttagtggtgagccatgctttgccctaccgtgttagcctgcaagaagtggttttgccggaccagcacttcccgccctccagggatcttcccagccctctgtgaagtgctagatgcttctccactggtctgcgggctggacccaggcctgcagtttgccatacttgcgcccctgctgtttgggaaggatctgtgctgtaagcctcgcggccatactacgactgtcagatctccatccctatgggctataggatggggcgacggcaccctatacctcagggacttgctttggagtcatggattaaagacctctctgggcagcgttgagaaccagcgaccctaaacttggctgcgtttccatggtgtcgatcgcggagccgtgggggcgggctcacgcaagcgccaagggaccggtgggaggagttcgggtgtggatgcgcaggcgctttgagagacggtgaagccggtggccggtggccgggcgggaccaacaaagatggcggcggcccctgcggcgggagcgatctgggcaacggctgcggctaaagctgcagccgggcccacgggggggctgcacgggggtagtagggggtggccctgaactggggcctggccctggctggcctctcccgccgcctcactgggggacaggtacgggccggggcgttatggcatggcggggtgtgggggggcgcagagggaagactgctccagacccgagaggacactctccacaaaggcgcgtggggcccggcggggcctgggagaactgggctggagggacagcatccctggaccgcggggaatacgccgccggattccgtagccaatcagcggtctcggcctttctgccctcgaggggggcggacccggctaaagccctgctgtggtgggagaagtgcagagattaagggtcaaggagttgttcgtcctccatccccgactactgctttctgaacctcgacaccatgtcggaggtcggaggtgggggagggaatggatcgtaagtcacccatatagtctgcttcatttgcagcccagagaggcagggattcgaggatggagggctgtcttttgggctgttattcttgcatctacactaccatttggctagggtcttaagtgacccgaggcacatcctactttactagccgggtatggggtcccatgttacgttagagccgagataggagttatcactggcttttcagtaaagatgtgttctgcagggaggggtcgggagtatagaaagggtcaaagccatgggctgcttatctttcattcatttgtttacccaatagatactaagtatttactttgtaccaaacacgatgccaggtactggggatacgatggctgattcga

SEQ ID NO: 35072 - DNA, 1561 bp, Homo sapiens
cctctctaacaggtgggggcgctctcagagccgagggggaaggtttcggggatggtgctggacccggacctgtgtcccccagcagtgaaggttatgtactgggaggaaaagaggaaaggcatacttgagtgaggctgcgtgcaggctctggggcgactggtttggtcggcgatgggggagtgccactgttgacaaacactgggtacgttgccgggcggccctagctcccgtaggcccggtctgttgctaacatcaaggagctgtttatggagccgcctccccgtggactggccttaagtgtccctatctattctccctacgaccaaagctcctgcggccttccctctagggttgtcaccctagctggacctggtaagcttgtgctggggaacgctaactccagcattaagcgctcgccgcctcggtcctgaggagggcagtgacgggtacggccgctcactcccagctcggcgctaacacggttaacctccagctcttacagctgccgtcgctccgcctctgccagttcaatgttttattggtgaacgtgatccggggccttccaagtcccgccaatccagatgtaggagaggtagggttaggcgcgtgccgcgagaacagagtggacggagcgtaggagagaccgaaaaggctgggggtgggagtagcggatttgaagcacttgttggcctacagaggtgtggcaagcagagcacctcagaactcaggcgtactgcccgccgcccgagccctgcgagggccgatagcgagggtgtggcccttatctgcacccagcagagcgccggcggggtacggtcttaggacctcgatctccttctccctcattttctctcatccctacctattgtgggtgagtcctggcccctggacggggacctcgctgttccaccagcccatccgtgcacacttagtttcccctaaagcagtgagtggccgggatagaactcaaaaccggcggggcttctggagcgcaggttgtccccggtctgcctgtccatatcgccccctttcccccaggtttccgcatgggccggaccgtggtcgtgctgggcggaggcatcagcggcttggccgccagttaccacctgagccgggccccctgcccccctaaggtgagtgctccacttgtgccagagggagcttcatttaatgctcttcccatttccatcaaaagctagatggatcctggccctctgaatatgcctcttcccctcccctcctgacctctcgccggcggctacaggcggtgctgcagtgtctctccctcttgtcgccaggtggtcctagtggagagcagtgagcgtctgggaggctggattcgctccgttcgaggccctaatggtgctatctttgagcttggacctcggggaattaggccagcgggagccctaggggcccggaccttgctcctggtgagaggcttgtgggatgtctaggagaggttgtggagggggcttccattggggaatagagtttaggggaggaagtatgtttggtgggtcagatcttcccttagtttctcctcttctgagggcatgtg

SEQ ID NO: 35073 - DNA, 1897 bp, Homo sapiens
ccagagatcaggatcagggtgaagctggtttcccagcaggcgaagtgaaggaaagtggttggaaaggaagaggaggagcaggagatggtaggtccctcgcctatctcccgtgctaccctggaatgataagtgtcaggttcatacttaaccacccccgtacccccaccccaacaggacagattggggagtggggacaggacagctaatggaaacattgttttcccccagaccaagaaccagttgaagtggcgacagagtcatgacaggaccgtggagtggcctaaggagtacccagggcgaagtaggaaacaggctccttctattcttcatgtgcctgggtgccaactcctcaggtgcagggaccgtgaccacctgggggctgtaagcgaacagccccggagctcggcggagagtagggtgggggtggcgtcctctaccttttctacctttcccctcttctagcgggggtggggaggagggttactgctgaagagaaagggagagggagagcaggggcagagacagtcaggggtggctggaagggctcacctagaggggcgtggtccgcgctgtggagggggttaaaacccagctctttcggagcacgcccatcctatcccagtctcttgcttttgccctacctactagcaacgtgagcccgcccggcccccgtccatacttccacctaggaccccgtccctgctcaggctcgtctccaggcgttacccaaaacttctcactctctcgaatgcccaaacctttatcccaggcctccgtgtcgacgcattcccagcgcacatacctggtcttttgctgcctgtcgtcaccgccaccccaacagccgggcaggcatcgctgccgccatcttggaagcgggcgctgcgggggcggggtctcgcgtcatggggcggggcctcggggcggagccacccgggctgactaggcacccggtcccagacaccgcgtggccgggggcttgtgagggagcagcgcctgagcctgcccacctggaacgcgttgtaggcgaccccctggggagcgggtgctagggttcaactccactacgcagactgctagtgggatttcatttcctgcccctcagatttgtaaaagcagaagctcaagcccttcattttcctctgggccgagactgatcaggaggctagtgagccggtttctggtgctccgctgacctcgttatcaccttgtggttggctgagccctctcccagtgtgtcagtggcaccccctgcagcctagtgccacttagtatcaattgttccttacgcaggctacagcgttgcggaccgctctagcgcatttttgtattcccgttgtatcccgcaggcctggaaataaaaagcgattagttaataaaacaatgaaacattgaaggtggagggaaagacagcgtcttctttaaagtcaaatgatgtttccccagatattagagtaaaatggatgctccgttaacatgcaatatgtttaccttacgacaaacactaccgcctagcatattgtgttccttagaagcagatattcacgctgaagaagcaatcagagacttgaataactcacagaatctgccccaaaaagcccatggtcttgtgtatcttgtatggagggagggatgtaaacaatataacgtgataaatatgctggcctagaagtggcaactcattcatacgtggagattctagaaaggcttcccagaagtgatggctaatgggaaacctgaaggacttgtctatagcatatccttctgctttaaagattctgttttcatgggagttattttacaattcatgtaggtaactgatctgtatgcaaattctatcctgtctggtagaggttcaattaacctgctgttccccacactgtggggaaaaaaagcagtt

SEQ ID NO: 35074 - DNA, 2130 bp, Homo sapiens
agtatgaatcaggcagcatgctaagtgttttataaacacaaatgtaaatctcaccaccactatttgaggtttttagggatggaacgttgaggtttagaaaagctaaagaacctgtccaaaagccacacaaatggcaagcagaggagccaagatgggaagtgcagtctgtctggtcccagcaccaagccctaaaccttgatggcactgtccctaaatggacgctagagggcagccagcctgtagaaattctcaggttggggcgaagggagcaaaatgctgctggggcttgtttttctttgtgcagccttcaacccaccaccctatcacagagagggagtgtagggacttcagtcatctccaggaggcctgtccattgagggactggctgtccaggagctgaatgaaaccaccactataatttgacagaggagcccatggaagaggggtgaaggacttgtcccaaaggccacacattcgattctcaccaaatgcagcattagaagatggggagtcagaggaaaagaaaccacgggaaataggataggctagagggacctattggccacatatctggagtctggggctcgttttcctgatacccatgtacagataagtctgagtggaatcctggactgggctggcgtggctgtaggaacagggttactttgggtgatctttgttatcagaaagcagagggagcactgcgggtgtgtgtgaccatagacagggcctgggggtgtcctgaccctcacccgtggctccagcacatagtagtagcccagtgcctgggcctggcaggtgagtttgcactggtcctggggggccacgcctgtgtagcgaggaacccagtccatgggccctgggaagctcttgaagaggtcggtgcggtggttgtaggcagcacactgctcctcgcggaaggtcagggctggaggggtaaaacagtcagagcccctccttccttcctcacatcaccccacatccctccacccaacccctgagaactctagacagcacagctctgctcttccctgcagacggccaaggacaattcccagaggttaaaggcactccccacagcagcaggggaatcaacacccccttggtcttgcactcaagggacagtccttcctgctctactgtcccctcccaagggctcccatcccccctactcctcacctgagccagttgggcagtcctcagtgttgcaggagcggaagcgggtacggcggccctcacagtacttgccaccattccgggggacaggcctcgtgcagtctcgggaggagaactggacaccacccccacaggtccgagagcagtcaccccatggtccccaaggaccccagccaccagcctgtggaatctgcaaaggcacagaacggaagtggggcataagtgaactctctcctgggcttaaggccagtccccacacccccgggccctttaccccacccctgccctaggatctcacattgaagtcctggagctggtccatgtggaggcagcgaccacccatgcaggcctgtgcgggcccgcagggtgtgccatcggcccagggcgagtgtttggtctggcacatggcatggccattgaggtggccagagcaccagagggcagcacagggcggcggcagctgtggacaatggcgtgagtcgggcccgaaggtcagctggcactggcggtcagcatcatagtccttgccagggaaagtcacaggcagatgcaatggagcctctggtttgtctaagagacagtgccctgggaagggggttggggcacaaagtcagcaacgggctgaggggagcattcaggattgccagcagaaagcttaggctccctggggcctgatggagcctagaaaaacaatcctaggactataagaggatttaaatttttgttatttataatttttattttaattacttacttttttttttttttcctgagacagagtcttgctctgtcgctcaggctgcagtacagtggcatgatcatggctcactacagcctcaaacttctgggctcaagcaaacttcctgccttgggctcctgagtagctgggattacaggcatgtgccatgtccagctaattttttggaattttttgtagtgataaggtcttgctat

SEQ ID NO: 35075 - DNA, 2899 bp, Homo sapiens
aactctactgcccctttccactcccctatttgagatgaggacaaagggggtgactaagcaatgaaagacaaagggctttagagtggctgcagcagtgtgtgtgggggtgttggcagcagggagaaggcacaaaagctgcagtgtcctaggcagcccctcaggagccccccaccccagtcccagctcaagctgcctccagggccaagcagcccaaagtctatcctgacttctcccaggctggatcaaggcaaataaatgcagtccttcccatcccccaccaccatggccacatttgctgtgtttcaacaatagaaagaaggcccagggaaagagcaaggaatgaggacaacagagggaccaaacctctgccctggctctgtggcagctgccttgtctagcccaggtcctggtcagttcccacagctaaggatctggccccaccctttggtacagttcccattaggtcaattcccaggccagaagtctggctttcccctctttctctgcagtgaagaattccaccatctctgcttcctggtctgtctgcctcaccctgctgcgctgctggtgggctgtgtccctgggatcctgtctaggggatatctggggaaggcctctttccaggctcagagttggagagttgtacaaactctacgggtgggtggcccagctggagttgggcttagaggcagagggagaaaacaggaactagcctctaaggctggaagaatctttgtccatacagaattgtgatcagactcctggtgctactacatttccgtgctgttggccattacccaggagggctatagcagggtcagaaagacgttagggaaaagaggctgacgcaagacggaagtggggtgtgaggcatctctaagggcgcttcctgggtctgtgattctgtaggttcgggaagcctggaggatgtcagggtcacccacagaggacctccactcccccatctgggatgaggtggctcctacacaccccgacactcccctccgcaccaccaatgccggcggccttggcatcctattcttttttgttttggtttggcgggagctctcagacccgcccagccccacttaggctcctttctccaatctcaatttatgacatctggaaattagctggctttcccaactcctgtcttttggattcagtgatgggaaagtaattggcaaagcctggggctaccctataagggcagggctcagatacaatccgagagcaggactaaagcatgagggcggccaaggcggaagggagtagggaaggaagcgccgcgcgtttccaagatacgcaggcgggctcggcgagagagcacgaagtatctgccccacgcaggaacggcaattttcccttgctcgctcctagaaaagccagccaggagctgtgggaggaaacgccctcagtaaagatgaccgcggtcactgttatctaaacgcaagtgaagccgagtcacaggacccggatgttgtcagttcgacggtaaacgaccctgccagcttccaagagggcggcttcactgtgcgaataggtgagaagccaagaaggaggcgcgctggagttacttccgcccggttctccttcccgcagtctgcagccggagtaagatggcggcgctgagggctttgtgcggcttccggggcgtcgcggcccaggtgctgcggcctggggctggagtccgattgccgattcagcccagcaggtgagatcgagggcagctctcgacacactttctccaaggctagggtttctcaggttggggacgctttactcccccagaaaataataacccaagcctgtgaccccattgtccatccctgatttcttgggctacgggatgcagtggcgcccactctggcgagggaggggagagggtctagagttcgttcgtgccgaggtgaaatcagcggagtgggagactctgctttttagcttcagtaatttgaatgcacctctcctgtcatacctgagtagagctcagccaaagagccagaatgctcgctgtctctctgtcgttgaccttgaacaaacacttttctcacgttcatattcacctggttgataatatcaatatgatgaaaatatgaagaagctaggatcccaaccttgcatgcccaggggtgatgggtggagttattccaggaataatttgttagtaggaatggaacctctagagttccagcttgttttgccgaagctacattaacttcagatcagtgacttggcattaaaaaatccaggacattggctgggcgcggtggctcacacctgtaatcccagcactttgggaggcctaggcgggcagatcatctgaggtcgggagttcgagaccatcctgaccaaaatggagaaacccccgtctttaaaaaaatacaaaattagccgggtttggtggcgcatgcctgtaatctcagctacttgggaggctgaagcaggagaatcacttgaacccgggaggcggaggtttcagtgagtcgaaatcacaccattgccctccagtatgggcaacaagagtgaaacccagtctcaaaaaaaacaaaaaacaaaacaaaacaaaaaaacaggtcatccttcctgggtccccttgagagtgaatgggaacacaggaaccaaacactgttcaggccctttgtctaggatctgtctttgactccccagaggtgttcggcagtggcagccagatgtggaatgggcacagcagtttgggggagctgttatgtacccaagcaaagaaacagcccactggaagcctccaccttggaatggtgagtgaccagagttgctgtcccaacccacacccatccctgcccccagctgatttccttttctttttttgagacagggtttccctctgtctccctggctggagtgcagtggtgcgaaagtg

SEQ ID NO: 35076 - DNA, 4809 bp, Homo sapiens
cccaggaggtggaggttgcagtgagccaagatcgcaccactgcactctagcctgggggacagagtgagactccgtctcaaaaaaaaaaaaaagattttacatatatatctctatctatctatctatatacacacacacacacatacacacacacacacacacacacacacacacacacatatatatatatatatagagagagagagagagagagagataaccctttaggaaggtaggactctgttcttgtgcttgggagtaaggcaaggatatagccaagacaaacagacgggattgctgtttctatgggtcattgttaatgctccattctgtcagcagttgataatgagggtgggcagcatgagatccccagttccagagacctgagcgtcagctgagaaatagaggcagaaatgggaaggtctctgaagctctacagctccagccactatctaagaattctcactcctcgttcactctgtgttgtctgtgctggattggtgtgtgtgtgttggtggcagctgggtgttggggaggaggaggtcagtaaacttcagggaaactgtggaaattgaaagagaatgactggggaggaattccagcagcctagctgagaaggtgggagcaagtattaagttagccactggtctgctgccgtgggatgaggagggaggaggcccgctgaggcacaaaggaaagcatgggctttagaggcagaaaacctgcatttgagttccagctctgtcacttaactctgtggctctgagtgagttacttagcttttccgagccttggtttcgtcacccataaaatggcgatgatgatgtttccctcacagggtagttttaagatttgtgcaatatcgtgtgtgtgaaagagtgttgcagaataaaaagtacttgaccgatgtcagcaattgactgacgttagtcacatgttccctactggtcctctgatacggggtgagagcagtctctggagcccagacttgatttgattttttaaattgcacaaaacttcccctctcagagacccagagagtgagtaatagggcagagtaacaggagctggaatccatatagctgtggtcattcccccagccttgtgttcagggccaaaggtatctgtaaggtctgggaaaaacagacacactttttttttttttttttttttttacatatttaagtgtcttgtggtgggacagaaagcaacaaggctgaggctaggagatgaccaatgatagagtaattgccttctctcccttccccagctcacatccttcctgtccagccctcagccacaggtcacaggacttagtagagacacttctgtggtttcttcactgaaatttgccactacctctccctcccactacccatcttggctgaggttttggtttcagtccagtggactcagatgggtcccttgaggtggataaagtgctcaatggtgcctgaagaacccacagtgctaaaaagaaaaggttgggggctgagggggaaggcctcaattattagtccgtgtgagtcccatttcaatagaaccctcaagcttcctatcctagcctgaccctatggtgtgggaggagggaaaggtaagggcagtggaaggccagagagaaacagaatttcttcccttagacggctcccctccaggccctgtcctacctcccagagccccttcccttctctcctctgagtaccagatcctccctgatacccccgaccccatgggcatcctctatcccctcagcggccctgggagagcctcagctctgctatatcctggatgccatcctgtttctgtatggaattgtcctcaccctcctctactgtcgactgaaggtagcgctgggcagggtggggtaagggctggaaggggaagtgggaggagggcagcagcaaggattcgaagagaaggaataaaaggggatcctccacaaagtttggagggaagggggatgggccattaacttaccctttactgataacctttcccccattccagatccaagtgcgaaaggcagctataaccagctatgaggtatggaccctcctacacctggtgtggacaacttttcagaccctcagccctcctggggctctagcctgggtttccgggcctctgggagggcctgcctctcaggtgctgatctgcatacacctcagaggcctccctcccaccttacctagccaagccacaagtaaaatattcagcaggtgacagggaagaatcaagcatagagtgataaagaatatgtgagagacttggatgtagtatgtcgggtgtatatgtgtgcttgtagccatgtgggcaaacaggtatccatgtcccagagtgtccatgtgagtgccctctagcccaaggtggctggctgcccaccccccatgcctccctgggtggggcagatgctgaggggccctggagaaagtgtgggtctttaatgttttgcttcttttgtctctgcagaaatcagatggtgtttacacggtaagtgtgcctacctcccccacccaggaagtcagcagaagagggtgggattttgagcgatctttggaaggccggtggggggaggggggtcctgtggaggtgggaggggcctctgatggactccagctcctgatcgccctttgactcccatctccagggcctgagcaccaggaaccaggagacttacgagactctgaagcatgagaaaccaccacagtagctttagaatagatgcggtcatattcttctttggcttctggttcttccagccctcatggttggcatcacatatgcctgcatgccattaacaccagctggccctacccctataatgatcctgtgtcctaaattaatatacaccagtggttcctcctccctgttaaagactaatgctcagatgctgtttacggatatttatattctagtctcactctcttgtcccacccttcttctcttccccattcccaactccagctaaaatatgggaagggagaacccccaataaaactgccatggactggactctattcattcattcattcatttatcatagatttattcagtctctgctaagcactagatacagcttttcagttccagaactcacagtctaatggacttcagagctattttgctcgactgagggataaatgctgactatggctgggggagggataaaaacctttgacctgtaggtgctctgaggatggagctggagcagggactagtgtgttgggagtctaggcatatttggaaacataagaaatgacttctgtatcagcatggccttctgtgttcgacaattgaaccaaggttgggttgtaggggaggctgggtgtccccagatggccaccaatccagacagcatcaatccagtacatgcatatgggaattagcatagctgaaaagccaaatatgcagaacggatggtgtaactagggctgagtgaagctcctaatggaaggttttatagcaacagtgaattttcagggcatctggggcaagtgggaccttagagggccagatgggtcagtggtaggtaaggcaaagggaaataagttgggtccaaatgggggggtcatctccttcaagtgcatgggtggtggtcaaggccctgtcaatgcctgtcctgttttcagagctacgaggaatatttgcctgaaagaatttaaacctcaggagatgctgccagtcctactcgtgacccagtcttttcagaatgggtctagagactccaagcttacccctggcataacccccaacctccacagtgctgcacaacacttcacactgcatagtgacttacacttttcaaagtattttccagctcattgtaccatttgatctgctaattaaccctgtgaggaaattcaggctctttgaagttaattaacctgtccaaggtcaccttgcaaggaaccgactgagatcactttcgtctctgcacattttgccacatgagaagaagcagatattgggaaagagaaggggtagtgagtaatcatgaatggcgagggtcttgaaggccagatgaagcaggttgatcaatatctggaaggaattggagccatctccggtgtctggcgggggaaaggtgatttcagatgagataagagaaatgagccagggtaggaaagtaacttttttttttttttttttttttgagatggagtctccctctatcaccaggctggagtgcagtggcatgatctgggctcactgcaacctctgcctcctgggttcaagagattctcgtgcttcaccctcccgagtagctaagactacaggcaccaccatgcccagctaattttttttgtatttttagtagagacagggtttcactatgttggtcttgatctcttgacctcgtgatctgctcgcctcagcctcctaaagtgctgggattacaggtgtgagccaccgagcctgacctggaagtaactcttttaaagataaagtgggaataaacttttattggaaaatgtttcattttcctttgctctgccttttgggattgtaagtctctccccatcaacccggactgatttccattccattttcatttaatccaggtatcacagctcccaaagtttttctagtcccacatgtccaccgaattggatacttgccaggcctttaaatggctaccacagctactacttccaggctccaagatggctaccaggccagttctatgaatagtgcctggatagcagtggaggagaggcttggaatgggtcttccacagacagtgtctagataagagggtttttgttgttgttgttgttgttgggatggagattcactcttggtgcccag

SEQ ID NO: 35077 - DNA, 6822 bp, Homo sapiens
acctaccttggcctcccaaagtgcagggattacaggtgtgagccactgcaccccaccagggtaccctcattttctatgacctccagaaatcgagggattcagtttgtgaatccttccttcctctcctagttccttgtgcaatgcaaagcctctttagtgttcacctgcagagtcgtgcccaggctgtaggagactctgggtttggagaatcatggcaccctcatcctgtcattttcatcagttgtgtcttcaatcctttcttcacccctccacactcaaacctctctccttctagaagcagatttttccttttccttcctcttctcctcccttactcccctacttttcccagtcccccaaacataccaggctcagagctggattcattcagcatttattgtagcaaagagtgggtagggacaggagctctaggactggccagtgggtgttctagaggccagctggggttggaagacaatggtctggacacttcactgggtggcaggctgtgttccaagttccacgaaatagctcaagaagttaaccagttccgttccagccttcttgatcaggggtgtcagctgctcctttgacttttcaaagtaagacctggataggtgaggggattagagtttaatctgagggaccctaggcactggcaggggccttggtggtggtgggaggtcagagcagactgactcaggtccccaaactctagtgcctggtccatcgcatggcaaagcccctaggtaggaatagagtcaagacctttgctaggtagagggacagactctagagactgaaattcaaggcccagttcttgctgttcctctctatctaagagacgtgtgggatctttgggtgatgaaatactttttctctgcaatttaagcctaatctgccctaatccccacccctgggttcagacttctgtgggacctctcatcttcccttctttctctccacagttccacagcccctgaaccccttgccctgagacttacttggcctcggcctgaagctctgggctcttgaccttctccatcaggtccttgccatagtcagtcacggtctggaagtactgagaaaccaggctctccacacatggctcctttgcctgtctccgaaccaaagctcctgcccacacacacacacacacacacacacacacacacacacactcttttcagctgggtccacagcagtgaatcctggcctcctgccatacctctgccagtacccaccccagctctctgccccctccccaaaaaggtatccagccagatctttggatgggctttctgggctttagagagggaatgatcttccttttgagccctttggttgccagacctggatataagagcacaggcagataggtagctataaccaccagcacattctcccttttggccccctctccatatcacacccaccttcaaggctgcagatggtgaggagtagcacagttgctgcgagcagcttcatgttggtaacagtggggagggcggcctaggaagagggtggtgggggtttgggggacactgaagccaaatgggcttcagctcctccccagggatctccctacctgctgcccattccaacctggctctctccctctccacaactgaagcccaggcctctttggatgctgctcacacatcttgcctccttatcttacctagccagcgtctctgtccttggtgtctgtgcctgccctggctggagaggaaggggctatatacctgtctgtttacccaccccctgtcaggtgacagggactatggatgggcccagtggggcagggattatgtgaggataaacaagttggagaaatgggggaggagaggacaagcacatggaagactcatggtgatggggtgagaggcagggggtacagctcttagtggaggctaagggggtacacttcaggtatatttgaggttcattcttttgagatctgaggtccttggacttgagtgcaacaggaagcaggattccaagttatttctctggaaagctctgacatatcaacccatggaataccatcaacccatcataccatggaaagctcatggtgtctttattccattatgggtagatctcatctctcaaccttatcccactttactgcaacttggcagagagatattggggagcagaagaaaggagaaaggaattgaaatcagggacagggttgagggctatgggggttaggggaatgagggtcgggtaagagggcaagtgtaaatgatcttgtccgtttttgagttaatgtgtaatgagacggggagaaaacaggagagcccagaatgacctggatgctgatcactgaacataccctacccccagtaaaacaaattcagaaaacagcttccgcccgtcccctcccaatggagggctctggcaggaaaagaggtgaataagaggcttctaccagggtaaaggttgaaggcacctggtcatttgatcaccttatcagttctaggcagtgattagccaatattgagtcagcaggggcaatagccctggcccttgtctcactcctgttgggggtgggggagggggagaggtacattcccaggttcaaagcatttgggtgaaatcagttaaatagatatcagaagcttttgtatctttcacccttttgccccccaagcatactcgctgagtatgtggaacattcctgagggtgacagtggaggcgcaaagctgatgagggaggtagtgaccagagaccaagaaatctttgttttttaacttttgttttaaattcagaagtatatgtgcaggtttttttgtttgttttcctgagacggagttttgctcttgttgctcaggctggagcgtaatggcatgatctcggctcactgcaacctccacctcccgggttcaaggattctcctgcctcagcatcccaagtagctgggattacagacatgcgccaccacgcccgggtaattttgtacttttagtagagacggggtttccccatgttggtcaggctggtcttgaactcccgacctcaggtgatctgcccgcctcggcctcccaaagtgctaggattacaggcatcagccaccgcccctggcctatatatgcaagtttgttacacacgtaaacttgtgtcatggggatttgttgtacagattatttcatcacccaggtattaagcctaatatccattagttatttttcctgatcttctccctcctcccacccttcaccctccaagaccaagaactcttactccattttcaattattcccctgtggagcgcttagtgcttgaggtcagccctttggcttgtccctggtcctgggatggagtgcctttgggggccaggctccatattcctagattttatttgccaactctgccttgggactcagggaaggaagggttaaatacagaaagcagctgtttcagcgaatagttctgctagaacttactcctctgcgccaaactctcacacccgtttccattccaccaagtggtcaagagcggggacttcgagagatgtagacctccagaagagaagggtgggtccctgttctagggagtgctgcgcttaatgagtagtactcatttggaggtgtgctgtggagggctgtgaggaggatttcccatgggttctttggagagaagggagcgatagaaatgaaccagggttccaaagaagtcttcataatcgttctttctgccacccttcacactatgccagtctacaagctgtagttccacttttctcatggatgaaactacatgggtggaaggagcttcagtggcccaagctacaagatgctccctctagtgtcttgtacgctcacaagtttttttccgaccttggagaggcctagtgatctaaagccttccacttaagtctaaggggccaccaatcaagtcctgcccgcctctgcagctccagggttgaagctcttgggccgtcagacctgccactcattttcttcctcccttcccattggcccatggtaaatagcgaggcttttttttttttttttttttttcattgattgggcggggcccaatcagggttgggttgggtctttgacagctttctttgccagattcaaagatggcgcttacggccacgctaagaatgcagcgtgaagctgcagttctgccatcactcaagatggctgcccccatcaagatgaccggggtgtgccggggggaaaggggcagcatgatggtctgagatggtaagggatactgcaccattgcgggcctggtcttggggcctgggaatgaagaatagagaggctagggagctaggtgaagtctgtggtgggggctaggatcagagaaagggagagaggacaagggtgacaagtgggggtgagagatcaaagatggggcgggagtgtgcctagggttgtctctccatgagtgctctccttccctactcttcctgttccaggtgtagcgtcggaccatgtggaagtttctgaggctggggagccggataatggggggtggggcccgttggggggtaaaggggcaatagcgtcctttcacaggctaacctcggctcttcccagtcctctggactaaaatggggaacacattgggcctggcaccaatggggactttgccccgccggagcccccgccgagaggaacccctgcccaaccctgggagcttcgatgagctgcaccgtctatgcaaaggtgagaacttggcacttgggtgtctcaggatgaaggggcagaggagtggagggtcttgaatgccggatgtccggcgatgggagcaggaaaggggagatcatagctgggtcatgcagcctcagggaggatcaggtgcccaaatgaagtggagcatttcattgcaggacttgaaaggaggttaattcctccaaagtgttccctatgggattgaaaggggagactatcttttggggtaggggttctttgtctgtgcttattccttcccttcccctacccccttcagatgtattcccagcacagatggagggagtgaagctcgttgtcaacaaggttctgagcagccatttccaggtgctcccacttctctggcccctccttactattccccctttcctgtccctggatcatcttctcctttcctttgtactccagccctagccagtctatgtgggacaaatgagggaggatgtggggttctctttacctccgtgcctgtgggacttgttgcttttaatccgatgaccttctctgtatatgttggaatatttaggattcttgagaggccctctggatggggaaaagactaagggtgggatgagggattgaagtggagcaggaatgcgcttttctccactgaatcctcttttcctcaggtggcgcacactatacacatgagtgccctgggcttgccgggatatcacctccatgcggcctatgcaggggattggcagctcagtcccactgaggtgagggctccacacacctgggtcatctccctaaaaaccaatctgggacccaggtctggaggaagaggaattgtgtgtgttatggggaggaatgggccgtaacctgattctctgtgtcttttctgaatgagagagggtagagaaacattttctgtgaagagcccagagtgtgtctttgtgactccaccagggggcgctgtgcactcttaatgaagttctatatttgggtttaggctgagtggtgccatccggctcagccttactactgtgtacacccttccacaggtgttccccactgtggtaggggatatggacagcagtggcagcctgaacgcccaggtcttgctcctcttggcagagcggctccgagctaaggctgtcttccaggtgaccacagttcctgcctccatcccctgaggcacttcctctttctcctccacgggtttcctgctctgagggcttggaaggaggagcagagtctataatgatcataaagagggagggagattttacttcttgctcttgccacccagacgcagcaggccaagttcctgacatggcagtttgatggcgagtatcggggagatgactacacagccactctgaccctaggaaatcctgacctgattggggagtcgggtgaggaactgggacagggttctttttatcttggcggcccatttgctaatgttactatgcctcttcatcttctgtacagtttggagtttagaaaaggaacttcttgggcaggctggggtggcggttattgggagtgagggagcaggtctggatattgtctctatgactgactccatgtctccccattcccccacagtgatcatggttgctcacttcctgcagagcctcactcatcggctggtgctgggaggagagctagtttatcaccggcggccaggcgaagagggggccatcttgacactggctgggaagtactcgggtatggggcgaagtgaagtagtggtggtggtggggggcaattctggacttttctggggttcctggcctgtgtcatactacagttaacactccttcccctctgtactttggattttacagctgtacactgggtagctacattgaatgtgggatcaggcggggcccatgcaagttactaccacagggcaaatgaacaggtgagacctctgatctcattccctccttgtcagcaagtcagtcatgaacttctgttcatctggacctctatcgccctgctgacctatttttcttcctaccacgctgtgtatatatttacatgcatgcctccattctgctgattccccatcaggacccttctggtcttcactgatactgatctctctctcatccttgcccatggttctcaggttcaggttggagtggagttt

SEQ ID NO: 35078 - DNA, 1082 bp, Homo sapiens
gcatgtgcctgtagtcccagctatttgggaggctgaggcaggagaatcgcttcaacctgggaggcagaggttgcagcgagccgagattgcgccactgcactccagcttgggcgacagagcgagactccatctcaaaaaaaacccaaaaaaacaaaacaaaaaacaaaaaaacaaaaaaacaaattcctgacttcaagtgatcaatcctcccaccttggcttcccaaagtgctgggattacaggcatgagctcccgcgcctggcctcttttctttcttttttgtagagatggggtctgttatgtaacccaggttggtcttgaactcctgggctcaagcgatccccccaccttggcctcccaaagtgctggaatgacacacgtgagccactatgcctagcccccagcattatctgtattttattacatttagtctttggtccccaacagatttcctacctgcttctcttaggcagcatgtcacctgcaggccacagaatctggtatggaatgcctctccccaaactcccacgctgttgctggttttcctctgatctcaggagttgccagtgattggagttagggattatgacccgtagtatctggaaaacaagagatgtctgttttatgtggcctccagttgctctcagtgactgtggggttagggcacagaccctggactcagggcaaaggcctgggtgggaggttttcccagcatgacaaaagtgctggttggtggcacacggggagggactccagtgggtgggaaccttgtgactcattggaagctgctgcttattagactcatcgagattttccctgttgatgagtttaaggctacatctgcagccttctgtgtacagagatcctgaacaagctgggaagagagagagagagagagagacaggcagacagacagagcaagctttttcacacgcagtatgtcagtactaaaagaagaggtgtgacagttccacaaggctcccccaaaaaaagtttttaagagactaggggctgggcacggtggctcacacctgtaatcccagaactttgggaggctgaggcaggcaggttacttgaggtca

SEQ ID NO: 35079 - DNA, 697 bp, Homo sapiens
aaataaactcggagacaggccttgttctgttgcccagacaggagtgcagtggtgtgaccactgctcactgtggcctccacttcctgggctcaagtgaatgaatttccttccttgtcctcccaggtagctaggactacaggtgcatgccaccacacctggctaattttgtttattttttgaagaaacagggtctcactatattgcccagagtggtctcgaacttctgggctccagcaatcctcctgcctggccagacttccgttagtcttctagtcctattcgtgactcctttcatacttctgaactgttcctacctgctgttcctacttgccatgtttgcgtttgctatctggctgacctcattcaggtatctactgagccaaatatccagtctgggcctgttgtgtcctatttggcctcccagattctggcacaaacactttgaacaggaagagttcctttcttttgagacttataatctggttttaatcttctttctttaaatttaccaccaatcacctgtggtctattgaattcaatgggctttctttcatgtttctcccaatcaaccaaactcccttctgcttttgacctcctaacaactattttcttttctttgaaacttattctccctaacctctatgatgttatgtattcttggttctccatttctatttctaataggtctttttttctt

SEQ ID NO: 35080 - DNA, 2234 bp, Homo sapiens
tattttttttgtagaaataggagttgctctagcctgtcccttttactcctctccaccctactccccacaagagtcaagaacttttgtgctctgttcccttcctttatcatttgctcttcttctttcttcagtcttgagtgctcggcagttgattcctgtgcttgggttccctaaaactgtatatatatatatacacatatataaatcaaagcgtgttcttcccctcactccgggttcttctagctgtgggtgtcacccacatagcgctgaaacaacgaacaagggagcattgtcctcggctagtgggcgcctggtccatgtggcagctcaaacccaggaattgtggggtctaatcgaggtggttagatgaggctcctcgttttcgggaatggtggtccgcaaggtcttctcgaggcccctctacacactccccaacttaggtcacaatttatgtatctgtctggttaaagcttcgtattagaaagggagggaacccaaagtatcttttctcttcggggtctcaaccggccaaccaccacgtttttaggccgacctgggaggcagggggaacgcaacagactgcgaagtccttaaggaagaatctaaacaagtccgccgtttgctgtttgggagtgcgatacaaaatgaatatgtacgcaggtggaacgtagactgcagattttgagccagcggcgtttctgccgaaatcctggcaaattccggtagaagtcggctgcaggaggcggaggaggagactaaaaaaccagaaaacaaccagcaaaccagctaggcagagctgagcggagaagctccagagccttttaaagagactctcgtcacatgacacccccaaccccgacccccagccggcgcgcctccgccctcgggtggcggggccgcctggcgtcacttccgtccagaccggaacccaagatggctgcgctgttgctgaggtgacttcagtgggactgggagttggtgcctgcggccctccggagatctgaactggcccctcacgttttgctgataactgtttatcctgtgcctgggcagggaaaggacccatgggtgtggaggccaagcgctcggggatcctagagaccccttttcccgtcccccccagccgctccggtgcgctccgtagggcttcggggtcactgacttcgtatcgaggggccctcggctctcgccccttctgttttccccacctcctctagtacttctaacgcaaattgctctcgggcctgcacccagagccgagctctgagaaaataacttcaaggtcagccacccatgggtcctacgatttcgagagcgtatttagacatttagcttcggagagagagatcttcgtgtattttgcctttgcttcgaatgccttcagacactagctgctcccaccgtgagtgggcgctgtctgggttcccagcgggctgctggcaaagggtggatccctactggggtggcgattagcattagcacccagggcggacctctgctgccccagagcaacccggggaattcatttttagttaatcattttacttgggagggagagtgagtgtcccagtttttctctaaaatgtgaattagttgtccagagaaataccctagattttctttcattctgaactttccgctgtctaggtctcattctctgctcagcctctctagtcacagcgactagcgcctttagacacgcctggtacaaatcccagcatagttttgtgccagccttatttttggaaattgtttgttatggaaagttagcttcaatgctgttgagatttcaatccctgatttccccaaatgtgttctcatttctctttccacttcagtcacccagtttaaaaatagagggactttgtttagtttttctgtgacaaaatgattcctcttggagttgaaatcagggttatcttaatccttcattttctccctgtttttcatctccatatgtatcttctgtctaaggtatgccaaggcttgtcttgccagtgctgtcttctttattccagatggtttgaccataattgaatgcttttgaattctctgatatattttggtatcgatgttaggggcttttggtaaaattaacatttagtttgaagtgatcatattggttccaaacagttcattttaggagttttggaattagtgtttaaaagctgaggatcattatagtcattaagtgtatccatacagtatcattttgagttgtgcagcgctgtcca

SEQ ID NO: 35081 - DNA, 1420 bp, Homo sapiens
ttccagactagctgggcaacataaatgagacctcatctctactaaaaatcaagtgattacctttagggagagagaaggagtgatatggaaggtgtggaggtagatgataaacttatttaaatatgccttgttttatagcgtttattttgaaacccaagtattttacatagttataaaacaaaattttaaaaatttctaaaataaataaataaattctcttcatttttacaacaaaaagatttttaaagaagagatagttggctataatacaaaagctatataaacagttaatacctctgcttcctctcaacttgacacagatcatattgttttctttcttgagattaagtctccctctagtggagactagttttacaactaatccccaacacccagcaccacaaaggaaaatatcctttgcctatttcctcctgctgctgtaaaattgtatattttaggtatcagagtcttgagaaggaggacgtggtagaagatactgagcaatgggatagtaaagagctggggacagagttaagttttataaggaattagggatatgagaagctctaagagccaagatttgggttattcaactcagaatgggcaaggaacctcagcttcatgatggtaaaaaattccaccacctctgcccagaaaaaggtgattcacatcctgatatcactgtgtactcagggaaatagctccccacaaggcattgcattagggagaaactatggtgaggaacagcgatgagcaggacatgaagagtgatggtcctaagccagatatgatgtcatgagggtgaactccaggacctcctgtccttcaggacgatcccacagtctcactaaccactgagggcagatgcagaaaagctttgccttcccagagactgatcaggggaaaaggtactggcacagcctcttcagttcctggcagggacgggcagagactagcccacattgaaagtggccccttgggggattatgggaggatccttgtgtcctgggctaccctaggtctcatctgatcttgcacagtgaaagctactcatggaagaactcccttagcagggaagccgttagagtgaaatctttcctaacattgactctggtttgtggaagtatatgacatttttctccattctctgtagcactgtggtcttaccctctgaagagaatgtttgttggttgccacctcagcatgtatcttccaccccctttacaatttttgataagaacacaaaaagaaatgaagactaaaaatggcccagtttcctaagattgttttctgatcctataaaatctaattccttaatgcagctctgtggtcctgctcttttgcatacctagcttgagaatgctgtctaggaagggactcatttgaagaattattatttctgccaattcccacatctttc

SEQ ID NO: 35082 - DNA, 1615 bp, Homo sapiens
caagataaaagcacattctttgtaggactggtttcaagtgatgcaccagtgtaaaaagggatttgcgggcaatcagtataaatgatttgggtttggatttagctccgtcacttaatataaggggatcttgggcatgtctctacaattttatttcttcatctgtaatatcttgataatggttacttcataagattattaaaaggattagatgacactgtaaattacttagccttacagaaagtaaatgtaaagcaggccacgcacggtggtggctcacgccttaattccagcactttgggaggccgaggcgggtggatcacctgaggtcgggagttccagaccagcctgaccaacacggagaaacccccatctctactaaaaatacaaaattagctgggcgtggtggcacatgcctgaaatcccagctactcgggaggctgagccaggagaatcgcttgcacctgggaggcggaggttgcagtgagcggagatcgcgccattgcactccaggctgggcaacaagagccaagagccaaactccgtctcaaaaaaaaaagtaaatgtaaagcaaaagttagttacgattagaaaaatgcatattaacaaattaaagactccgcaagctatttaattaaagagaattgcttaattctgtcggaccccaaattttcctgcttgacaaattcacagaaccctttcaaacgaaacaccaataattaggattagggtggagacggaggagctggagtgaacgggacttggctggaacacgtccacgcacgagtatgaggtgaggtatgcaggtcaatgggaacgccactcccctcgggaaggacacggcacagtcttttcgtcctcctggggctgaacccgggacgtcaacacgaggctaacgggacagctgtttctccgctccctcgtcacagcccgcgcgtgctccgctccgcttcccttcaaccgacgtattgccagtaccgtctccgtcttgtccagcccccgctgtcgggaactgagagcaccctttcccagacttccggtcttgactcattgctgacgggaaagctccggacctctgcgagccgtggggcggggcgcggcgagaggaggggcggggctcacgagtgacgaagggcagaagggcggggcgggacgagaggaggggaggggcgagcggaggggagggacgagaggaggggcgggacgagaggggggcgggacgagaggaggggcggggctcacgagtgacgcagggcagaagggcggggcgcaagagagactgagagcactacgcgggtgagaggaggggcggggcgtgggagtgacggggcgtgggagtgactgggcgcggagaggccggagccggaggcgaggcgaggcgtgagagtgaatgagggaggagggctgtgaggggctggagcgcccctgggtgtccttgagattgcgggaaattcgggtcactttttccccaggcctcaggcctgccgcgtcgaatttggggtcttcgctaggcctgcaaggttggccgacgttcaggatcggtgcccaggagatgggctgccttctctggggctgggcaagggactctgcctggcagcgcgcctggaccggggcggga

SEQ ID NO: 35083 - DNA, 2309 bp, Homo sapiens
ctccctggttcaagcaattctcctgcctcagcctcctgaatagctgggattacaggcacccgccaccacgcccagctaatttttatatttttagtggagacggggtttcaccatcttggtcaggctggtctggaacaccctgacctcgtgatccacccacctcagcctcccaaagtgctgggattacaggcgtgagccaccgcgcccagccccatatatcttttttttaatcaagtgtctgttcaaattgtttgtcctccttttaggagaattgtgaaaatcttttaattaaaaatgtacattctttccacctgatttagaacctaaaaatcttgaaaggaaagagaaagaactaacattttcgtgactgagaactggatggtgacaaatgagaaaataaacacagtaaagacaagtttgggggggtgacagagcagagcgagttgtgatccccgctccgtcaccacgttcgtttcgttcctctggactactgagttaatgataccggcaatcagcgcaaagcgagataatcaccagcgcactcttggatctgtatacaggtttgtaaactatgtggaggaaaccgacccatcgcagtctcggccgaagaggccggagccggagccagagccagagcctgagcagggtctgaaaaaaggaccggccgttcaggactaggccctgaactacaacttgctcctcaggggtccgggtcggaagtgacgacttcattcactgagcagccatttccggttcccagtgtgtccgaagttccttctgggtgtcagaaaagacacaaaaactgacagggcggaaccgcgacacggtgcctgatgatatcaaaaggtctcacggctccggagggacccagtcgcccacagccgccaggggcgccgccggctccgagcccgttgtcgagagccgctcggctgctggggtctgcccttcagtccttccaactctcctcggacctagagttccgggatctcactgcgatctgggcgaattcttacgtagaattcgaaaggatatggggaaggaaaaaaacaaaaacgggaaccactttgtttccgcccggtttcgaaccggggacctttcgcgtgtgaggcgaacgtgataaccactacactacggaaaccaggcggtggcaggttttccacaaatgactctgaaaagtcagaggctcaccactgtgtctctgacccacgagaaaagtacccgggcgggccacccacagcttcgggatcggggcgcgcagggaagtagccagcaaagcaggtaagtcccgggctgctcgcggcggggtcatgactgagggcacaggggtgaactccatggtgcttcctcaggaaacttccggcgcagtcagggctgcagccagagcccggagatagttgggcagggctccaggcgtccccgaatgctcgtcgtggagttttcctgatcctgtcgggtccctaaggaacgcttggcggggagcgtggacgccctggggccaggccaccgcggtcactgagagccacccccccggaaactggagaaaaacggagtagaagagacctaggggacagacttggccgggtcaagggaaaccagctcatatttggaacaaaatacgccttatgtttgcccagcactgaatttagaagcattttcacattctcgagtttaactagttttgcaacagtgccacgagcaaattattaaacgtgttttaaagatgaagagactgaagctaggtaaattggacttgggtaagatggaagcgctacttaacgttaaggagagtctgcgaccctgatgttctcaggctgtatctcgcttagtgggactacaccttattattgtcggaggaaacaaatgaagaggaaagagaccgtgaagagtattcctggagggactcaagataccgctgtaggtagaaccccaagatagctgtgtagagtgacagctgatgtcgaatgacttcatcttttccactgctgcgggtgaaattatctgaggaggtaggaagaggagatggtttagggatgccatatgacaaaagctttggaaaattaagaagaggccgggcgcggtggctcatgcctgtaatcccagcactttgggagtccgaggcgggcggatctcacctaggatcaggagttccagaccagcctggctaacatggtgaaacgccatttctactaaaaatacaaaaattatctgggcgtggtggcgcgcgcctgtaatcccagctacccgggaggctgaggcaggagaatagcttgaacccgggaggctcaggttgcagtgagccgagatcgcgc

SEQ ID NO: 35084 - DNA, 1090 bp, Homo sapiens
agcctgacctggccagtgggcttggccgctgagaaacagtggcagcgaggtgagcacatgacaaggaagagctgcaaagccgatgttgcgaaggtggcgtcagccaggccaaaaggacagatgggtggaggtaggtagcacaccctccaaacaccgcaagcctccttccccggcgcacaggcacgcagccacaggccaagctgcgacgcgagctccgcgcgcgggatctccgcaaaaggtccgcccgatgcgttgggcgggaatcgagcccgggtcaactgcttggaaggcaactatgctcaccactataccaccaacgccgcacggcgcgggcagccccgccgcgccggcccggggctcccaccagcgcgccgccgacgcccggggcaggccggccccgacgcccggtccgtccgcccgcccgcagctccgcgctgccgcggcctctccaaaggccgccccgcgccccaccggtgcaaggccagcgcggctgacccgttacgcccgcctgcctctgggggcgctctcgctcactcgccgcctcgggcccccagagcccttccccaacaggtgcccgggggggaaacggccggcgccggcagggtccccactcctacgcttcccaccgggcgcagggccccgtgtgtcgcagaaagcctcttccgacaaccactttgagccggcagctcgttgggcgccgtgcagggccagaggaggcctcccggctgccgctaccaagccgcggacgagaagaaaagacaggaggccaaggaggcccagaaggccaaagggccaggcaggccaggcccgagatggcaccctgcgactagctggagggcggaggaaggagaaggagggcccacaggctgggtccgaggcggcggcccaaaaagcacggctgcctccccgtcggggaatcgaaccccggtctcccgcgtgacaggcggggatactcaccactatactaacgaggacgacggcgacggtcgccgggacgccagaccccactccgaccgcggacgcctagccctgccttgatcccctcccccgacggcaggggccgggcgcgtgctcgccttccacccgccgc

SEQ ID NO: 35085 - DNA, 883 bp, Homo sapiens
cggagctgggagctacgggacatgaagagagcggggtggaagagaagacggcggaggaaaatcccccggcgatgctcaactgcggctttctctctcggctgtgagccggctccgccctccagcttccagagccggtggcttctgcgttcaccgccccgcgccgtttgcggggcggggctgattcataagaatcggttctcaccaatggagggcttagcttgtttaacctcaggatcataaacaaaagacactgctagaacggtcgggaaagtcatacgctttgcttatcttatatatagatatctaaaactccaaaccgggtacgcgttggtggtatagtggtgagcatagctgccttccaagcagttgacccgggttcgattcccggccaacgcaagggtttttgtctttccttctacgaaaaacctttctcagtcagaacctataacgcgctgtgtatccgttttacgcctcaacgaagtatccgttttacgcttcaacgaaactgcagcaatacctcactttccgtactcgcttcctgtctttcccctggcctctttctaaacccaggcgttttttgaagggattaaattctgatggttctttcctcccttccttcctttgtaaacttccaactcttgaggaatctttgggatcatttcaatcctgggatgagtcttagcttcagaaaggggctcttgtgtcttcacttgcgaggttcattcgctagccacgcactattgagcacgtgaacttggctagtttctctaagaaactgcattttcaaatttagtcttagtaaataaatcaattgaaataaaattaataagtgaaaattttaaaatggatacttaataactcaaccattggagaaggtttcagt

SEQ ID NO: 35086 - DNA, 629 bp, Homo sapiens
gttcctgcattctcttctgctctccttttctcaacctcttctgctggaagctgagtcctgctccagatctaggcaagtgctagcgcagaaaaaagacctgcctcgctcagggctatgagccgcgccctgaagcacggaaagctaattgtgtcactggtttcaaatcaacctcaatttttttggagacgtgagtgctgagcattttttcttcagtgaagtgacttggcagccaaaatcgccaacgcccgtctctgtggcgcaatcggttagcgcgttcggctgttaaccgaaaggttggtggttcgatcccacccagggacggaagtcgcattttgtgaaccctgggtttttgaaactttgactgaaaaaactgcgtgcgatgctatccgctgggagcgctggggccttggcgctcaaaaccagccgcggtgctaaccgcagggagctctggtagcagacctccgcgttgtgtggttcccaatgtcctcttctgccttagtgctgtacgggtaattttgaggtatttggtttttccgactagggttgtagtgataactcttagctgcttaaccacggcaattacgttatggaaactgacactttaagaaaatttactgaccaaaggaagt

SEQ ID NO: 35087 - DNA, 622 bp, Homo sapiens
gacactaaccaaagtccatccttcctttctccttccgtccctcccttcctccctttctcactcactctctctttctttttaatgccatggagtaccatatttttcaaagttccaacaaagatgcactacatttagacaatgtggaaatggccctcagccttctctccctgaagtctgtggccagcaaaaatctggactttacttcactctgatgctgaacacccccctcccccacctcttccccaatatctcagatcccaagcctccctggtttgcttctaggaaagctcagcaattccctgaaaagaatgcagctcaagtgactgctccactttttcaccttggcctttgcggaaggctgtggctgggctaccctatgcatcgatcaatgaggtcatatttacccagtgcttggcctagaggcccaagacagggtcagcagtgcttgctttggctctagtttgggcgttggttttgcagcctcagcatcagcacaggcaggccctcttctccagcagtgctctggctgatatttcttctttttcccacagccaatcccactaatcctgatgaggctgacaaagttggggtgagtgatcccagccatctccccctcccttct

SEQ ID NO: 35088 - DNA, 1278 bp, Homo sapiens
tggtgcaatcttggctcactgcaacttctgcctcctgggttcaaatgatactcatgcctcagcctctgaagtaactgggactacagccatgcaccaccatgcccatctaatttttttttttttttttcagtagagatggggtttcaccatactggccaggctggtcttgaactcctgacctccagtccagtgatccgcccaccctggcctcccaaagtgctgggattacagaggcatgagccacagtgcctggcctaccttaccccatttctgatggctcatttcatctccaaataacctactggaggcctggtgggtgttatgatgacagaaaggggaggaatgtggccactgtgaaaagacacatgggccctaccattaagtaggcctcaaacaaatagcaaacattcagaggcagggacaatggttcccaggaggccatctggaacggaagggagaggctgtagcctctatattgctcctattcctgagtctcctcaggtttctcaagatatcggatgcctcctatctctaatttcctcaggatcagtggcctgagctttggctatgagcctaagccctgagctgactgctggatcctctgggaatagattttctttttcctctactctttcccagtggattctccctgccttgtactcatatttccactgagactgagcagacttagtcatgctccagaaatagagagctgacacgagtctagagaaatttgcatgcaaatttgtgtgggctttggatagtcagagcctactagagactaatctgatatctaacttggtgccgtgactaatcttccttctctgtctcgctaccttctagtcactagaaacatataagtgttggaatgggcaggacatttgaattctcatcattgattctccagtgattttctattggccttcaaacaacatcccaccttctgtccccagttgcatcaccagtgaaaagggtggttgttgcactgacctttcccagagtgtacatgaaggccagctggctatcagacaatgacatgctttgacaggcccctgagctctgtgagtaaattcttgaacagctgagagtgctaccattttgtcatagccctaagggtgcagatgatgctgaaagcgtgttggccaaatctgaatgatgaaagccaattacaaactagaaaatgaaaacagaccccagatgcaaggagatgagacagttaaatttacttcctcttttctaatctgagaggtttcatgttgaagaaaatcagtgttgggg

SEQ ID NO: 35089 - DNA, 2196 bp, Homo sapiens
cgacaaggtggtctacaagcttcactactaccacgacggccaggccgtgcgctacttccactccagcgccaactacactgtgttacaggcgcgtgccagcgacagcgggcgctaccagtgctcgggcaccatgcgcatcccggtggagagcgcgcccatgttctccgctaaggtggctgtgacagtgcaaggtgggagagaccaggggccccgggagggaggcaaatgagcattgagaaattctgggacaggagctcggcgagaaaagaaggggcggaagttcaaatagctgccacttggagggtttctcttagactatggacgctgtctcctctcctttgccgtgaagcagcgcttgatccgccgcctgcttggaggctggtccctttccccgacgcacatcctggcttctcactctggctggggactcccacagagagggcagctctggcaggggcaggggccactgtgggactgggacgaaggagcgactccctagcgtcctgcaaggcaggcgcagcgtctcctattctaggctgcagaacccgagctgagtgtcagtcgggatgtgacatgaagcgtctggcctggtccctcttcctttcaagctttccccgtccctcgtggactcggtccccctgccccacatttcagaaggctccccttccccctccacgtggacacacggcctcctcccctccccccttggtctgtgggtctgcaaggagccctcgcgggaagcaggaaggagcggggtcgcggagcggtggacaagccggcgccgttgctccccgccctctccgtagagctgttccgggcgccggtgctgagggtgatgggtccgcgggaggcccgcggcgcggcgctgggtggggtggtgctgcgctgcgacacgcgcctgcacccgcagaagcgcgacacgccgctgcagttcgcgttttacaagtacagccgcgcggtgcgccgcttcgactggggcgccgagtacacagtcccggagcccgaggtcgaggagctcgaatcgtactggtgcgaggcggctaccgccacccgcagtgtccggaaacgcagtccgtggctgcagctcccggggccgggtgagtgcctgcacaccctcccggacgccgaccctggcggtcagccctgcttccgcctctcggcacccacgaatcacccccgccccctggttcccgtcccgccccccgcctttcccatctccccttcgccgccctcctcctcacccctcttccggccttccccatccccgcccaccgccctacgcccctcccccagcccagcgccgagaagaaccatgcaagccgcgcgtgactgggcgtaatgcattcacaggttctcccctggacccggcctccaccaccgccccagctccatgggccgcagccttggctcctggtaataggccgctttccttcagaaagcccccggtgtccagatcggtcccgttggtcacctccgtccggaacaccacctccaccgggctgcagttcccggcgagcggcgccccgactgcggggccacccgcctgcgctccgccgacgcccttggaacaatcggctggagccctgaaacccgacgtggaccttctgctccgagaaatgcagctgctcaaaggccttctgagccgggtggtcctggaattaaaggagccacaggccctccgggagctcaggggaacgcccgagacccccacctctcactttgctgtgagcccgggaaccccagagaccactcctgtggagagctgagggggcggctaccgtcccctctgcaggctcattcctccttggtctcctgcttcccctcacgcgaatttctttcaaagccatctgtttgcatccttgtgttttgctgtggtttttaaaggagcgcccacgaagtgtagtggctgacgatttcaacctcacacagcagtttgtaaccgcaagcattctctttgaattctcacagaattcagcaagaagtagaaacctgttatttactacattgtgatttaactttggatgtgaatttagtcacccttagcccttcagataagcctagccagtacatatttcagcacaggcagtttttttggtatttaagtacattgaggtaactgagcacttgagaatattttagggtcaaagtgtaattattcataatgaatttactctgttgatattaaaaagacgttca

SEQ ID NO: 35090 - DNA, 1140 bp, Homo sapiens
atgaaatgcacagtaaagatggctccataatattgaaaaaaattttacttcaaatgcataaaatgatgcttctgattcagctggtgcgacatttatttcacatttgagttcagctgctcctgatgtctctttcctgaaaatttcaatactaagagctcgagaaaccctgtatttggggaagcttatccttcaccatcaactttgggggtaggggtcagagggaacaagggtggaaaggccgcgctgaatggggccgaagctccgcccctcagcgataagtccagattcctgcggccgacgtggtcctccgagggagcagcagagccgccgaggctggcgagtcccaggggaaggatgttctagccggagtctactcgatggtagggcaggaagccgccttgtctctgggcgcggccatgttggaggctccgggcccgagtgatggctgcgagctcagcaaccccagcgccagcagagtcagctgtgccgggcagatgctggaagtgcagccaggattgtatttcggtggggccgcggccgtcgcggagccagatcacctgagggaagcgggcatcacggccgtgctaacagtggactcggaggagcccagcttcaaggcggggcctggggtcgaggatctatggcgcctcttcgtgccagcgctggacaaacccgagacggacctactcagccatctggaccggtgcgtggccttcatcggtcaggcccgcgctgagggccgtgcggtgttggtgcactggtgagtggccgggtcagtgggtgacgtgccccgccaagcttccagccggcccccgtcgccccttaccttccgaggccgtcgggaggacaagagcgcggtcatgccgcgtgaacctcctcccgctgcctcccgcaggaggcgtgtttccaagagaggaggagggttgaggcgggcccctggtgtgtgcaggctttcattcattcatgctttagttggttcttcctgcagcagcagagggcgggggaggtgtcatctgataaatgacaaattacctacaccctaaggagtttacagctctgttggagaagctagacacccaccccgattattgtaatgcagattaggttgcttggtgtcttgtaaacgggatttacaaagat

SEQ ID NO: 35091 - DNA, 2350 bp, Homo sapiens
gagccaccgcgcccggccttattttagttttttatgtcaatttttgaatttgtaattgggtgagaattaaagtgttataaatttcaccttaagtgaaaatttattagttttctaatgacaaaagtagttacatctgacgtaaggggatttaattatctttttctgggcttgcgtcccggaacgctgctgcattatgtaatctgtagtaatatacccacgagcagtttggagggttctgggaagcacatttgttttgcttacctaccatgggaaagattccacgtggtcctagaagcatacgtattcgtcggttacagtattttaaatattcactggccgctgaaatttaaaatggatgaaaaagaaattctcttaagtagcgttcttgaaactgctttatcaaactcagttcatattttcagttggagttcgtgatgtatgtgattttcctttaaataaaacccgaatctttagtaatacaaatattgggaacttcgattactgtaggtcttagggtagactcgcttggactttgactaaatactatgctttagaaatttatctttaggagataaatttggggggtttatctttttatatttgctttgtttcaatttatttaaataaaagtagtctttctagaagtatgttttatagtaccacttacctcggttactgtcccagttaagcagttttcacgaatgtggaaaaatagtagtgtttttctttcatacacgcgtatatgaaaaatttttacattgatagagaattattcgtaaaaattaaagtaaatttactgttagtctctaattttgttctgagatagccacgctgtggcattaagaaggataatcaaggaataagccataatgttcagaaaggggctttactttttatttttaatattattgataaactttgtttagtcgaattgatgtctgcgtgtcttcccccgccttccccataaaacagcgggacagaaagtcctgaaaactccaaaagggaaatatttactcagaggtctattcaaatttgcttagtctctgacgttttcctgtgtcgtacaaatccctcgtgcggcaaaagtagtttgtctttactaggccaccgtctcgtcagcgttacggagtattttgtccgcctgccgccgccgtcccagatattaatcacggagttccagggagaaggaacttgtgaaatgggggagccggctggggttgccggcaccatggagtcaccttttagcccgggactctttcacaggctggatgaagattggggtgagtgggatctgagaatgtaccagggtggctcgggttcgcgtctaaaggtttcttcctccctacttccgcccactcgtggtgacaggtgtggaccaaccctgcctggggagtgaggcccctcgtcactcctgttcgtgcccctggaagagtctgggagtatcgttcggcttctgtcctggccacagggagagtagaatattgtctaactggagttaactgtcgtttttcactattcccactggggaagtaccgggtgatctttttgtgtggctaacactggacgtctttaggaggtttagagcaaaatggctgggaccgccaaaaaggctacaagctatttcctgagtgtgaaatgtgggcggtgagcacaatggagtgggtttttgtgtgtttggtgtatatgagagaatgtggttatatacaagaaattctaatcttacagcttttactattggtttaagcctgatgtccgtcttggcagaaaagcaaaacacccaagcacctgacctcgggtccctgcttagctacacctaatacttatggtgtaatcctgactgctctccagatacagctcttaattttcttgttaatggatattttgtttggttttggtggtcaggaagggtggaatgggatgaagtggaaatgagaatgaagaaactttgttatctaagtatttagaggagacttttattctcctcttgattgcaagatataatagtaatattgttcttaggttccaatatgaatttgggattgtgtaggttcccaaatgggcccgctagtgagcctacaccactcatcagccttggaactggggggaacccagtttatctttctcccttggatcagcattctcaatagcaggagtggaaggaatctcaactttttattgaacaaagtcatttaattgtttcaaggacagatgttctctaaaactatattctattggagatttattttaatccttgggtagattttttaagagttgctggaaaacttaagattttttattcccattttcccaagccaaatgcattagtgacagtaaccatttatttagctct

SEQ ID NO: 35092 - DNA, 1168 bp, Homo sapiens
tataataacttacagtgtttatcaatcaataaggtttttagttttaaaaaccttattgattgataattaaattgataattaaattaaaacaagctgggccagcactttgagaggctgaagcaggaggattgtttgagcccaggagttcaagaccagcctgggcaacatagagagatcctatctctacaaaaaaataaactagccaggcacggtagcatgcacctgtagtcccagctactggggagcctgaggctggaggatctgttgaacctgtgaggttgaggctgcagtaagctgcaattgtgccactgcactccagcctgggtgacagagtgagattctttctcaaaaaattaaattaaattaaactaaaaacaaaatgtggacgtacttgaaactttgactcttacattgattcaaccttcaaaggaacttgtccatttgtgaaagttttccttttatataagtctttcttacagtcaaataagtgtttactaagtgaaatactacattttatagtgcagtggcactcaaaggaaactattttgcagctgtagagttttttcttttgtcctttttactttttccaaggcaagatgcctggtgggagagttgtctggaggcaggatgatcagaagcaggacctggccagctgttcgcttatttcagtctgtatgaaatcatctgatatgcccataagagagatgtgtcaattggctaatgggtcagagtattgattttatgttttcagattgctgacagagagattaggcttccagatacaagcagttccacaagtctctgttttcagacaggcacataattaaagtaaccacacagttctctgaggttagagttccatgctgtgatgcaagcctctctatttggtatttaaaagcagtttgaagctgttgtgtaagtatcactggacttggagtcaactgacctaagttctagccttggcccttctactgtcttaacagtggattaaatgatgaggcttattttaaagaatcttgaaaactatagtaatttcaacaagaggagattaattgaatatattatgaaacatcaagataattgaaaatctgtgctgccattattgcatgtcaaaggtcattttgatacactgtatgtgcaaaagcagtttaccaaacagaattacata

SEQ ID NO: 35093 - DNA, 900 bp, Homo sapiens
ggaagtggaggtaaatattcaatgaagttaactacattgtcccagatatatagataagatagataaaatgtatatattatatagacacttatttttattataagatatgtactgttagagttggtagtataccagctttggttccctgcagtctgatttttgggcctcttggtaaacaagtacttaaaaactgttaccccagtttgcaaacctttaataattagagacaaggcaggttaactgtaataattcgtatgcatgcaagatatgattcttctttttcataaatcatacctagtttttagctttctgctgcaaaagtaactagtttgttagaaatttagtgaaaagaaaaagtaggagacattgtgttcagaagatcatgtttaaaaacaacaattagtatggcatctgtatcttagcaggaaactcagaattaagtctgagcctgaccttaacccatgaccagtggaatctaagtttgtttatttttacaatagccttaatttggggcttgcaagttttttggtttgttttcacattcaatttagagaccctgaagcagtattttaatgataggaattaagctatgtataactttcatggcttgaagatcagcaaattctgttttttcttggttataatgttatcttaatcagaaatgtgtgatctttgtgtctaacaatgcacttaaaaaaacaaaacaaaaaattcccttgctgcaatgctggaattctaacagaatttactcatcttctctctcctccccaatttttaaaaacatgttctcatggaaatgttgccttgaattacacaaaatacaagcagttactggaaatgttttctacacagttctgttcatgtatatcaatttcaatttgtttttcactttttagattt

SEQ ID NO: 35094 - DNA, 2597 bp, Homo sapiens
caaaatacaaataataatataatgcacagatgttaaggcataatatacctgcttatagtttagaagaaaaaaaaagacaagcacaaaaatcactgtactccaaagagaaagtcacgtaagtaatatgtgaggtactaagaaatctagtgaaaagagattactttcagcttgattcttcatggagaagtgaaataactcactcccattaccagttgtggattataaatgagcacagtgtatgttattgactaattgctttctctgacacattatattgaaaatcggagagttggccatctttttcaagtttgtgtatctcacataatgtaggtactagtaaattttctgtctggtagcaaaaacctcagtatatgaagaagatggaaacgaaaagccctttgaactaacctgcagtcgaaccagttcacattttgattgataaatataattaaaccttcaaatacaattataaaacaaaacactagaattttggggggattccagataagtttcaataaaatttagtctttaggggaaaagtggtattcatcatacattttaagaccatagaggaccttagaatttcatgatctgtatatagacagcttattagaaatgcttaggaagtaacttcatagacataaacataaatgggctttttgttaaagcataaaaattacaatatttacttagccttacaaagacattcagaataagtttaagaaaaacagtaacattgagaagaacatctctttcttcagtaaagacatacctttgaagttactcatggaataatcatttactacctgaagaagaatatattccaaagtgcattttattacattccaaagaatgtatttaggaagtctcacttatactcaatctataggtacctaagtttctctgcctaaactagaatagaccaaagggtcagcttatgctcagaaaggctattttctaagctttatcaaggcagaattcacttaattttgttcttctgatattgggttcttatgcaagagaatgcctggtcttattttgtaacagtgagctatctttatattaagccaaaaccaacaagatgctgtttgactatgtttatcttggccaggtgactgatttttgaagaggagcctttcatggatttggaaaaatccagtcattagaggatcattgtctttttaatctgtttcagactctttgtaaatagtctttttaaaaacttccctttttaggataagtcctattaaaaaatcaaaattcaaattcaagaaatattgattgaatatataccgtgtttcaagtaccatgctacatcctcagccttttctcttaacagtcttgctctgaggatacttcttaaattagagcctgattttttccccttcctcatgtacctcaaagtctgcagcagggcaggtggtatccttgcttcccactacaactttcaaattatttctccttcagtccccttaacatcttgcaaatctgtcacatcacactttactcctctaacccttatttgttgctgccgtctactccaccttcactgacgactcctccactgcctctgtcatcctgctgtctaacttcagcatccgcatagaggagtcattagtactctagccttttttgatccagtcatcttttattccgcgccacctcagcctcccatccatatggtcataatctagaccttatcatcatcaacagcagcactctctttgaaatctccttttcaggcatcccactctctgactgttacttactctcttactttaaaactcacactccaactactctcttaacttacaagtctacagtcctttgaccctgccacttcttttctgtgtccatcacatccttaatggccatacattcctccttacccagcttaaattccatggtcctgtcaccactctcttgtgaacaccccttacttcctggctcctttcttaggtcccactttcttggaaaaactgctttctaggtaaacccagctcttctctctatgcctgctctcaagcagctgaaaattgctagaaagtaccgttcagtgagaacaagtagattcacttcaaatttgtgaccattaatttcaaagggatatttaatatgccagtcattactagtaaattcactttccctctctctgaaaaaaagaatttctcaccttctcttgtcaaaactccaacatcctctctccccaccccctcagctgatgaactcaccaaatactacactgagaaaatagatgtcatcatgcaagagctacatcatgtttccactaccaccggcccagctgcatctacacccacaaactctgccttccctcttgttgcactgaaagaaaagtctcttccattgggttctaaatcccagctttgctacttgctggatatgtatcattgggcaagttaattaacttttctgtacctcagcttcctcatctgtaaaagaagatattagtaataccttcctctaagagttgatgtgagaatgaaatgagtaaaaaagctttaaatagtacctgactattttggggttagctgctgttttactgcaataatcatcattgccattgtccttaagacatc

SEQ ID NO: 35095 - DNA, 1054 bp, Homo sapiens
gcccgcaggagggctcaggtggctggaaggcgttcggacagacgcccgcggtgcgcgccgggacgggcggcggggagcctcgggacgcacggggaccggacacggggagggaagaggcggtggcggcgcgggctgctgggcgagggctgctgggctagggagccgcggagagctcgcgcggaaggagggcggagcctctattgtgccggggcggcggagatgcagccagtgaccgcgcggaggaggaggacctggaagcgcacagggctcgggcggaggggtacccggcggaccccgtccccgctgggactcagctgccgcgcgccggctgagggtgacgttggaagggctttactttcttctcatctgatcgcaagtgagtgaagagaagttactccgagcggcgtccctgaagttttggggttcgaccattcttggcgagaagagcgactttccatcgcaggcacccagcgctcgctccaaggctgagctagttagggatctgcggcatcgtcctttagcacacctggggcaggggagaaggcgcgtttgttcccaggcgtttcttttccctgacttaactctgggcgagttctcgggcagctttgaacttagcgccgttggtagctgcttgcctgccacggctttagaacctagtaatacctccacccagaggaaaatcattgaattccttcctagagtgtgtcctgagttgtgtaaacgttgaaagttaggggaatgactgtacatctccgacactctccgcgagtccccatggggaaagctactgcctgataaatgattaccaaagggaacagctcttcctgtcttcctggtttgggacaaatctccgggtctctgttaccagattatctctaagagggagtccactttcaatagtgtgcaattatgttactatgtccctcaattactgaggacaaccttttataaacctacagtgaagattaccaatatgtgaatttaaggaagggcactgtgccatcctggacaactgtcactcggaatattgaacagagccaggccccttcaaagg

SEQ ID NO: 35096 - DNA, 2237 bp, Homo sapiens
gaaataactcggaagctcattttgtccatacccagttgtagacagtcaagaatataaaaatgttctggattctcttgtccttagtactcctttctgccttccccatttctacaaggctgatggcttttaaatgttaaaaccctccctaaaggcaccccataagccctattacacaagtcacatacgaacaaaaagcgcctaagatagtcctccatttgggcgcagtcttgccttctgagaaaggggactctgagaattaatgagggcccagatctgggatatctgggacaagacttgggccttcctggtaaaacacgaaaacaaaacaataaacacggcccctcccccctctccaaaaacaaaaacaaaaacttcaaggccatgccgccgcggccatcagtagctccggctcagaatttgaccgttaaaaaaaggaaactaggctgagctagggcacctcagatcccggcagtctggggccggggcgaagttgccggcgtcgcgcggccgggggcgcgggcagggccgggcgcgactctcccggggactttcacctgctcggctggcagcgcgggcagcgcgggggcggacccggcggcgggcggggcctctgagcccggcgggaggagccggcctgggcccgccccacaggaggagccgctcgctggcggctgatccagcgtctccgtgacaggcaccctgctccgccgccaccgccaccgccaccgccaccgtcgccttttcttcttcgtcccgggcggtgcgttccactgctctggggccggcgccgcgcccagtcccgcttcgggccgcaagccccaccgctcccctccccgggcaggggcgccgcgcagcccgctcccgccgccacctcctcccctgccgccctcctagccggcaggaattgcgcgaccacagcgccgctcgcgtcgcccgcatcagctcagcccgctgccgctcggccctcggcaccgctccgggtccggccgccgcgcggccagggctccccctgcccagcgctcccaggccccgccacgcgtcgccgcgcccagctccagtctcccctccccggggtctcgccagccccttcctgcagccgccgcctccgaaggagcgggtccgccgcgggtaaccatgcctagcaaaaccaagtacaaccttgtggacgatgggcacgacctgcggatccccttgcacaacgaggacgccttccagcacggcatctgctttgaggccaaggtgagggggctccggggagggtgctacctgtggtggcggttgggggggcatgtttgagcggatgggatgcacagccgtcctggacccagagctggcgggctaggccgatttgggggcctttctcttagggagggtaactctcccttctgagtctataattccgcgggctcctgcccagaactgctcaagagcaactgcaaagtttgagcggtattgcctcacctcccccttcccacctgcagactcccccatccttacccgcctaggactggattgagttacttcccggatccctcctccagaggagaagccggcaagtgagctcagcctgggcacctggtcgtttagaatcggtttaaggaagctctggtgttatttacctgctgggctcccagggagaggtgctttcaggaaggtcttttaaaagaggaatgcctgcttcctaattgaagaaaagaatccagattttttttttttaaactccaggtaaccgggtctaggtgtcagagtcacttcctaaatggctaatttgccagactcctctgcatgtgccagtcactgaagggagtggtgaaagctacccatttgctagttttgtggcttaatgttaagtttcagcatctagtagggaactgttgctgaagaatttagcagagatgactggaatttcagcgctgaggtcggagccccaggtccaccgttgggggaggggtggagcagaagcctcggccctggaccatcaggtgtgagcaaggctgactccctgtgatgcacctccctgagtgaggagttctggcttctgaaactgcagtggcggttcccactgcccatcagcaggaaagagtgctttttctgtggaacagtgttctgctcttccttcaagccacttgacctcctctgtgacgtagagagacccagggactttcggcacctacagtgtgcctgtaggtggaaaagtattgtccctctaagtaggctgggtcttgctggttttgaaa

SEQ ID NO: 35097 - DNA, 678 bp, Homo sapiens
tgactccaggtccatggttctttcacctcctccaaggctcactcaaacctgaagtattaatagttgctccctttgtagtcctaacactcattgcctagattgttcccttatatctgcgtgtatgatacagatggtcagaactggaaagcaccatggctcatctagtacaaccccctcaccccatcattgtacagatgaggaaattgaagtttggaggggaagtcatggacccaaggtcacatagtcagataataacagaaccaggacttatccctggttccctggcttcaaactggtttcagttatccatcacttcaaaacaaacgacctcaagactcagtagcttgaaacaataactgtttaatttgcttatgaatcatggctcaggaattcaggcagggcttggctgggctgttcttctgttgcttatggcgttgactggatcactcactttgctgcattcatccacagctaggctggaatgttcaagaaggcttcactcatatgactgtgccttggtcgtccttcatgtgactattctcttcactggctggcttggatttcctcacagcatggtggcccttttgtttggcagctggttttcagtagggggtgttccaagcaggaaagcagaagctcttaaggttgggtctttctgagttacatagggtcacttct

SEQ ID NO: 35098 - DNA, 960 bp, Homo sapiens
aagataacattataattactgtcatttagaaagcgcttactgtgttccaggcactgtgccaagctctttctatgaaacgattaatttaattctcccaacaaccatgctagttaaggtattatcattatttgtatcttatagatggagaagccaaggcatagagaggcagagtaacttgctcatggtctacatctagtagtgggtagatcccagagtcaaacacaggtagtgtggctcagggtgtctccattgttaactcttgtgctgtatgtcattcaaaataccaagagctaatgtttatcaagtgctcactgtgttctgtgcattgttctaagcattttacatgtattaactaatttaatctttacagtggcccctatcccatggggataggttttattgttccagtttttcagaggagggtcttttaggttggattgaataggcaaatggtctgttaaaggtgaccttagtcctttccattgtggctatgtccgggacccaggtctgctgttctgtgccattgggcaacgggtcacctgtaaagacttttctggaccatgttgatgttgtccagataaagaaatgaggcatcagtgagtaggtggaaatgctggagaatgggaaggagaggagctctgggaggcccttcctggagggtgttattcttggctgggctcttgcctgtgcatttcctgtccagtgtggcatttcactcctttcaatgcccatgcccttttccttgcctttcccagcttttttttttttttccttttgagatgggattttactctgttgcccatgctggaatacagtggcatgatcatgactcattgcagccttgacctcctggggctcaggtgatcctcccagctcagcctttcaagtagctgggactacaggcatgtgccaccatgcctggctaagtttcatatctatatctatatatctatatctata

SEQ ID NO: 35099 - DNA, 766 bp, Homo sapiens
acctcagagatcacctctgagattaggtcctaaatcagctctgttattttgcagatgagggggactgaagtacaaagagatgaaagtgactagttcaaggctgtggatccaacaaaggatgggattggcattgcagcttgtcctgaactctcccaggccacattccagtctctcaaaccccagcttccctgttgagtaatgagtaaacagactattgtaaaacgaagaggacttttatagagtaaattgaagggtattcattcattcttttgttttaggaagttcagtgtttcagctagtggattttcttaagatacaggcatgcagaatttggtgtttgtgtggaataattgagggagagaacagaggaggatttcatcagcactatcacagctctcctgtggcagaatcaagagcacaaccagaaggcctggcttcgtcagtcctgttgaacttttcatgccaccaagtggtaaatctggtgattgttgacatttccaagaaaagtgtttctctgaaggctccatgctattcactgaataagagtttatgactgacttaatgaattgacattttatttatctcagtgcttattctctctcagtggtctttttgtttctttgggcaagaagatagtaattcaaatttgcatacccttgcctggtacatgatttatgctcaatgtatatgcagtgaatgaatctgtttggagaaatgggactaacatgtgaaaagatgaacaaactcacctactgtgtgttgttga

SEQ ID NO: 35100 - DNA, 1242 bp, Homo sapiens
aggaagcatatataataagcaaataactgtattaaaataactttattaaataagcctctttccgtgggaaatcatggacttaactattcttggcccacatacctcaacagctaatataataaagaccctaatatctctatgctcccctttctgccctattgtggcttgtcacttgacacagaatcagctgcattttaataatgcagcaagccacaataggacagaaaggggagcacagagatattagggtctttattatattagctgttgagggatgtgggccaggaatagttaagtctgtgatttcccatggaaagaggctctcatttagattggtaaacagactgatccaaagtgcaatgtccttgcagggacatttccctgggaggttggaaagtattcaaaggtgatttgatttagctgctgtccaagctcagctgaaacagcccgttttatgggcctcttggaccattctgtgagctccagtgttataaggcggcattttttttttctttttggttgggaggatgtgattaagataaagagaggaggagaaggcaccaaggtagacagaaaatgattttacatatggcctcagtcagtatgtctggcattattccctgtactgctgtcaaactttgggcaagtatctacagttctctaatctttaggcctcttaactgtgaaacagaggtagcaaccttgtttgcttatttaatgggattgtcaccaggatcaaatgagatgtgtgaaaatactttgaaactgtaaactgcacagtgaagggtcctttaaatgactatcaagaaatctatttggtgataatggcatgtgtgtgtcccagacatgtgattcctaggcctgcctggaaggtgagctgaaacattatgatcacagtggaggattatgggaagtttcaaagtacagttcctgggagggtgaaggactcctgactctgccaaataccggatgtgctataccaaacataatgctccctctaacagaagttgatggcatccttggattctttgggaaggtgacgcacattggaggaaatgcaactcaaatatgcctccccaggcaagagaatccataggaagaagcttgtgatgggaggatttacatctggagagattagagtagatggatacaaagtgatgctagtatgtaaaataattttctacccacctcgataagatcctcataggagaaatgatctttgtagaaagataaagtcaagaa

SEQ ID NO: 35101 - DNA, 1912 bp, Homo sapiens
tggggcaggaaaacagctactgagatggggattctttatttatttatttattttttaatgtatggtgttatttgaccaagtattttatgatatagatctaggctcatgatcctccaactcccttaatcttatctaacctcttctaattctttgaatacctaccatgtattcagtattgggctggatacaaaagaaatgcaagacatcattcttttctttatggagcttcagtcttgtagattaccgtatcatatggaaaaacatagaaccagcagcagtttttggaaatgagaatgtaaaattagaacttcagattctgtcttgctggtatgataccctgggcttactctcattctctcactgctttccagatgtgtcctttttcttttctcatgtgctgcagaggtgggtaaatagggtactctctacctttcatgacaggaaattcaatgtcaggtgatttgccaaagtttagagacaagttggtggaagaaccacagtgagatgtttgtgtttttgtgtgtttgtttaaaaattgcttctcagctggctgtagtatgaagggagttgccttggagcatacagaagtacctcctagcttttctggggtgaatactgcccttccaaacatgctctggtattttagaaagaggtgtaatacatcaggtcaaccagagtgcaggtcagagtgcagcagctctgagtctgttgctgaggaattagtgactcatatgaaaagcacctcggacttgctcatgaagattctgagatcctcgtcaacttggtacttgatctctgaatttccgttctaccctcagtcctcttgggccttggttttagtggaggtaggagctgagagttggagttgatcttcgtttgcttctttgactttgtctttgatggacccccctgtcacagattaggagacaaagcacgatttgcatttgcactcagcctcctgcaaaaatgccatttctcaacattttctttccatctatctcttctttgtcagtttcagcctctcagccacattgataagcacattcaaattctgggccactcctgccaccctgtgagccgtttgtctgtccctctgcacttctgcagcactattgatttgccgtttgcttgcactttaactggatctggattggcgtgtgcctctggaaggttttccatctattgatcagagttaatggtacccatcaccatggtttctaggattgctgtctgggatcagcacagtgttgttgctaaccatttttttgccatgaagctgaggcagtccagggactctgaggcacttagaagtaaacctcagagctctgtttttcttttcagaaatctgtatgtgaggatctttttctgccctttctctgcttgatttcaaaatccatcttcttcttgttcagttgcctgctcctcattctgctgtctgacggatgaaaaaactcatgccttgtctcctgtgtggttgctcagggtctcccttgagccttcagttatgcacatgcgtacacacacacatgtaattgggtctcgctgtgttgctgtatacctagacgggcatttctcttgtggctgctcatattgctatccttcctacatagccacttaggaatccacagacagagcaacctccttaacagaaagcaagcaagcggtgattggcttggagtgtgtatgtaagcatatatgggtctgtgagagaatactaggtgggtaagagggggtgctggtgtggtcagtgaagccactgtcagtacctcacattaaatgttaaatgtaaccccaggaaacaggatacattgacacctttttttaaaaatgcataatctgttgatttggtaaataactctagttggtgtagcagatatgcacagtgtattggtagccaattgcctcaaaacct

SEQ ID NO: 35102 - DNA, 1713 bp, Homo sapiens
ttctttgcctacgttttattggatttgtttttttgcttattgatttaagttattaagcctttgtcggatgcaaagtttgcaaatatttactaccattctgtaggttgtttgtttacagtctcttttattcttgcctccttatctttggcaaatagaaagtgttctgtaatttttaaaaaaggaatggagcttcaatgtgaaatactaggtgctttccctacatggtctcatttaatcacactggtaatcttgcaaaatttcacttcataaatgatgaagctgaggtgctgggaggttgaccagatggctcaaattcatagagcagctagaaagtggtgcagctggaattggaaccaatgagacttttcatgtgattctaatatatatttttatttttagagcattggctttgaagccaggatacctgggtcatagcctctctcactttgattctgtaacttagtgaccttgagcaagactcctgatcattgaacattagtcagtcctgccttgttggagtaaaacaagatgtggggccaaaagaccttggagctactttctagtgctgatgtctctcttccctctttgtttctgggaaaatctgtcctcatcatccatgtgtgcccctcacctccgtctcctttcactgatcgcccttgtgtactcttttctctttgacttctctgattattttgtggcttttcttgctctctttctttccaccttttggttagaggaactaatgccgggacttaatttctcagactttctacttccctttagcttacttggattaccttatctgaaaaatcattgcaaaaatagttgctgttttgtgatgctgctgccgatgttaatgagaatgattaattcctctgctatgaggactgttgggtggatcaccataggaagttgggtaatatgatggagtctttatagtgcaggaggagtgggactgcctgaaggcaggtaaagaactagaaaacatcttaaaatttcttgcttaaaaacaggaaaagctatcatttgtccattcatttgtttggtgggccaagctttgtactgggcgctcaggatacagtggtgacaacaacagttataccttggagctaccaatgcagtctagtttggagagacacagttaatctaagaaacagatattaactcacaactctgataagtggaaccaggtataacagggagaactaacttagatgtagagctgacagaagatctaaatgccaatcacttcatatgtattattttatttaatctttacagtggctctgtaaggaagatggatagaatgacaagagtggacatccttatctcgttcctgatcttaaaggaaaaacattcagtctttcaccattaaataggacgtgggtttttgtagaagccctttattagtttgaggaagttcctttctatccataatttggtgtgcgtgtgtttctgcgtgtgtgtgtgtttaaatcatgaaagggtatgaaagggtattggattttgtcaaatgtggggttttttttgtctgttgagatgaacatatggtcatatgttgaactaaccttttattcttggtgtacattctacttgatcattgtgtatgatcctttttgtatgttgccgaatttgtcttgctagtacttccttgaggatttgaggacaggcattgttaaaggcgaaagcatgtgtagcatattgtcatctttc

SEQ ID NO: 35103 - DNA, 1002 bp, Homo sapiens
cactgggcagcagcccctttcctggtctgcagggatccagtgggaggactatacagtcccccaggctccctgtgatgggtgacctttctcggtcctgtggccctagctctcatgtgatggctgagggaacatgagcccctcaaggcctgtgtgttcctgactgcacagcattcagggcaggagccatcagctgtgcagtgtcaaggagagggggcatggaaactgcccccagctggagggcctgtgaagttgggcaatcacgaatctgggccttacgtcatccctagctctgggtcgctgtcttgttgacagactgtaccgcctcagcagagctcagaaggaaaaatgtaaccacagttaaatctggccacgctatcagatctaagtggttttgtttacctcagcaagctgcaaggttcttcaatagctgtgttgctccccatgggccgtggtggggctgtccccttggggccaaactgcaatgtgctcactgcttgccagctgtgttcttcagtgtattagcacaaactgttgatcaatactaggggaaatccctttgtggtatttagtttttgaaaccctcctcactggggtcaggcctcagctccaaatttcgggaaaaacttgcttttcccgtaactacaggacatccctttcccgcacagatgtcgcagtcttatcttcactcttaatggaatctttgcttgggtagacttttaagttagtctgggctcttaatttctagtatatcccttgggctgttttatgtaatttatgtataataaggaaaggcaagtcccaatgaatcagtgtgtaatgggatggtgtatatgaaggcgctcatgtcatagatgcttaatcaatgaatcagtgttgggtggtcctattttcttgtttcattcttataagcaatgatatctagagattatacctttttaatttttactttttgaaacagagcctcagtccatcacctgggctagagtgccatggcacgatctc

SEQ ID NO: 35104 - DNA, 418 bp, Homo sapiens
aatgggaagatcctgtgttcccccaggactctttagcatgtcttctttgatttactgaattacttgagggatctgtgtttgggctggcagaagaagataagggattccagaaattcttgccgcgttctcctagatagctggctacattctcttcctcttcctcttcctcccccattgataaggcctgggggtaagagagagtccaactcagattgatcctgtagttgacctctttgtgtttgtcactcattcttgatctttctaatgaagaaagttggcccattaattttaattatggtaataatgtcattgaaatcacaccattcatttagcctaggtattaccctactcatgtagaattagataataaatgccaaagtggtgatgtagatcctggcctgtggttggtgctgagcta

SEQ ID NO: 35105 - DNA, 638 bp, Homo sapiens
tttgggaacccctctctctggctgaggaaagtcctccccgtatttaagtacccttcagtgctggctgtgcccttttttgtgttgagacgttttctcaaagggcactgtggtttctactttcctgctggaagttccatgtctgtgcaaaagtttcctgtaacctttcaaggtttgtactctgttccagaggggctcttggatatgaaaatggtctttttttcttaaatgatctcacagatgatcaaaaggagcacataaaagctgtcctggggatttggcaaggttgccagtgttctctttacctttggtctggtatttaggtctgagacagtgtctcgccaacagcccttgctttcctcggggggttggggctgagagacacagaaggggaggcaagaggggcgtattaattcctctaggaagtagaacttcatttttattctaggagagccatttgaaattgggttggcacattcagtcctgaaaaagtgaccttgcaggagctagaattttatatccagcattattttggaggacctggccagcagtatttcccctggatgtattattgcattaaccctatccagtcactcctatgaggtttgtctggactaggattgcttgtgcctcatagtaga

SEQ ID NO: 35106 - DNA, 1700 bp, Homo sapiens
tgtaatctattgattcatacgtttaacatttttgaggccagatgtacagcagagaactccgtatgttgcggggatttcagaagatgtggtgtgcagcacatagtagatgctttgttaatgttgggaaggatgcacacaaatataaaacatgcccttcaggaatgtgcagtctgctccaggctgcagtgaagtagcagggtgaggctggaatgagtaggggccaaagggcaccagttctcaagggagagtcgttgggaagcagaaacaggaaagagatgctggatgagcttcccattgccacatggactgtggaaggcagactataatagaaatcaaagtgctttgaaaaaatgcagtgcagtattctattataaatatttaaataatcataaattttacagattgatataggggttgcttggggggaacagactgcctggcacttggcagatggtcagtaaaacatttattgtgcgaacgaatctagagtagagtagggctggaggccccgctatggtttttgtccctcttctctttttcatgcccattccttctgctggttcaggcagtagcatttcattttccagctgtaactaaatgagaaattacgaggagtggttcgaatagagtttgtcggtggctctccttttcttcgcccattccattgtgaagatgagccagtaaggctctgcatggatattttctggcaagggcatcaaacacgtttctgagggcagagtccatgttgttgagtaataattaactgctaatggcattgtcttgggtgttgcatagtaaataatcaagaaatagtctcttttcaatgagagtttgaaggccaatgcaaagaccacacacgggcaagcctgaaaggtgctgttttgactaaccttaatgggaaacaaagggaaaatctggcttgttttgtgtggccatgcttaattgcatgatggtgtgtttttcccttgaatttcctcatgccccgtggagggcacacgcatgatggtgctctgccgagccaggattatagaacagaggttcttggcagccgggatgtactggctgctatgttgtctagcgtgctggatcttactgggagctttcagatcggagtctctgtgaaatggaacaagtgaactgagcctagtctgttcctaaaaataagtctctaagaagcaagtgaagtgcttttcagtgggaagcctgtggagaaagagcctggaacacagtctggaagtaaggcaattcagggttcctttacccaacccttttcaggctcaggagagaggaagtgacttgtctcgggtcacttaggggctaggcctcgcacctgatctgttgtatttctctgcctgggctcttttccaccaccaggggccaactgtccagaatgtcattttcctgagtgaggaagcagagatgcctggctctagggtgtgcggcagggctacaggactgagagtgtccaactctcttggccctgccgcactatcctcaggttaactggtgttccccgctggcctgctgttcagggctctgtgggagagagctttgcagcacatgcaaaggaggtatgaggagggcagatggctccaccagcctcgcccagagtgtgtcttcatcctacctgccatggggcgagtcatggaggcgtcatgggcccggcctggctgtaggagggccctggtactgcctcctca

SEQ ID NO: 35107 - DNA, 559 bp, Homo sapiens
gctgtttgctgctgccttgttttaacatggaccagggatcctgagccttctccctgaggagattctataccagcatccttgctccagtctcttttgtggtgctggcttctggccagcagaaattctgggaagttctagacgtagtgccagaggcacagtggccttagaaacccttgtaaaatcaccgtctacccacgcgacacctccgctttagacagctaggtgctgatagccactgtgtgtgtaagagccctgaggggtggggcaagctggaacccaaggaacagcaggcatcagaaagagcccaggttagtgtgggaacagcagagctgttcgagctggttctttgctgacttattggtttatttattcattcagccagtcagtttcctcattttagaagtggtaataccaggtactttacagggttgtggtcaaggattgaatgagataatgcaagtaaagttgttaagcaaacaatctggcagggagcaaatgttcattaaatagtagttcctggttggtgtagtgtattcttggttatcatatagctttggga

SEQ ID NO: 35108 - DNA, 746 bp, Homo sapiens
ataccccagcaactctcatccacaacattagctgtgataaccaactgtatttcctgtctgagaccctttccttctccagtaattagcctttgtctagcctttaatccagtggtggttatatggggagctgcctggtcaggaatttttgcattgagggaggagactctcccactgatcctgtgcaggcatttttgctgacagattgttatggctggagttgccaaatacaagaagcagagacctttcaccttcacctgagctgtgtgctttagagaaagaaggatgtgcccacctcctattttctgtcctcactgttgaattcggttgacattcagttgcccaatctgcagtcatatccaactaactggattgtttttaagttctcctctggatgaattatgagctttcttgactttggtcaggctgcctggagtcattcccagcctgggcaggtgctgtgccaacttccctggcatgtgcctgtgcctgcggattttactatttgacccctagctctcccttggaaataccaagcctggaactctggagaaggcgccgccgctcgtgtagttctgaaaggctctctttgtcctgaggaatgcctgttgcaatgaagcttggtaaatagccagctcatttctcctataaattaaaatgaaggaacctcatccgctagaagtaactttacttgtctcgtctcatcttctttattcaagcctatttaatgaatatttatttaagaccta

SEQ ID NO: 35109 - DNA, 1599 bp, Homo sapiens
tcagggaatggcagagctgtgctcttggatgtctcttttatagaaatttttctcttggatgtctcttttatagaaatttttgtcttgtgaagttggcaagatcattgtggcagctcttcttcccaagttgcccagggtctctaacttctgaattcctcccacgtggagccaatgtgtctcttcctctctatgtgtcctgtgccactttgtgtccccatccttcccaactcactccctccttaaaattcttgctgtcctgttctccatgatgtttctaatctaaggtttctatcacaggaggaatgggtgctgccataactcctgagtccattccagaaaccacagatgggttttcacagtgctctgttgcaggaccacagctccacacccaccctcactcccactcccatgtgcagtgccctttgtgtttaatcaaattgagtggggaattgtagccacatagaagaggctgttgcttctggagttctgcaaactataccctgcaatcggctgttgaggcagaaccctactctgattccaacccctcgctggttgttttatgccctgttctgacagttccctgggctgagtttgctcatcacattctcaacctgttcatttagatttgggctacctccttttattgttttaaacctgagcgttccttcagtaaatcctgaatatgtgaagaagaaatgtagtacagagagagagaaatttttcctattaaacattttaaaacttttttttttaacttgccaagtgttatgaggtttagatcctggggacctgattctgaaagcttttcccccatagaagggttcactcagctaacttgaatttgaacttaatcttactcatctccccacaacaaatcatttttctctctgtcatgatttcgttgcactctgtggcaacaggcatgacccttactgggaagctcttatgtaagagcttgcctaagtgaagaagacttccctggcgctggtattggctcttggtagcatgagcctttgttgcctttttccattgccctctccctgatctctgcaccttgcaggtcctcactgttgcgcatacctggaaaggggccatggggagcctcgtcaaggctgacttgtcaaaggctcttgctggtttgtgtttcaggctcttggagcatggtcaacagtgcggaaacatgctgcatggggagatcaaagcttcagtggccagaatgatgcagtcactactctgcttaattaaaaccaggcctgtgtacgtggttttaattaagcagagtagtgactgcatcactagaggccaaggggcagttacaagaaaggtgatggtggttaattcctggcattccgtctcttggtccacatggggccagtgttcaaggagcacttgcctgactcactgatgacatgaatatgtttcatgctcacatacatgcatccatgtgtttagatcatttgctgatacttgtcgcatcagttggataaatcaaagaaatatagaatctgagatctagaaggcacatagacatcatctggtttcattcattggagatgagaaactgaggccagggggatcctccaagagtttgttaggagc

SEQ ID NO: 35110 - DNA, 555 bp, Homo sapiens
cagggccccagaatagcactttgccttttactagagaaggttgcatttgcagaggtaccattaaccacctggataagggctcttacagcacagcatgctttctagcgggagcctgaatcacactgtctatatgaattgaagtctcactcactgttctcccaactcaaaacaaaaactacaaacgtggagtaaagataaaacatcagcgtgttatttggcagctttttgtttgcacaggtacactgtggaatgtataaacaaccccaagggaaagatacaaggcacatggtcatttcttcatggtccattcatgtattcaacaaatatttactgagcacctatttggtgctgggtgatatactaagtattggggatttcacctggagcaattatggccctgcccttgcagagttcacagtctgatggcgggatacagacgtgtcaagggatggtcacagtggagtaggataaatgccatgagtgcacactggaagcagggcagtgtgcagttatgtggggtgtggctgttcaagggctgttggctgaaaggatgag

SEQ ID NO: 35111 - DNA, 554 bp, Homo sapiens
cattttctccccttgcctctttctctcgtaattccttctatctgatccctcaggaaagatgctctgatctaagagtatcccaacaatgcacagcagtgttatttgaaagaaaaacataaataaggaacttttgcagaaccagagggaaggaactgcattctcttttctctgccatatccggtagcacctgaatgcctcctttgtctgattcccagagttcccagggttgagtaacctttcctggagcactgtaggccccacctggcaactttgtgagtgcttattttgcaagatgagttcaaagtttatgttgtctttataaagggtctgaaagatatggaagagactttttggactggggtaatagcaatataatttctacacttgtttctgtttccagactccagagctttcagaactcccatttctacatgtatcaggcttgaaaacttacctatgaaaataatttttgtcccgtcccccccacattgtcctccttccatacctactgtgccagagagcctttcctacagcttcagcatcttattccctat

SEQ ID NO: 35112 - DNA, 783 bp, Homo sapiens
tataagattgcattgtagttatttatctctttcccccatagtttgttagctttagggggcagggaccatgtcttccctcaaatcttatttcatctgtttggaaaagtagaagaccagagggagcaaactgatgtaagtagttacacactaaggtgataatgagaacagctaatagtaatagctaacactgatgtggagtacctgctattgcccaggccttgtttgatgcatgtttacacttaacaaatcctcacaactgtcctattaggtagataccattcttatgattgttcaaaagcagattgagcaacttgcctgaatctcacatcctatcagtggtgaagtcaaggttcgaaccttgtcttacttaaatcccaagcaggttctttccactgctctgttgctgtgtgtgtgactgatctttttggacccctttggataataatcactccataggaaatgcctaattaattaagccagagtctttaactcctaacctgtactctgtcatgggtgtattacatcacagggaaactatgttcctgcccaaacagtagtgctggttactatggaaacacagaagtcagatcgaattaagaaaaggaggcactcagaattatagaaccagaatttaggagacttaaaaagtgatttggcctgatcctctaattgattagatgtggcaacaggataagagaagtccagtgactgtccctaggacccccaggtagttactggcagccagggtgtgaatctaggccctaaacttcatccagtcttctt

SEQ ID NO: 35113 - DNA, 489 bp, Homo sapiens
gtaattgatttgagactattcttcagtttttgaatccttgtgaatcaggatttcaatcagggaagcaggatgactgtgagtgtcctgtaataaggaatttgctataggatttggacctgtacaatttcagtaggagctgggaagtaaaaagtctagaaaggctcagagaacaattattaaccaaccctggtgtgggttatgagtcagaatgtgcaggaagccagccacatccatgtgctagattagaactgcaaaggggacaggtgcagaagtctccggaaggctgttggctcttcatggcaaccacctttgagtttgcagtgaagtttctgatgctgggcctgagctgactgttgttcagcagggctaatagtcatgaaggagagcttgatgccaagctaggtatagagaaaagtgaggacagacttaagcaaaacaactccctggcaccttgacatccattctctcccagaatagctggagctatta

SEQ ID NO: 35114 - DNA, 1714 bp, Homo sapiens
caaccaactcttaagtatttccgggttagacctcagtgggtaagtagtgaatacccaagtccctctgaccgctcttccgacccagcatgaggcttgcctggctgcactagcttcctgcttttaggtggaccagaagttcaagggtgtgaatgagagtatagctaagcctcgaagcgaagctgggatgtagctggcacctgcatggccatgggctgggccgacatagtctcagaactgatctgggcactgtggctgattggcaagtgttaagtaggccaggtctattcacagtttgccaattcccagcctttttcctgaggaaagtgttagtacagttcagtattgctatttaaagatttctcctctacctgctgccacttctgtttgttcaggaacaaggaattggttatttatgcttcgcaatcatgtatgctgtagttagaggaacagtgctaacaaaactccgcatccccaccccaggccctctatttagcatatgtccctgtggcttctcccagtccccagcacgctggcatgcactgcccaagtccctgccatgtgcatgctgagacagcggcgcctgcctctgcttctgtgtccagtgtgtggtggggcaaattgctctggttctctccactgccatttccatgtgcctgctactccctaacttcagcctggccctgccctcacttctgatggaggagctggagtccaggcaagtaagctggagagtgagggcgccaatggtctggtgtggctgggtgggttgagggtgggtttcagagtttgggaaagcagtgtagagctggagggtgcagggctgaacttttgtgtgtcatgatgaggccagagtgcagagctggacatctgagccctggcactcgggacgtggccgtagtgtcacatcactctgtgccacatcactgacttagtatgtaagtacaacattcattgccaaagacaacacagttctgcaaaggagacactaatttgtacctttccagaaagaaatatggtctacttttacaaaaggggcttaattctttgaaagaaaagcatgctaaatacaaaaaaaaaatcccatctggtggggaggaggtggtgctctctgcccctgttgtatgaatggggaaacaaagcacagagggctgtagcagactgcccaaaccaaggtttcacgtaacgctgcctcgtttcagtgcttcaagttcgagcctacatagttataaaatgctgcacctcaaagttaaaagaagtccaggctattttgtctcagtatggcctggtttgggttctcctgcagcacagcctgccacagcttgaggtttgagccttatgcccagtaccacttttgacagctgcagaagcagagggctcattagtgctggctcaggcagtagcagcagtgggtgctcacatattcacaggacttgaaaatacctgaaatagtgtaactgggtttacagaggtaaaactcttatttaatctggtacaaggagcattttctcatggcacttggtgccaatggatctgcgatgggaagcatttgagtcaaaggtcttcttctaggtattgctggtactccaccattgaacttgggtacctgcaaaaaaagctttcaatttttttcctggcttctgtaagaggggacttttccttcaccctcaattctaattctgacttcacaatggggaactgagagttttcttcaatg

SEQ ID NO: 35115 - DNA, 3678 bp, Homo sapiens
cctgtgagcagcccccatcccgaagcttccaggggttccccaaccactaatcatctaataagcatacaaaaaacactcttaccactctggagatctcaagggtttggggagctatatgtcaggaaacagggatgaagaccaaacatgtatttcactgtatcacacctgttctcacccctccccagatcttctctcaattaatatgagacaaaaaaatgagtctgacttcttgaccaaaatatcagttctgtccttagcagctttatggaggacagatttagtttaaattccttaggcattatgcccctgtggctccactcaatcagaaatagggtcaacggcaaggtcagggcctccaatctgggcaagagggaggcagccacggtatccacaagtgtaattctctgagtgctggttgctgggaggggcacaccctgggccagcaagtcacttggccaagggtggccaactgtgaggtagcactgccctttactccctaaaaaaatgtgaatctctttggagcaaactcctcttcagaaatttgagcacttgttttctgagcaagggaatcagctaatgcttttgactccccatccatcttcctgcatcctcgtcccacctctcctgcccccactcacctggctctgtctttacccacaccatggttttggtacaagaacacccttttccccataagctacattggtccaggccataaaaattcattagttccctttcttcaggggccttctgaaatgctccctggagaactctttattcacttctttgcacaagaatcacatatgtgtgaacactggtattggccttctaactcagtttcttcaaaccagggtcctggtctggttgcccctgtctcctcccactgagttttatctccacataagtattgctcaccaagaacagagctgttgacaccactgggcctcaagcatgctgaatgcattgctgccaactgctctgccttaagaaggttggaaactgatgagggtgccacaaattgttcacctcagcccttctgggctggttggaggaggccctctcatgaatcagtcagcaaatgtttgacccctaccaggtggtcctggtaatatgtggtatgaatcatggtcctagatgtctgccatagcaaataaaaaaggaagacagggaaagaagctgtcgcctacagagtggcttgatgacagctgcctcactaatttaaaaagccatgtgtagtgcttcctatttctcactatgtttgggtgagtgggagagggagaaagattatatgggcttcgttgtgacactgttcttagccagtgggtcaatagatgagttttggttttgttttttagaagacaggatgagaagagagtgcccccttccacctccaacatggcatgccatgctaggtgctgaaggagttctctaagcagggatggagcaccgtgcgtgtgtgtgtgtatatgtgcacgtgtgtgtgtacgtgtgtgtgtgtggcaggtctagagggtcgatggctctttcctgcctcttgcccttggtatgggtaccttagtgatgcatcatggccctcccttaggacacacagcttcgcagtgccagtgaacccactccttttggctcctcctctggaatgataagcccagatgcccatgctgcccgtgaagggcttcttcttgaactgaatgtggagggcatctctggtcccggccatctgccagtgactctcatgtgcattcatgtccctctcttctctctgtcctgtcttctctgccgctgcctcttctctgcaggtacacttgctgaaggaccagttggctgctgaggctgcggcgcggctggaggcccaggctcgcgtgcatcagcttttgctgcagaacaaggacatgctccagcacatctccctgctggtcaagcaggtgcaagagctggaactgaagctgtcaggacagaacgccagtaagccagtgccctgcccagccctgcttcctctgtgaaggctctggaaagagtgtcactttccttaagtttttggtggtgctttcttggacccctgacctacccctatattccagcagaaaacataggcagctttgttttcccattagtatacttaatgaattacagaatcacatgcccaaaggagatctcgggtgccttctaatccaggcccagggctggactttgaatgtccccggagtcactgctatgtgctcatccagtctctatttgataggggctcaggtactctgtgttctagggcagcccatttctttctcagagagcttttgcaatcaacaaacagtatacttggcacctattgggtgtcatggtctctgtgagctctgtgggagacagcagattgtttcttagtttactactctgcactatgtatttcaagactctgtcacacagaaaaagctgggagcagtatatctgttcagtggataaggcagtggaatctggctgcactgctctgctgggcaatagcagaggttgcctggcccctgcttgagaagctgtctctacactcagtacccctgggctgggctgggcagctgtagatcgcaacacattttcacgccttcctcttgagcctttccgtgggttgtttgcatgctcagagtgtgtgtgggctgtggaccagcaaatagccattgatcacatattgtgccagaaactgtgatagaattttttgcctgtgagctcatttaatccctgtagttctgctgcagaaaaatgggatgccattttacagatgaggtaacagactcagggaggttaagtaactagctcaaggttataggcctagcaaggagcagagccaagattcaaacctagatctgattgcaaaattttgttccaactataccagtggttcccccaaaccatcccatgagctcttttaaaaatgcgtctttcctactgagatcctacatcgttctgtctagggctggtctgggagcctgtatttttaaagtagcccagaggtgtggattggaaaccagtgcccttcaccactctggaagcctctctggattttccagattgttcattgaaactctgctctatcctaattaatgcttatttacatgattgtactaaaggttaccacaggcttctaacatggttctctcaattggtacctttttcctaccactaaccctattcagagccttcagtggctaccagaaccatcatatggttcttatgtccccgcctttaccacgtcccaaagctcctcccctccagcgaggtgtgtctggagctatgtgggggcgggaggaagggtgaagtgttaagagacccaaagcccggagaggtgctgctaagctggtctgggaagggctttggcagggcacgggcgggcagaaggcgggcatcccaaatcaacaaccttgcctaacgctgcccctctgctacctcttgtctcccctgcagtgggctcccaggacagcttgctggagatcaccttccgctccggagccctgcccgtgctctgtgaccccacgacccctaagccagaggacctgcattcgccgccgctgggcgcgggcttggctgactttgcccaccctgcgggcagccccttaggtaggcgcgactgcttggtgaagctggagtgctttcgctttcttccgcccgaggacaccccgcccccagcgcagggcgagg

SEQ ID NO: 35116 - DNA, 4668 bp, Homo sapiens
tgagattgggaaactcgtctacacccatttttgccgactctgccaatcccaggttttttcaaactccaaatatcattagaatatgtgggtagtagcagccagttggtttttttggttttgggtttcagggctttttgtttttcaggtgtttttaaggcagggtctcactctgtcgcccaggctggagtgcatgatcatggctcactgcagccctgacctccctgggctccatgatcctcccacttcagcctcctgagtagcaggactacaggtgtgtgccaccacacccagctaatttttctattttttgtagagacgggtttcgccatgttgtccgggctggtttcaaactcttgagctcaagcaattctcccaccttggcctcccaaagtgctgggattgcaggcatgagccaccacacctggccagcatcaagttctgagtgcttgaaaaattactacatcatagatatttgccaatataactgtgtaattgtataaacaagattattcagctcatgccagtaatcccagcactttgggaggccgaggcaggtggatcgcttgtgctcaggagtttgaatcaacctgggcaacatggggaaagaccgttactaaaaaaaaaaaaacataaaaattagccacgcatggtggtgagtggctgtggtccaagctacttgggaggctgaggtgggaggatggcttcagcctgggaggcggaggttgcagtgagccgagatcatgccactgcacgctccagccttgatgatagagcgagaccctgtctcaaggaaaagaaaaaaaaaaagattatactatttcacggacttcatgactaaatgcctgaaatatgtagttggtagaagtctgaataggcccattccagaaatgttcatactggggacaaaactggctcctcctcatacctacctcggcggggatcatggtatcactatgacacagctcagcacagaagtcctgattcatgggaatgtaggcttccctgcaaggagtacaaatgaaagggcagaggagcctggtaaaggagggagtgtttgaggaatgaggagctgtgggatcacacagaacagactttagaaaagccaggtcactttggctggaacttttagccattttgcaggcagaggatgtgttaggcctgatggcttcgtcaggcccaggctagagagaaagttgaaaaggttagatcaactgggttcacatgctctctgttcttttctggctaagtgaactgaactgagttttgtattctcatctcgaaaatggggatagtataaaccacacaaagctactatggaaagtaaatgagattgtattttaaaagcacccagtagagagtgcctggcagtgacccagggtacagaacaatttcccttttagggagcttccttctgcctgcacctgtgctgctcagtacagtgctgggtgctctttcctgctctgctaaaacttagctctgtactgagaaaattcctggggttacattgatacaacattaaatgtggaatgtgaaaaacgccctgtctttagggagaagacactaaccacgagcacctggcaggcgggatgggcacgtgccatggcacctgggctcagtccctggcctgcttgttttccttctcgtgatatgttctatgcctgttgtacagatgccatagagaagggagcatggggttggcaaaggacagagacaacagtagctcggagtgaggattaaaaagattgcccagagccactcatctgccctttcagggcacagggtcctgggagtgatgtcagggctgcctggagacctctgcacactggactggataggttgtgaccttgtcctggatcccagcccagctggagcctggcagtcaattggactttgggatgcaggctgggtggggttggggacagaatggggtgagaagcatggctcgagggcacagggccgcagtggtctcacagcacatgatgcgatggggatcgagcccagcctccctcccactctgtggggaacgaccacaaatgaggttttagcagcacactgataagcagagcagctctgctaagccacagataagactctggaggaaaagcctttgggaggtgagggaggaccctccacaccacctgctggccaagccctgagggaggcaaagaccagggcgggggtttgtgccagggtccctgcaaggcagtgcccactgcagtggaggggctactgagtcatcagggtgataaagcaagaggtaaatgaggcctgaaaggatgaccagcaagcatttggtgctttttaaaaaccacattacagtcaagatagatgtctctgctgcatccctgatgcttatccatctttctgggtcagatggaccaggaggttcactcagaaatggaggcagagtcagggctgcccactggacacattacttggtaacaggaagcaataggttcccatgtttacctgcctattttcacctggctcaaagcagccaagaaaagacgtctcctgggtcaaaactgattctattctgccccagcactggatggctgttctaagtgaatgatggtagtgcctgagagctcagtcccgggtgagctcagccccatctgcctcttacctgccttatactcagaggcatattttcctccacattcccccctcagaagatctaccgtcaaagaagcctttaaaactgcagagattcttccccatgcaaataggaaagggcatccagccccttcttcccagggtggggcaaggactgaccacatagggaccaagcagaggccagaatcctagagcagtgcttctcacagctgagctgcatcagagtcacctggagggctggttaggacatagaccgccagccccagacccatagtttctgattcagtaggtctgaggagggcctgagagttcccaggggttgctggtactgccagctgggcacctttgagaacctctatcttagatgattttcccaaacttcaagtattgtctttatttttaaaagagagaaaggggagggtgtgtgcctggtgttgctaggcaaccattagccaaaggtgatgagagccgggttctgggaaggacagcaggctgtgcggggtgacctcagactggacagaaggctgtgactaactttattggcatctctctagagacataagtaggcttcaccgccaatttgcctaaggtgttcagcaggactattgaaggcctggcagctgccggaggagagcctgtctcccagccgggccttctgctccttgctccagagggctttgagcttgcggtagtacaccttgcagctgaagccctccctgaagcccctcttgatgtggctcttgaggaagtccagggtggggtacatgcggcagcaggccacgcacttgtagccattctgctgtgctgggtgccacctggaagccattaggatgtcctgggatgtgatggagtccaggccatgcctggatttcttggtggcttctcgagggcaagtgttctctggggaggaagaggacgaacagatgttctcagccatgtcctcagaaaggcagttgtcccacttgccctcatcctgctgcacctctgggaagtcataggcctccagctggctctctttgtctgcacacacgaagtagctgtagggggagaaccagggccggtagatagtgcagttccgcctcagcttctctccgtgctgggtatcccccaagctgcagtctgcaaaggaaaggaccaggtctgagtctctggcagggagcagtggagccaaggatgctggagcagaaaggtaagaaggcaaacatcaggcatgacctcggttacctccaccccaccacgattgcagttctgagagcagacgcaagacagtggtaagagcagccgagggcattccttctcactgcattctttttctaggggtacaaagggccgttggatcttggggcaggagaggctgcttttagttggtaagccttggtatttgtcgaggccttcccctcctggagacaccatgtccactgactcctctaaggatagacacagacaggtgacccagcggatagccaaaccggcggcctcccacagtccctcttttcgccacccatggctgtgacccttttttcagcctcactgctcatcttgatccctccacggcccactcagccagaaactgctcttgcacaccagtttcagagacaggagaggggaggcaaggcgagagccccaggcctgtgggtgtctaccaaaggaagaagggccagataggaggctgcaggtgacaagaccgcgcatgggggtccagcttccagacacctctgcttccttagggaagcagccccttttcatccttagcctctcacacattcccgcccagagtcagagaagtcctcacctggtgagagcgctgtgttctgtatcccttgcctgacaatgatgctttggtactggggtggcagggcctgagctgggctggatgcctcagtgggtactgctgtctttgcaatgtctgggttatagaagaaacactggtgagctgagcaaggttgggattccactttctgggactcccccaggcatacctaggggctcaacctctgtacttcaaggcatctcaacgctgaaacagaacagtgacctctcaaactcagccag

SEQ ID NO: 35117 - DNA, 2733 bp, Homo sapiens
atacctaggtagttggcctagaaaggatagcaccactgaaaccacaagaaaggttttcactggcccgggatacagcagtgcagggcagaaagaactgctttacacaaaaattcagcagaagaaaaagtacaccctaaccccagttactcttagaagaggctcagtgaaaatagacacttagcagaggtgttcacaaggaaaggagcctagtcatcaaatgatcgagcgatctcctttcctcagactgacaacatatctggggtagttggtgtagacagaaaccttgacccagattccaaggcctcagagtgggtctggctgcctgatgactgagctggatttccagatagggagaggatggccaagtgtgagtgtgtggacagcatggcttagagcctggagctccagtcatttcaataacaaacctttaagctaccaccttggccaccacaattttctatctacaaaatgggttttggcgattcaagatctgtattgagcacagctaggtaccaaacccaggctaggtgttgaaaatacaaagatgaatgaggcatgctctctgccttgcaaatctttacaacctaatgggtttatacccagctctttgagttaatttttcaagccaaagaggatccctacaagaaggaccatgtaccaggcatatataggcagctgttccatgatctatagcagggcaaagttgtggacagagccctgagctgtgggttagaaggcctgagttctagctccagccctgctagtatttagctgtgtgacctcaggcacggcactgcattacgcggagtcctgcaggcttcatctgtaggtagatatccttccatgtaccacctccctaggtggttgtaaggattaagtaagctgatgttcattgggatcctcgtgcttcactggcaccgagttcctatccatttggtacgaactgattctgaaccaccacttagcacctctgcaagagctggcccactcgctcaaggcccacctctgtagacctgaggagctgctgccccattttttgtggagaatatgtgctatactcatggccttcagtggggagcttctaacaccaagcctcatccatgccatccctccaccagcttccaacccactgagagctcagcacgtgcttacggtgatgtaaaaatgtcatgtttcattgcttcatcctcattttttctttactccaaagggcgtggtgactccaaggtaaaggggccaagcccatgagtcaaggaggcaggtttacaggaacaactttatttttttatggctagcattagtcactgattaacttgggtggggcagagctagaatttctagttcctgtcccatcaagaaaactacactggaaagttcaagagtgtctttgctggctctttcttgaatatttccaaagccttggaagttacaggttttgggtgtgggataaggaaaaactgaatgatagagcacaggtaccgctcccctttcctcatcatgcctctctgtcgcctctttgttcatagttgaccacggcatgtttgagaatttgaacacagccctcactccaaagctccaggccagccgctccttcccccacttgtccaagcccgtggcccccggctctgcccctctgggctctggtgagcctggggggccaggactctgggtgggcagcagccagcacctcaagaacctgggcaaagccatgggggccaaagtgaatgacttcctgaggagaaaggagccctccagcctgggcagtgtgggtgtgacagagatcaacaagactgcaggagcacagctggccagtgggactgacgcggctccagaggcttggctagaggatgaaaggtgagcccctcacccgcccaacatccatgcccctctgtggacccacttgaaaaggtacagggacaaactgcagtgtctgcacaggagaacagccccaagggaggggtgtgagattgtcctgtactgaaaagctgcaggatcaggccacgttctcgggagctggcttcaccttctgcagccacagctgaaggttgctgagtgcccaccatgtcctcggctctgtgctgctgaaggttgctgagtgcacaccatgtcctcagctctgtgctgcaggctatagttgcatcattttgtctaaccctcccagcagccctgggaggtagatgatatttccatcctgcagataactcacgttcagacagacaaagtaaatagcttgaggtcacaaagatagtacttggcagagctggatttgaacccagctattgcccagaaggtccccaggtagattctgatgcccggccatagctgagaagcgctgccgtagactgttgcttgtggagaagcctgcacctgtcacagcccactagggcacagtgggagaagccccctgtagcagccctcctgttcttccccctcctaccaacaggctctttccaggccttgttttaaacacctgtgcatctgaggtgggaatgccctcacattccctgttttaaacacaggacttactgcctgggttctgatttgacaagcttcaccagcggtctctatcctgtcttctagaggccagcactttgtgctgctctgaacactgagtaagcatggaccaggccaaaagctactgttatgctgaaattgctaaggcctatgtgccaaaccaagaaccagagcccaaggagtagagcagttattgggtggggtgggttgaaagtgcag

SEQ ID NO: 35118 - DNA, 2351 bp, Homo sapiens
ctcccattgaatggcttcggtatcttgctgcagtcgttcaggtgtgaaacgtgcttttaacatgcctttcccgctattatgtgaagtcgttatttttgtctaagatcaagtataaacagttctagtgtaaaaaaatttttaagggaattttaagtgtgaaaacggaagtgcagatgtcatgttttttaatgctgtgctctacgctgagtcactgttctagaatctgggggacaaagatgcatttattcagacaatatatccaagccccttcctgccatgcactaagtgctatctaggggactgtggtgacgttggtggaaaagtgacacgcggtcctctttctccattctgaatggatgggagtgccatcatacctgccctcccgggcgctatgctaacagggtatgtgatcaggatgtgaaatgcagtggaagcaccaaagtggggctcagggtgaggcagttaatttcagccgagagagtgctcatttcctctggactaaatctgccattagtagttgctgaaggaaacacactcaggggccatcaggagacccacctcattccttaggtctgtgcctatgctggcagggaccccagttggtattcagaatttttatgaaattagccgacccggaaatgtactcagatgctaccctaatctcagaaaattcctgctgggtcagtttaatctgctctcacatttcacaatgcctttgaggtcagtgaatcctgggagtgttctagaactctctgtgcttggactccctgtcctcctctctctgctgccctccccacactgcggagtttcccaggccaatctagctgtggtggcaaactcagtgatggtttgtctgagactttggccctcagagtgccccgggcttcagtcgctcagttcgccgccctgctttgggacattcagcctggagcctcccactgtggcctctctgttagtgggaacaagtaattaagtccatatagcccttgtagagagactcctacctcccccttggaaagcttcaccagtgcagatggcatttaatacctttcgtctctcccaaggaaatctactctggaagctttaagttgtccagtgaaagcatcttcaagtacatctcccctccaggacgccccctccctgctactgtttgcactgggggcacaggaggaaagcccagagtccccaccactgacttcctcctaatgagaaaattcctccactttctgtatctagggaccagctctcctgagacacaaatcctctttgtgtccagcttatctccagctgctgccatgataaatagtccagcccaagggagcctggggaagctaccccacaaaacgaatcacttggctattaacaacacagacgaggaagcaagcttgaggaaatatttaaggaccacctcagactccagactgtattctccttcgtgcaagttgcctgaggagtctgttggttatatagagcagggaacattgccagtgtgttctttggaattgaccaaaacaaaacaaaaaaacccaaacaaaaagcaaccttccgacaaaccgcaacattttttttttactgtttaaccagccagctgtttccagtgccatctgcttagctacctatttcctgaatcatcgctccatgtctgccgccacctgctttctaggcttgcgtttattgggaaattcttgttggcttggtctgatgttcaagcacatcccagtgttcagcccacttcgggggctcactcacagcaacttagaacaattccctgtggttgtcacaggagtgctttgggttggtccaggccttcatggggcaagccaaaggggcaggagaaaagtgaactgtctgccctgggaacggtttgcagcttcagcaagatgcatgccccccactttatcctgagcctgcaatggatggatcccccttgctggataggaaagctcaagacaagcggggactgcccctgttgttttgccttcccataatctcctggtacttggtaaattctgttgcagccagcctcccttgttcagcttaaatcctgggtcctatgtgtcaggaagtctttgcagctgacctggcaagtagtctttagacctggccaatgtgtgacatttctaggaactgggcctcccggagaggctgtgtaagccatctaggaagcgatttcacgtgtaagaaagctagagggggaggtgggggtggcagtcttgtccatgcctctccctaccccacccccttaatcatcagtcatcgactgtgtaggtggcacatgctgtgacctggccaggaggcttgctaagacgcatgtgggggaggtgtcaggtgggttctccgcactctggatt

SEQ ID NO: 35119 - DNA, 1268 bp, Homo sapiens
ttagaattgtattttcggtttacatctaaaagaagaacaaaggtctaggcttccagaatcatgggttctggtgaccgtggacctggaggtgatggtaaactctctttttgttcctggggtgttttccttgggatcctttctatgagaaatgtaggccgggttttatttttcgggttcctagtggtgaggtaaggtgaggtgcctcaacaagaaaaaggaccagttttggcttcaggtctatgtgaaagcggttaacactgggcctggaatggtagatactcaataattaaggttacttcttattctcggttcttttttccaaacctagcgcgtctaatctcttctaggccccgccccttctgagccccccctccttcggcctgtatgataggctcttcctccatttccggcttctgggactcgggtgcaccacggcttccggtgtcatggctgcttgaagtcccgggagtcggtgaggcggctgcaggtccctccctgcggagccgctggtccggctggcggagatgtgaccgcgggcccggccggcctgcctcaggcgtcgcgtcagctcccgtgtccgtgcccttaacccacaccgatggcgggatccggctgcgcctggggcgcggagccgccgcgttttctggaggccttcgggcggctgtggcaggtacagagccgtctgggtagcggctcctccgcctcggtgtatcgggttcgctgctgcggcaaccctggctcgccccccggcgccctcaagcagttcttgccgccaggaaccaccggggctgcggcctctgccgccgagtatggtttccgcaaagagagggcggcgctggaacagttgcagggtcacagaaacatcggtaattgccgctgtctcctttctcttcttgcccaggtcacagtccgagcacactcttcctctcgctgtctggcgttccatcttcctccccttctgcgggagaagcgggtttagccctctttatcaccccatccaggcccctttcccctttcactttattactgtctgcggtatagtggagttggtggtctgctttgccaggtgtcacatagatgctcagtaaattgtcttgcttcgagtctcatcggagaatgccgcattcattagcatacagaaatatcttttctagtgagaggaggcatgtctttgctagattgtcgtgtcttgtgtggaaatttttgaatctttgcataccagtagaaaatgggaactacgtctgggccttgtgacatcaatgctagta

SEQ ID NO: 35120 - DNA, 2582 bp, Homo sapiens
cctgaatgtaaatctaccagcattacttaccaagtttaagtttttctgttgttacttgaggcagtgggtgattatgcaattggtaaagggaatgaaaaggcctttgcacccaagaaagtagaagaaaggcgcctgaatctctttatgataggtggtatgttaaatctaggtattttcgtatttcaacatattccacttcttgcaaaagctgcaaaatgcaacacaactttaaatgtaaacatagcttccaagggcacagtgctgaacatataataacctgtgtgtgcacacccacactaggttatgtaacaggactgtaaacactggtcctggaatggcctgggaggtcatctaggtcctccaccatctttctgcagagtactgaggcctagcgacgttaagtctgcaaactcacaaagatgaccccgggcttatactaccttaggttacctactacctttgcttgcatttcctctctcctttcctgtctgtttgtgcaaaagaaaaaaggcctggcttcgccttcttgggagccaaaacacaaccaaacagagagcgagtttggagcccggccaggcatcttgtgaactgcacacaaaataactagcccaaggtcagagagcgcgccaggcccgccctgaaagtttctccgcaggaaaatccaccgccctttcccaaccacccgcgtgggtggctcggaaatccgccaccctggggacacagctccctgcccatctctgtggcccgcttgtgccccgtgccgctgggccgactaagagcctcgggctcgcacctcccagtacaacctagggacgtcaggggtcctgggacccacgagccgctctctgccggccggctcctggcccctcctagcagacccaaccgacatccttcaccctcagttagtgcgcaggagggaccgggacgccagccgactgcgctccagaactattcccattgggccagagaatgagtgacgcactaggccccgccccggcccggtgggttactcctttcatgcccggcccccatccctagccccgccccggcgccccgggccgcggccgcctccgcgtccgcgtcgtcgtctgtgctcccggcgctgacgtgtctgggcggtcggcttccactccttcaggcgtcggcagccactagtcgtggcgagaggggcggggtggccggggctggcgctccacttggcccccgctcccggcccgccccgccgccgcggccccccggatgagggtatatattcggagcgagcgcgggacgccgatgagtggccgcgcggaaggagctggagacggtcgtagctgcggtcgcgccgagaaaggtgaggggctcccagcccagcgaggagacggcggggctcgggacccgggcgggcggagggcctggccccaccgcacacacggccacgcgctcagacgtggacacgcgtcgcacgaacgtgcacagcgcgggcagccgagcacacgccgaggagcctcccgctcgcccgcagacacacaccccagcccgtgcgccccgcagtcgcaccccatcctccgccaccccgcgagagggtgtgtgggctgggcagccgggtggatggcggggccagggatggaatgagcgcgccccagatggactgggggcgttgtgggaggaggtctgggccagtgtctgagtccgagggggtcgtgtaggcgtgtggggttgggagtggggcctctcccgggtgggcagtagagacctcgaggctctcaggctagggccttgtggacagttataccaagtgtgggggcctgtagtgggacaggagatcgttggcactgtcaggtggaagcgagttggtgtgtcttgaatatatgaggaaaagatttgagaggtctgacaaagacaggggatacatttggaggacaggacagtgggacaaaacctgtttgcttgccacttttttctttcttttttttggtttggtttgccatgatactggtagtgagagagaattgaaatttctgggtttcccctctcttggccaagcagaaggatggtattggagggctgagcacacgtatgctgaacatatggctgcttgaactttggcctgtcgctgtgctacacttacttctacatggtttatgaaatctgaaatcaggtaataggattatgatcatatgtgtgtgtcatttggtattgcaaaagtttaaggacttttaggtgaaattcactgggtgtggatccaagagttcgccggaaactcaaggcagttgtctattccttcacggttagtcagttggctcacttagctggagcaaagaaagacttcataggctgtgctgccaagcatttataggattcagttggtggttatgtctcaactctgatactgtttttcaaaagctttaagaggtttacttattcatttcgagggcatacgtataccagcagagataggggctgggtgggggaagccagaaaaggagggagaaatactggatttctttaatactggtatttaaattctaataaaaatatatttgataatggtagattattaccaaatttttcatatattttgatgcagatggattaggctg

SEQ ID NO: 35121 - DNA, 921 bp, Homo sapiens
ggcttgagccaaatcttggaggatgagtatggtttttatgggaccatagttgagaatgacttggaataatccaaagagtgtgactgatctggtttgagtggagagtctcaggataagtaaggtgaagtaggatagagagtgctttgaatgctagagaaaggttgacctgtagctaaactcagaagccctctgatttttattgactccagcaaagtttgagactacgtacttggggaaagcacagaaagagctatggtttgacaagagactaatatttttgtgccctgtgtcttattggtaagattcttgaagtggcaaataacaaagaggtctaatgactgcaaactcattgactatttattgacttttgtgttagataacttagaaattcagaattgctgtaaatgttaggttgtgacctagatgaaacaaatagggactttgaccttgccttcgcttgagtgcattctgccttagctctttaaaaagggacttttggtaacagagaagtactttgaaacatattgaataaattagctcagctaatctaggacatttgggttgtacagaaaaaacatgtactgggaaataatttaactgtctgatagaactttctgcagtgaaggaaatgttgcatatctttgttgtccagttttgtagtcattggccattcatggcttctgaacactcgaagtgtgattattatgactgagaaactgaattttaaattttaaattagttttaaaaattttaattaaatttaagtagccctgtgcagctattggcttctgtattggatagtacagctttagaatgtttgtcaacattaatagtaccaaggtagtggtgaagattaaaatgcaatatgaaggcttcagagcacctagcattgggcttggcatatagtatatacctagtaag

SEQ ID NO: 35122 - DNA, 768 bp, Homo sapiens
gctatgctgctacccaccacaccttctaatcccaacaacattctgaaaaatgctatacataccaaccatggcttttgaaagagtaaaggtataaaatagttgggtttataatttttaagctatcagaattgaggagcaatggaaaataactatgaatgaagagagagcaaatatttttagtgaatttcacaattagcagtttgggaaaagggcccattggtatgagacggctcagcctgtggtatccgaggaggaagggtcaaaagcacaaagagagagagtgccagatggtgatcagggccagatggctgtcgccagggtcatgctcaagctagtgcgaattaagaagaatcacaataagcttatgcaacaccagcccaaagccaattattgttcttggacttagggtatatttcctctttatttataggaaagtgtatgtttgtatgtgtgtgtttgtatatgggggggttgtgtttgcaggggatggcaaagagcagttctgggaataatgaatcaacatttgaaagtagagttgggctatacttaggtgagtgtaattgtttcagtggaaaagtttttctcacattctttcccttccctttattatattctcgtaacatactgaagggcagtgcatttggcaggctgaatttggcactgctcagacagcctcagtagagcaaagggcctgaggacactaaattctatccggtcccatttacagagctgttgggcaatgaaatggtgctcttgataacttgcttc

SEQ ID NO: 35123 - DNA, 1102 bp, Homo sapiens
agacagatctttcaacgtgaagcagcagtgaagaacatggctctggagtcaaactggctgagctaaagagttgactttgttacctactagttacctattggtagttacctactagttatctactagttacctacctctgttacctactagtgtgaccttgggcaggttaagtaactttttgaacttagtttactgatacataaattagtgataataataattcctgtctcataaagttaccgtgaagattaagtgaggcaatgtatgtggagtgttaaaacagtgcatgacgcagagtaaacacgttaaaatgagctgttattaatatttggttgctaaaggtctgtcctacctgatgtgtctatctctttcaaatacatcctctgggatttagcactagaaacagtcttgcagaaagttagagcagggaggaaccctcaagatcatctaatccaaagtcctcttttgtaaatgaggaatcactggcccaaggtcacggagtaagtcactgagtaatccctctggtctgttgcccagaatgcattccttcccacaaatctggccatgcttgtcctggagggcagatagactagccttccccaggtaaccttgtatcttcccgtaaaaccgtctgtcctcacaaagtggcacaatttctaaggctccctcgggcaacaaagtaggttgtgttcagagaccagtgaggtggagaaactgcccagccactgaactccaggctggacttggtgagtggcactcagtggagtcagagtcctggagacctgcacatcagggagagggtcctgaagaggtcttgaaataatttgacatggaaagagaaaatacaaattttcagagacacagataagcatcatatttttaagccaagaactcagttatatttttgacagtgtggtgtctacagtactaaggcatgttcttacaagagtgacactcactagctcttttttttttttaactttcattttagtttcagtggtatctgtgcaggtttgtcatatagtaatggggatttggtgtacaggtaattttgtcacctgggtaataagcacagtacccaataggttttttttttctgatt

SEQ ID NO: 35124 - DNA, 1703 bp, Homo sapiens
ttttgtgaggaagcatggtagaatgaagagaacgctgtctggagccaaaagatccagattgaaaccagactttaagcctgggctctgcttccccttttgctggatgaccttgagacagtgtcttaaccttcctggatctgttttttagcttttataaaatagatcactggcatatcagcttgttaacgtgcactgtactcagccttgacacacgggagaaaggttttcagggacagggtgaagatttcatctatatgacctttgactgcagtttggttggttgggttacacaatctacaattgtagattgattgagagtcttttgaaatatgtttttctttatgctagttacccaggtcctctcctctctggtgacagtggtaatttaccagggcattgtgtcctcttttcattaattaggccactcaggcctacccgaatcccaagagaccatttatggatgatgaaggtggtaagatagggttgtagtatgttggacctgctgtcacaaactaccatatgcagggtgacttataattaagagaaatttatttttcacaattctggaggctgggaaatcctagatcaaagtgccagcagatttggtgtctggttaggcctgcttgctggttcagagataactgttttcttgctgtgttgtcacatggcagaagggggaagagaactctctggggtccttagtataagggtactagtcttatccacaagagctctgtcctcatgatctaatcaccccacaaaggcttcaactccaaatgccatgactttgggggtcagatttaaacataggaattttaaggggacacaaacattcagtttatagcagagagtgtatgttcacagcacaggaaggttcacagcagaagggagccattaattgtgtatagactttcatgtctctgctctgattcattgtataatctgcttcattcaaaggaagaaggtaaattttgggtccctcttggaacatttaggtgactcccaccaaatacaggatagctttgagttataacctcatgaagtccctggtcatgtctgtgtgtttgctttggaccagacccaagggcctgtcctgtgtcctgcccgggctcctcccacctctttcctggagaaacccacagtgagagtggagggtgggggtccatgtttatcttggtgggcctcactggagctggacactgctgctctgtttgcccaggcttaagtatgcatctccttttttaactggccagggactttcccccagtcacttggcctgccattgatttgggacttttctgcctaaaacttctaggatgataaggagagcactattacccactgcctgcccaaacctagtagcaacagcagctagtcatgaccagcattcatggctgcaagtactgtcaggccaggggcctgaccagtgaactggaactttacttctctcccaagtgggattagagttcactgagtaggtggccctattaaaatatgtatagcctgtgctaaagttaattctaggggtgagaatgaggcagctctgcttgctggctagcccaggctggcaaagaataatgggtgcaagcaagaataccagagccagattgggttcaaattccaattctattgcttcctaggtatactgacttaggcaagtacttctatttctctgtgtctcagtttcttcacttgtgaaattt

SEQ ID NO: 35125 - DNA, 1731 bp, Homo sapiens
ctgctctggcctctctgctgcctgccactgtcttcatgtccagcctcgctgtgtttctataaaggtggagttgtacctctctgatttcccctaaaggtggcctggatgtggtagaagaaagaggaggcaaggcattacctgcacctggaatactgatgagtggtttgctctttcttgtatgcccagtggcctggtcttaagcctaggaataaatgtagtcaccatggccataaaacggccccactgctgggcttgctttccctggcctctgtgagttccatgctcattatatggactccccatagcaacgttgagagcttgcttatcatttccagaagtgaccatggcagattaggaatatatgtttattttgaagtgggtttttttctttttaaattttacacattgttggatgaacataacatcaagggctgctttcccaactgtcttaggaaaagagctctaatgttggagccagtagccctgcgtgttctcatcccagttttgattataactgactataatactgtaatgacactctgacctgtgttcttttatgactgagatttccggtggggatggaggaggtgtctgatgtacagaaccagggggatgctgcctgagccaggttggggacggagagaagaggctgaatttcaagacactgacatcatcagtactggccctagtgcagttacatacctggtcctgcaacaaataatgagtatttagggcacatatgccaagcattaatggggtcacgaggtggatcgttcttttgggtgcccttttatatgccgctgcaatcagagaagcaggacaccatgtaggtgagcatctgctgttttcacagctatttgaagctgcaacccagtgtactaaaagtttccaggctgactcagtccaaaggtgactgttttggaaactttgaatgagattggttcggcaacttcagtgttatgtaagtaaaaggatgagagcagttgaaagagccactgctctggacatgttctaagtggcttctaccaatgggaatacgtgagcgtgcattaagaatgtagcaagtgagactgacatgtctccagtacaagcacagcacgtacaaggacacaacttcatgtttggttcaatgtgagacttctctgtggctcctttctcttcatttgcacagatatctgtaccacccagtataagtggtatactaatcgtagctagcctgtgctgcatgcctgctattttctgggtaattcccatgtgttttacacaggttaactctacttcctctcatggaaactacttgttgtcgaaataatggttatattttaccaatatggcaactgaggcacagagatgttaagtgtttcagcccaggtaaataagtggttcaatcaggatttgaactcaagcagcacctaccttggagcctaagctcttaaccacagcacttcactgaacctataaaatacatgtttattggttttaagctctgctagttgaagaacatttatacatgtctctattaaaaattcacttgtgtgtgggttatgaattcacccataaagaagactgccatgacgcacggaggagggatgtctgtggagcttcaggagacgtgataatccacaaactgtcctgggttgaacttagctattattctgccaggaaactgtctggagaaggtccaggaaagtaccaagaagtaaagaagtacctgagagtgctcagctccca

SEQ ID NO: 35126 - DNA, 907 bp, Homo sapiens
gttgctgtcttccttcactcaggtctctgctccgagtcaccttatctaagaagcctaccttgatttctttatataaaagaatgcctattccttttgcatactttttcttcacagcacttgccatcttctctcacattatatatttatttgctttattggctgtttccccacatgagaatgtaaactcagtgacaaaaggcactttgttttgtttaccactgtattcccgcaaggccaatgaattgcttaacgaattatttaataaatataggaattaaaataaaccatgggtttggaaagcaataagcaaatggggttggagataggactggactctgaacacagcgttggtttcagaagagagagaagacactagagaacagctctctgactaagctacatgcctctgtggcagcctggaatcttgggacacacggcttgcaccaggccactcttttggttaaagcaaaggttaaagtctggtgtattgggacaaactttggatagagatacagaatgtgatctacgtcaatccctactacttaatagctgtgggccttctgccagtttcctcatacaggatgagtatcccttatctaaaatgcttgggaccagaagtgtttcagatttcagaattcttggactttggaatataatataatataatataatataacataacataatacaatacaatacaatataatataatataatataatataatataatatagtataatgtaatgtaatgtaatataatataatataatataatataatataatataatataatataatataatataaatttacccaggtgagcatcccaaatccacaaatccaaaatccgaaatgctctaatgagcatttcctttgaacgtcatgctggtgttcaaaaagcat

SEQ ID NO: 35127 - DNA, 1608 bp, Homo sapiens
caaagcagcggaatttgtgtctacattcaatacaacctttctagcacttttttcacataattcagttcaggttccccatccaacacacgactgtcaccagatgatgctctactctgtgaccagatacaagtcctattacgtcttctcctgtcccaaacctcaataaaacttaatggctttctcccctgacaaccaggcctgccatggcttcctaacttgtgttaaatgcagtgtttccactcttgccaaaacaaacaaacaaaataccatgtaaaaaaatacagatttcagggccccttatctgaagaatgcaactcactcaggaatgtgcaaatttggggaacagttcagaggtgaaaagcactgatcgaagagggagaagctaaaatcaggagacctggtttctactttacagtcccacttactgtataacttctaacaaatcacttctctctgagtccagttttcatatcggtgaaagcgagaggatttgaccagatgaactgttatgttccttccacctcttgaagtcgtgcttatgagcacagagtcagaggatgtgtgttcatatcccagctatgctacttgtgaactactgtgcgcagagaactgcattctctgattcagagccctcacctgaggggatgatagtatctctccactatcccttttctcccctttaatgaagtctaaatgagatgatgcttataagcatctaacaaaacccggcacataatcaatgttcaacaagttattattactctggaattctataaattacctctgtacttcctcccttgtcaccctgaacttagtgaagtttccttcacttggttttgctcttcaactcggaccccgaaaacgctctaaacgctggcggaagtcacgcagagatgggctagacgctcaaccccggtctcttccccgaaaccgcggtgctcccacttcctgcagtccgaggttccgactcgacgccagctccgcgagcaatggttccgccctgcgccctgccccttccatgacaactccagtcccacctgcctggcgtctcttgagcccaaccggcatccgtcgcggttggacgtgggcttggcggaatggggcgggacttccagtaggaggcggcaagtttgaaaagtgatgacggttgacgtttgctgatttttgactttgcttgtagctgctccccgaactcgccgtcttcctgtcggcggccggcactgtaggtgagcgcgagaggacggaggaaggaagcctgcagacagacgccttctccatcccaaggcgcgggcaggtgccgggacgctgggcctggcggtgttttcgtcgtgctcagcggtgggaggaggcggaagaaaccagagcctgggaggtgaggggcgggcccgtcgttactttttatttgatgttagtcccagaaacaaccagagctcagttcctactaaactaacgggtgttttctggtgcagcatagaccgaagaagacgagcttgagctgaaattgttcaagttaggcatacatttatgtgtgatttttggaaaggcggtggtaatgtggtttatttggctgcagatgcttgtcagctttttacacatctccgttgccaa

SEQ ID NO: 35128 - DNA, 2536 bp, Homo sapiens
tctcgccacgcttttcaccctccatccagcctcgccatatatcacccttcctcctgtgcctctcctcggacggatccacacactcagctatcagggtacattagaggcatgatagattttctgttttaatttacgtctattatattgcaacataacagattttgattccgtagagaccggtgtctcctatagccagactccttgggaggatttctgcattaacttattaaggttcgttaggatgcagcttcaaatagattcccttctctctggcttgttctctctctgtgtggcaagctcagtaaagatgtcttggtgtaccttattcacaagcacagctcattttctttagacttggcttcctgtgctggatcacatgaggctggctgggttcctcctttactttctgattggactttgatcagccaacaatgggcgttgcaagctccccagtccctgcctggtctgggtaaatgggccttgacaaatctggtggcctccagtcagtgggcaccccctcccaggctttagttctagcccccagcatctttctctctctctcttttttttttctccttttgatctcagttacagttagattttatttatattgcacctcaggtctacagagatggaaggggggaggaacacagtttcttgggttaaccaaggagaaggatgttgaaaggatgactgaaagagtgagtctgaacaaggctattttcatttctacatgaccatcttgaaggcatcttatttcagcttggaacaaggtgcatgagcccagcttgtttgttgcatgtgggaagtgtatatttttagttgccttgtagagtggctttccacctcatttatgaaattggctttttatttttatccttttctctttttccctttcaccagagttggaacgtgaagcacagtttctacttgctgacgtagtatttcctcttgatttttagtggggttggggtgttttatgagtactaaggtcacattgaactttggacacctagtcaccttgttgctggctgcagagaagagcttgagaaggagacagaaatcttctcgtcttctcatcatggctttgacaaatgcccagggagactgcaactttcttctcaacttggctgtaacactggagcccttggccacttagaaggcctgagtttttttatattttccaccaagctgctgattctaaactgtggtggggtttctttcatggccagaatggggagaaaccgtgggctgagttggggatgtgtggtttgtgtgtgtttatgtgtgatcactgaagtgtaggatatggtaggaggatggcttaggacttccattttggtttcttattacacagcaataaagtaaatggggcttagtataactttgcacttatagaaatgtagctcaatttaagaaacaaaactccgccaacaggagtgctcagtatcttcagcttgggaaactgacctcgttaattttaatgaggggaaaaattctccagctggggctgagaagaaaatgaaataccaatgaggttatcactttggatgatctcactgaattcagactatacttggaacgatgcttggagaattttctaaaatcctatggagagatttagaagaaaatgcatatgcccttgatagtattgacagactgctttccctgataggcagagccgaactctatatagtgcctcctaaaggggtcatttgaaaagttaacatattaaaaagttggaccaaagtaaaactgagagaaaaaatggattaacgtgattcttatgtgggtctagcgtgaaagcagcggggctggtcggacggtggctgaggccgttgactataagccaggggctcctgagttcaagtgcctactgggatgctaacttcctgtgggattttgggcatctgttttttatcgaccaaaggcaggaggtagggtgagggagtcctgttattcagtaggcagctatttgatttgctcaataagttgatgactttggccctgctgctgaggagtgacagattgtgaccaatgaggttaagatgactgtaggacaagtttgccctcagtgaggagaggcctgccaagttccactgacgtttggttggggaccacagaaagaaacatcaccattcaaggtatttggcccttattttgtcctagttcactaaatggcagatcctggggaggagattatttcaccagtggattcttcagaggtatgggggcagacagaacaggctttcttctccaaaagttcaagcttgctgactcaagcttcttactcatctctctggcatgtcactgcactcaggagaagatttgtgcaactatcaggtgcaaactcaagtatcaccaaagggatactttctgattaaatagagccatcgtgctctggggaccatctcaatatcagtggaatattgagggggtctattaatgtttatacgttccttcgaaattcagcctttttctttgaaagctgtaaggcagcagttaagggcactcgtactgctgctatggctgtgtg

SEQ ID NO: 35129 - DNA, 1584 bp, Homo sapiens
tctatgcattcacagaggaattgtgtctagccctagggtatcctggggctagacagctttagaattttgtttagattggaggttgagagctagaagataaaggtttacaaattagaacagcaacattttttaatccacctcccaattatacacaaatcatgagtatgcatcataagtaaatgatgcatgccaagcagttcatgaaaagaggtgtacccactattcttactccaaaatgatcaagtttagccattgtgataaacagtatgggcaccattcgtgtttttgcttttgagtttttgtttgtcaagccacagctaattatacaagcagactagcaggatttgagatgcaaagtgttaaaactaatagtgtatgtcaaatcctttattaaaaagtacatgataaagaaagatcatgtcacaccataaatagtaattgtacaatacaaaaggtgtgtgtgtctccagggtacgtggagagccagttcattgaggttcgactgactttcctcgcctcacgtttcctgctggcttctagaagcagtcatgtggatcagaggccaagagataattaagtggaaataagaactctatatccggcctctttggaaagaggtagcaaatcctcctaatcaattctgattcctgccggctttgttgcctaaggtcagcttaacagtcattagaagaggtcacggcaggctctgtgatctctatcatctaaggttaaataatacgtcattaaaagggtcaatcagaaaagagcagattctttccctgtgattcacatattttgcagaagcttctggcttggaatttctatcgcaagtttcaaatctcacagcagaaatgtttacacattgcagtttggctgaattcagaggaagctttcctggatctctgatgagaatgagaattgtggtcatgggaagcatatggccatgacattcatcccttactcaagataagctgaggagcaaggtcaacacattgcatcagacctcaaatgaagactggaacatatcaccctaaccgcatgggactaggatggggtgagcactggggcaggagcagtggtgtgtgatggaggggtggaggaatctttctccactccaagatgggatcagaaatgtaggaggaagccaaaaagagcaagctcaccactcttggcatattttttccaccttgacattgatagctagacctcactcctggttgggaaattttctaagctaccaagaataggaaaaaaatcaaccataactaaagccctttgagatattcttccttgtcttcatgaacaggacaatattaaaacattacagaaagtctggaaaacaaagggaaaaaaaagctgatagccctgcccttcaaatatacaactcattgcatttttagtaatgccccctttcagtttttaatctatttgcatatataatatattagctagctaaaattggaacataaacaatatatatcttgcttattcatcttacaacttaatacagaaattttctgttactttattactttttataattatttttaacaactgcttaatatttctcagatagagttttaa

SEQ ID NO: 35130 - DNA, 659 bp, Homo sapiens
gataaactcattgtcccatgacagctcatacatatttaaacataatacatacatataatgctaaacatacatattaaacctaatatgcctataaagaaaacatgaattcgtactggtacttccattcaaaccaatgttacgagtttattctagcccttcccctttccggatttggacctcccttctctgacagtgaaaaacctggctcccacctacaacgtatttactcatttgcccaatgcttgaacacacgcacagagcagtttcagaattactcacctatgccatcatgaaaaacaaacactatttagcattcaatatttgtttatagctctttttctctttggattggaggcatacagtgaaaatactgtgttcaaaagttactttgattagttttatttcctccttcaatatgactgtttttcatatgaaatgcaaatagatccaattgtttggatttaattttatggtttttttcaggatttttattgatttgaattttttgagtagtaaaacattaacttgcttccaaaagttaagattgtacaaaaaggtatttttaaagatgtatccctctcctccatcccaattccttgcaccccattcccaccatgccctgtaaataactggtttcactactttttggtttatccttc

SEQ ID NO: 35131 - DNA, 489 bp, Homo sapiens
atccttcacattttggcgttaatcttactctcactcacaccaggatctcagtgctccagagcaacactacaatccagcccttcctctcatgcctggatacaaccctaccctgcaactcagtacagactaagctgcattttctaacaacatactcattttcatttcatcgccggcaagttacctactctgccaagtcctagttacagtttcatacccattgtgaaaccttttctaaatagttccaagtcctttgccctaatacacatatacacaccccaagaggaatgattgcgccagactctatgatctcatagcactttatatctctacgataatattaatgtatattttattttattataggagtttcttatcccctgaggaacctgggggtctggaaaagagaggtggtttccattgctcttgtaatcactagtatctaacccagagtctgacagatatagacgggctttcaaaatgtttgctgaa

SEQ ID NO: 35132 - DNA, 1335 bp, Homo sapiens
cacagtacccagaagacccgggagctaggaccaaaccaggagtcagctcagtccaaaggaaatcagggttcaggtagcgacggtgtccgtgcgtttcttcactagtgcatgtgcgaggagggctggaggcatgagcgaaagagggaaggcaatctcggtctccaaaaaatccaggggactctccctttcagcacaagcgctcacacgtgcgctcgcgcggacacacacacacacactcacactcacacacaaataaatccccagcacctgcctcggaaagccctctctcgcaggctggcccgaaggcgcggctccgccagcggagagcctttggatttaccgtggcattacttttaattaactctgcggcgcggcgcggggagcgcagggtgggccctaatcccgggcccgcctgacgtcacctgggaacgcgcggcggcgcggggcggcgcggacccgggacgacctcgccgcgacctggcctcgcctccgcccgcgcggggctttgctccgcgggaattaaaggaaggagaaatgttagtacacttttaattggaaaccgagttcttctttcagagcggcttgtttactcaggattgggcattagaactcaggggaggctctaattgaagtgacggctttggagattatggggaacatatggccctaccgccgggctctttatctgcattttctcataaaactgccgtccgtgtgtgtttctgcgcctggcctcttgcatttctaaggggcctttgaagacagggccgaatgcgcgcgggggcttcaggcactttgcgctccacggcgggtcccgcagcccggcccgagccggccctggaagcttcgccctggactagactggcaccgacgccgcccccagcctgagcgctgagagggaaaacgagagctagaaaggaaagaaatcggactggtgactgcctggcaggggtgtaattcaaactgttgtgagcagacggcaggagggagttgccaaggtaacgggtgattcccacccgccgccctttcgctaaggctggggagagggaagcctccgcgtgctgggttagggccaagcccgcgcacatagggtactgggaacacgggtgtcttgggacagaattacatttctttttccctatcataaatcaatcaaacaaaaatctatcgtacaggcttgcaggctccaccaccaatcaccacactgtgggttctctctcccccacccctgccagattcttgccatatctagagatgccgggtcaaatacagggcacatcattaaatttgcatttccaataaacaataatttctgtattgcatgggacacactta

SEQ ID NO: 35133 - DNA, 545 bp, Homo sapiens
acaaaaaagcagaaggatggaggacaaggcaaacccatgaaaaaccctgatgccagtttgagccaactgtagtgtactgtgtttgcccccaccaaaataagaaatcacagccatctgtagctttggacagtagtctactacagttcagctgtctttctccaggcaccaccgatatgagttttgatgagatatatgaaccctccggtttagaaagtaacagagggtttggggcagctctttaacaaggcaggaatctgtgtatcattcagtttccacctctccaccagggggcagcatagcagcattcattcagtgccatgttgacttggtaactgaggtcatccaggcagagacagggattggccataagccaaaactgtctgccggaaaatctgctgctgggagtctgggagaccatgtggctaaactgaaggagagatggtgagagaagggtattcaaaagtattgggaaccaaaagcatggcttgtggccttagaagtagtgacacaagcaaccttgtcagctggctcaaggtctctgtcct

SEQ ID NO: 35134 - DNA, 734 bp, Homo sapiens
tttatctctaaaaatgagatcataacaaccttatgagatattttggagattaagtaagtagtgtattttaagtatctgacacatactagctgctctcaataagtagtagccattaactccctttattaaaatcagtttaccatatctgcccatgtaaatatttatataagataatttatttcaagacagccaactgagccaaaaatagaactttatatgtatctcaaggttctgtccctcattattataacaaatcaaatcaaacttcaaccagcctttcatatgttactggagaagacaccaacaaacaactgtgaaaggccaaacacttgagaggaaactgagggtacatctcattcaggcagctatggctatggtctaccctaacccaaggtcaatattgacactggccacgagtgttgacccacacacaaattcattgcctaacacccagcatatgttcaggaagttgtcagctccatgtttagccaaccagagccaacagttgctatttggttaatgctgacattaccttgcaaatatttaaaacagaccatttccccacatcattttggttctcatatgactgcttcttacagaggctgctgactattgtgtggacacgtattgagacatccctatccttgccttgcttccctggctatctgacctcctgtccaccaagagagcagtcaacctctctcctcatattacaaatggaaagaaaccaaggc

SEQ ID NO: 35135 - DNA, 656 bp, Homo sapiens
ctggaattgggccctcagggtgagttacaactgtgaattcttttgttcctttgtgtcccagagcactggtatgctccagttattcatctgggaagggtgaaggtgggtccctctgcccaggtctcccagcccaaacattccaggattcactcaactcccaggcaacacctcctacaagggccacaccagccctgtgagccatgcttaatacagaggtttattgaggaatactctaactcaacaaatttattttaaaaatctgttaggggaaaattattcatgttccaagatggctcttggctttgctaaaaaaaaataaaattaaattaaaaaaattaaaaacagactgacgtactatatgccttatatttctctaaaggctcttttatttcaaaattctgatttatagacaatttcccaggaatgctgctattgtgtaaatcaaggtacacttgtcctgagagtgagcttcccagccagggtgccttgtttggttgtatagtttcagagccagattgcgttattcattaacttcctgtgtgaaaaccgaataataaaactgaagtgtgttaaacaaatccagatgagggggtttaaatcacctccaggtcactaggctgaaaaccgctgtcatttctcctggaacaaatattctc

SEQ ID NO: 35136 - DNA, 1198 bp, Homo sapiens
gcctgcttggatgaggaagtgacaagcagtggggaaacaggtaggtggcccccagagtctacttccagccctgtgattccaaaacatgcacagagattaggggcagaaaggtgtctcgggatgagaaagtgtggtctggaagaggcaggaatgtttctgtgactagctatgggagtcaaacccatcacccctttgtaacaaccacttagctcttatttctccccagggatttatgtgtgagcgaacagcaggcagctgtctcctcggcagcggctgccaccgggaactacaaggcaacgtgaagcctgtgctagaaaaacccctcctgggccggtcctgcaagcagccaagatgcggttaaagattccaattctgatgggatcccatgtctcctaggttacagctgaggactgtgttttcctttattacaacagaaaatgtgtgttccccagggactgttcaaacatctgtatgaggtacaccgtgtgtgtgtgcgtgtgtatgcgtgtttgcgcgcctgtgctcacacacaggctcaggcggcagctatcatgacctggctattcaaataaccctctccagatagttaaaattcatggtgccttattgctgttccagcagccagtctgctacagatgtgtggcggtgcagttgcatttgaagcaaacagtctcagaagtctaattaaaatagaggaagcgatctcctcctcaaatttcctttagatttaactccataaaaatcactaggtaatatccaactggcagagtgaatcatcagagctggcagctgggccaagcaggcagagcaaacagacttctggcccctgctgggggtgtcttacaaaacacccacaccagagactccagcctccttgccctgtgccttcatctaatcttttgtggtcacatttatgaagctatgattatatgtccatctggagttgggagggggtaagggtattgttgattcaccttaaaatccactgacccaaagtcactgaaatgtgtgctcaagtgcttttctctgattattgataaaaaaaaaaaaagagagagagagagagccagttgcctggatattcacacaagcaaaatggcactacagatctagttatcccaaagggagatccttcgtttgctgatatgagcattctagcatgtgtttggaaccatttgtcacccatgtctagcccaag

SEQ ID NO: 35137 - DNA, 844 bp, Homo sapiens
tataactccacatgaatttgttttcagaaccctagaatatgaggtgtctcagaggagactctaggcatggtcactgaagttctctctggagtagcagaaaatgctgacataaaagaagcccttcctcctctctaaaactgtattcaaaggaggctttgggactttgttagtcagtgatctccagagaaacagaatctataggaggtgtgtgtgtatatatatattttaaattttattataagcaattgtctcacatgattttggaggctgataagtcccaagatccacagggtgagtcagtgagctggagacccaaaaaagctcatgacatactccaaaggccagcaggcttgagacccaggaagagcaaatgcttcagttcaagttcagagacaggaaaaaaaatgacgtcacagttcaaaggtcatcagacaggaaagttctcttactcagaggagggtgagcttttttgttctattcagatcttcaactaattggatgatgcccactcacattagggagggcaaactcctttactcagtctacctatttaaatgttcatctcatccaaaaaacaccctctcagaaacacccagaacaatgtttaaccgaatatgagggcatcctatggcccagtcaagttgacacataaaggccctgccagttctgcctctaggtgtgctggtagttggggcagcagggactctggctgttatacagggagagaagaagctgtggcagatgggattattgttcctaatacttcactccttttaattcttcatattctttgcattgtttctctgcagtacttcccactaatatagacacagccttcttcctt

SEQ ID NO: 35138 - DNA, 1906 bp, Homo sapiens
gactatttgctaaaatgtgtacatacatgcatacataaaaataaaataaaaacgactcgggaaaggaaaatatttttacactgaggatacccaagaatgccgggtacattctcccactttccctttttgtctgcttattacccacttcctccagcagtaccctccaccttctgacagaaaaccaggtctcttctctgtaaaccaaggtggttcgaaatgagatggtgggaatgtcccttacaacggccagccccaatcccaccgggagtaacttcgacatattcctttactctttctgcttcttttaacatatctgaaaatggaaagtaggtaaactgcacctacttcctcagaaggtggaagggattcgtggtgtaatctctctacgtgggcggaaacacactgtaagcacccaaataacaaaatgtaaatgtctagcaagtatataaaaaaacatcaggaaaggttttttgtttgtttttgttttgttttgtttttgtttttgtttttcatataaaaggccaaaagtagggaagtgacagaaaggctgattgccgaccttttcagagcttacttattttaaacaattacactgactcataaaataaaagtatttcttgtgccccggtcaaaagcaagtggatttttactttaagggtgaataataagaatgctttggggatgacgaataaaagggcttcccccggctagccgaggcggagccatcggggatataccatctctcctcgtcgatctggaaggctttctgaaggaactggggtttgtgtccctggcacgcccgggacctgcgtggggctcagcgcgctgccaggcgacctcagcagcccagagcttcaacggttgctgtggcaacaggccgcccagagcagcagtcaaagtccctgcgtgagcgactgcacttcccaagcgcggagagtctgcccaatgagttccgccctctctagcgcgctttctgtgatccaccaatcaggctctgccacgcccgagctgagtggtcagcttgcctgggagggcggggttagggtgcagaaacaggacggagaagggggctgtatttcccctggcgtgtgaaatggatgttagtgactaaagctcaattttccagttaagggaggagccgagacttttaagtcgagtgttcctgtggggccaaaaggatggtttcagagaaatcccaggaagtgagagtgctgggatatgcgaggggcccacggagccctcccctgcgtgtctgagatcacaccctgcgggtaccctgccgtcgtgtgctgaaggaggtgactggatctcgactccagagtttgctcctgagatcgaaaaacaaaacaacccaataatagtaatgacagccctgggtggggacagttgcagcaggtctcatgagaaactcactaattttgtaggttcagggaaggcgtgggcatgttggtgaagtaaggttctgagtggaagaagaaaatgctgcttctggggaagagaataccgtcagaaggaaggaaagaaaggagggagtgggaggggaggggaaatcaagggagaggagaagaggggaggagggaaggtgaggtgaggtgattggtattctgccaatcccattctgcacactagtgagacctagcaaggactagagtttcagggggaaaatacgagaataatgaaagataacagagaggaaagaaaaaagaaataattgaaaagtttgaaagaagaaagacaacagctgaaccaatggaggtgaaaatagaaggaaatgaaaattctgcaagcttttgtttcatggataaaaggactgtattttctggtccattatcaggatacaagatggaaaaaaaagctattgaacttgtggagaaagtggctggtttaaattagtcctgtccctgaa

SEQ ID NO: 35139 - DNA, 2645 bp, Homo sapiens
cagcaagtggagaaacttgcctcaataatgcaaaactgtctccctaacttacttcctttcaatgttcaagcaaaacaaagccctctctacatccaacatgacagaaacccaacatgacagaaagtatgagaatggttggaaattgctgaaacagcaacagtaaagatttaatgagctctcaaagtacctctagatgtgcaaatatgacaacccaataaaaagaaacacacacataacctagagccttcaaaaatctagatttctgcctttccacaccttaacttggaatcattcaggtgggttcctaagcattctctcggaggtgaggaatcctccaaagaggagactctaggaggggcccaggtgtggcaatcttcaaaaggatgagggatgtccagaggagaggtggcgggagggtgcacttaaaacacgcgaaaattggaaacgtgccttctgcagtcagttccttcggattttccggcatttagaagccagttctactccttcagcccgaccgtatctgcaggtctcacccaagaccaagacccccgcccccacccctcctccacccggcctcgagccccgccccggacgctggacccgagcgtaacgggagcaggtgttcacatcaaaggtctgggtcgcgaaggcagagactccatgtgccgcaaaaaaaactccacggacaattgggagactcctttcaaaaaaacaaaactccggagccacgcgactccgcgctcagggggcgtgggtacggcccaccacgagggcagggctcggcgccagctctcggcaaaactaacaatatttgttaggccctaaacaaaaaggccctaacagcgataaatccattcacttcgggagtgtagcaacctgggacaccaagcgccgcccacgccccagctacgcgcctcagggacacatcgattgaggcgcggctactttcgcgcacgcgccttgcatgcccgtgcttcgcccttacagcagagcgcctaaaaccgctacggtggctctgctggggacaaattattcacgtcccactgttctgcaaacccaatccgggaggtatgacctggctgggacagtttaggaagatggccacgaaggcacctgggggagtagatatatgtttttgagaatgagaggagtaaatcgctggacgaccatgagcaggaagaaaattaggcctccacctcccaaccagtggccctgagttggcaacttagacagcgcgcgccagcgccaggagccccgccttgggggcgtggccgcgcgctggtcggctggggcggggcctgcttctggcctcatctagccccgccccaggcgagggcgccgcacccacaccgcgctgcgcagttttgttctgctccagctgttcgaaggtgatccaggtgagtgctagcacctgcgggcagccacgagcaccgggccgccgggggcacttcagcctttgcgcagggcactcccatatttcagcctatgcgagctgaatagagacccgctgtctctaacctccccccacccttatcagtaaattagcgatctgaatttccaccctctctgctctccccttgccttgcatcttttccctggtggagtgggttgggagcgtctaagcgaggcccgacctatttatgtgtaactcaggaaaattctcaaggtcaacccttcctccattccttcctttcctctcctgctgtccccgggctctgcagtctgggggcacctttctgccttccggagaccacccgaccttgccctctgctgttccggcgcagaggatggcgagccggacactgccgggggagtggttgtgcaggcctgatcagtaacactggtttcagaagtggcctgtgagcaatgcacccgctgcggtggggatgtgttgctagggacggtcgggagagcctctgaaggaattgtgtttgttttcctcctgcctcttagaatcgtttgtccatttgtactgggaaggtggtcatttcctaccgctgacttagagcaagagacgcctctaggcgggtgggggactcttcaggttcttccttggatttcagaaaatgccccttctttatgtggggtggcagcacggagccgtagggctacagtagtggggcagttgcagggcggtggaaggcgctggagactccttagtgagtcattccccgaagttgtggcttctgctgatactttccttgagagtcacgagtttacaagctacataatagcgtcgggggcaagtaagtgtggaagacgaggtaaaggaaaagcagatactaggatgggtagaaggagaggcaggggttagaactttaattccttccctggggacaggagatgccctggaggggaaggcgcttccggctctgcaggtatgtgctgttgggcctaggtgtggtcctgcggaattgctgcagattttagattgctggtgggtaggagctgcagcgcttctcttgggaaatctgtagatcacctggagccagcagttctgggaggcaccccaggttattggtcagagttacaggctatattttatttcagtgaattcagagagcacattgagtcagatcaagaatgtttattctcataggagatgaatttaaggagttaaaactaacatataaaatagaaacaaa

SEQ ID NO: 35140 - DNA, 2009 bp, Homo sapiens
cggggcgtggtagcacacacctgtagtcccagctacttaggaggctgaggcagaagaatcacttgaacctgggaggcagaggttgcagtgagctgagatggcaccactgcactccaccctggcaacacagtgagactccgtctcaaaaaaaaaaaaaattgtttttatgttacttccctctaggctctttaatttctccattgagcattgtgtgagctccgctgagcattgtatggagggtcagctgccctggctggagatggttttgaggcttgttccttcgtggaaacatctggatgcagaagttaggctgtacaactatccaggggagctttaagtgagccaagtggaccctcagcaccacctcagagtgttctaagctaccgtctggtgtttgggactcagggaagtccttttggtatgatcagactagccctttatgtgactatccttgtgtgttactctcattaaaatattgatttttgccatgtaaggaagattggaatagcacaggcagccgaataaggattttaatgaaacattggagaatggcttcaagttaatctgtgaatgctttgtcattgtcccatccctggacacattaaaaagaaaaaaaagagcagttgagaaattgcagtacaatttgaggagagcaatatcatacacagaagtagggactacttttgtcaaagctggattttatttatttgggagcaaagagagagagctgaaagacataatcttctctcccttaagaatctcattgtcatttagtaaaataaaaggtagtgtcacttcatggctcagaagtggtaaattatttgaggcaggtacccaaatccataaagcctgccttttgctttgtttgtggaatgctgattgtgtgctggggaatttctgatgggcagccaagaggaatttgggaagtagtgaaggagacctttaccccaggagtgttctattggatgtagttcaggaagctttctgggtaagccttgcaaccaaaggaaccctgccccagtaagatacgtcaaatggtggcagaagcaagaattagaggaaaggttgagcaacattttggtatttgaatagctgtgttcccaggaaactctgtcagtaaaatttctagaggttaagtaccttagccagatgtcataatgaacccctgtgttgctaactcaaatgctggaatggagcatgtgttttaggagttagaccaacactgcctcatcttaagcccaagtctgatcactcctaaactgaaactttgcaaatgtgtgtgttgtagcttacttaaaacccattgggtgtctgctaactctggctacactgaaaagtttttgctattctaccacccacggacgtcagagccctgctgcttaccagggcatgttagtctcctaatctacccctgaaaacctaccatggcccggggcttttctgctaccccccacgtcctataccctgcttgcttcaaaatactgttcctagttttcttcccctaacttgataatgtactccaaaacaatcatgtttggcaagtaatacactgataaatgtaaaagttacaaatagaagtgctgctgtgtttttaaaacattatagggccaggagcagtggttcatgcctcttatcccagcactttgggaggctgagagaggcaaattgcttgagctcaggagttcgagaccagcctggccaacatagcgaaaccccgtctgtactaaaaatacaaaaaattagctgggcatggtggcacacacctgtaatatcagctactttgaggcagaaggattgcttgagtccagaggtcaagcctgcagtgagccctgattgtgccacttccactccagcccggatgacagagggggaccctgtctcaaaacaaaaacaaaacaaaacaaaaacccagccaggtacggtggctcacacctgtaatcccagcactttcggaggccaaggagggtggatcacttgaggtcaggagttcaagaccagcctggccaaca

SEQ ID NO: 35141 - DNA, 879 bp, Homo sapiens
tagtatagtaactacataaaccagtaactgtcacttatgatcattatcaagtgttatgtgctgtacataattatacatgctatacttttatatgactggcagcgcagtaggtttgtttacaccagcatcaccacaaacatgtggatgatacagtgtactacgatgttacaatggcacagtggctatgatgtcactaagcaataggaatgtttcagctccattacagtcttatggggccattgttaaatatgcagtccatcactgaaacgcatggctgcatgtggtagaaggtttcaattcataaatattaatttatactgctggtttatgactaacccaggaaactgcataatgattaacaaatgctacgatataaccaagtgaattgcaaagtcatctacacctgtattaaagttcagctcagaaaggactgtttggactgtgtgtatctagcactacgtagaagagaaagtcaagggcaaagttcccactctcaagaactttatcttgttgggttcatgaaagggtttctggtgacacagagtaggtatataatcagcaaaatgtggtctgcggttcaaatgagtgctcatgccagagattggttgggtgccagctatcagttcttccaccctgtccctggaagctatctgctacctctggggctggcacaacccagggtgtggctgcgactgcctagggtgtggccactgtgaactgagctgcatccccttcctggtgcacacccgcacacacaaaagtcactctctaaggagtgggaatatctatctcttcgccttggaatcttcagaaaataatgatgtagcaaatgatagtttttttgaatgttgatttaattaagctgattctttctttgaa

SEQ ID NO: 35142 - DNA, 1812 bp, Homo sapiens
ggttccagcaattctcctgcctcagcctcccgagtagctgggattacaggcgcctgccaccacacacagctaatttttgtatttttagtagagacgggatttcatcatgttggccaggctggtcttacattcctgacctcaagtgattcacccacctctgcctccccaagtgctgggattacagccatgagccaccacacccggcctagcagttcttaactgtattttgcggtcattgacattaggagtctgataaaagttgcagacctctctccagaaaaatctacttaaacatataacagaattacaggaatgtcatgtcccctgccctaaactcatcaaggatttagagttaagaacccctgccctctactattttacagttgagtttactaacattaacttctgattaagttttgcaacactcctaaacattatctcagaatctcaggggtcttgtaaaatgaaagtcaaaagtaatcagtctattgggttataaactctgactgtaaatcccttgtctatattctatgtaggttatatcatactacttgatacttgataaatatagttaataagcagtaatatcaggataaggcaaccctaaaggaacattttttttttctcaaaaattcccagatttccttttcttattccacctttattccctctccctattctggtgcaaattatgaaacaatcagtttttctaggcccatagcccaaggactgtactgcctctaccaacaagaattctttaagtttgccaactcagcaaatcctcttcacaagaactcctgggactctttccagggagatttcacaaatctgcaatttctgttacaaacttgaatagccagctggtaaaggcggtggctgaggatcacacacactgtaggcaattaaagcaaagagcaatttttctttcttttgtatcaggattaagtcggggtagagaagctgtttcctcctatataaagaagagatgtgataatgccttctggctctgccaagtcactgctctgtggtttagtgtggatggtcaaatactaaattctccagtcccctgcaaatcagttttattgctctggctacattttacacaaaatatttacatttttctccccacatatattccataaaacccagcaaaataaacacaacacaaaaccaaaacaaaaagccccttcttccttatctctgtgaccttcagagttcccagagtaaatccagtgcctagcacagtgcttagcacacattaagcactggattaaaaagttttatttcagcaagatgaataaattgtggagagctcacgtagaccatggtgactatggttaccaatactgcatcatatacttgaaatttgctaaaagaatagatcttaaatatttcactatccaaaaaaagccattaactatgcagaagcaatggataattagattgaccgtggtaaccattttgcaaggtatacatacattacaacacgttttacaccttaagtatatacaatttttatttgttaattatacttcaataaagctggggaagaaagtactgaataaaggtggggttttttcctttcccaattctgattaatgtgcagaaatattttaatattagaatgtggagacaaagtcctcattcgtagtcattagaaactatctgtgagcgttccttcattcccagcacaaatgattatcttccccacaaccccgccccgttcttttagaattcctctcctatgcacacatttgaagacaataatacatcagtcctggttttaaaagggggaacagttggctgggcttg

SEQ ID NO: 35143 - DNA, 1213 bp, Homo sapiens
ttcgagaccagcctgagtaacatgctgaaaacccgtctctactaaaaatacaaaaattagccggacatggtggtgggagcctgtaatcccagctaccagggaggctgaggcgggagaagcacttgagcccgtaaggtagagggcgcagtgagctctgagatggtgcccctgcactccagcctgggcgacagagtgagaccctgtctcaaaacaaacaaaaaacaaacaaacaaacaaaacaaacaaaaaaggaagttaacagaggcacgacttcccccaccagtactttgcgaactctgttctggcccgggtaaaacaactcacgatcctaccacgcaactcatcagctttgcttttcctccctacccatccctgcccggaggcactcgcgttgccccagaatcgctagttgcctacacacacaaccttagactctccactgtcactgtcttgtgctcaagtcaacgctgcagaacacaggaaacgggggctggccgggaaatccgcgcatccggccccagggcgccccagcctccccggctcgttgcagttaccggttgctggctcgaaagctttctcggtaccggaggcgtccgccggctccacgcgggccccgccgcggtaattgagcggctgcgacacgacgaaggtgccagtgctcatggcggcgacaggagagggccgaagactgcgaagaagcggggagagcgcggccaggcctgctcggagaaacatgagtggcggacgcagctccgcggcagaggctgacgggccgcgggaggggcggggccgcgggaggggcggggccgcgggatcggttctaggagattttaggggcagtcactcgattcctctgcggtccaggccaggccctcccctcgccaggagggtggagcaagacaccacattctccccaccaccccgccataccccacacagtctccaggcgggaagaggacttccttcttcgtgatcaatatttgcgtagcactttgcaagtgttttcgggttcatcattgcatgtaagcatcctaggatcccattcttaatcctatcgcctgaagaaggcagaggattggagtgccaagagtctttggtggttacttcactgctaaaccaccgtttctgtaattgtataatgctttttaaagggtgacagtaaaaagcaaggggactgtgaacgagatagatgatattgtgatctgaaactgct

SEQ ID NO: 35144 - DNA, 749 bp, Homo sapiens
ccatgtttctggatgggaatactaaaaattataaaggtatttaatacctcaaaattaatgtacaaatttaataaaatttcagacaaaactcagaagggattattttagaggaagctgacacttgattgattctaaaattcatttgaaagaataagtgccccaggaacagtgaacaatacagttaaaacagagtacgtagtaggcaatgataagaaaatagtttgaaaaacaggctggggccaaagcatggaatgtcatgagagccagggtaaggagtctgactaaaatcaatagtcagggttgcatggtgataagtgtggactttagagtctgagagacagggttaaaccccagctcaacatttactagcttggagaccttgagcaagttaagtgacttagagtctcacgtcctcatctgtaaaataaagattagaattcttatcttagaagactgttaaaagtaaaagggaaggcagggcgtggtggctcacacctgtaataccagcactctgggaggccgaggcaggcagatcacctgaggtcaggaattcaagaccagccttgccaacatggtgaaaccccatgtctactaaaaatacaaaaattagcttggtgtgggggcgagtccctgtaatctcagctactcaggaagctgaggcaggagaatcgcttgaacccgggaggtggaggttacggtgagcccagatcacgccactgcacttcagcctgggtgacacagcaagactc

SEQ ID NO: 35145 - DNA, 2044 bp, Homo sapiens
ctggtgctcttaaaatatttattgtgaacatggacttaatgagcttgacgtgttgaaattatttctaatgtgttgccatactcacattttttactctgtttttccacttctgccttcagtctcttgtacttgtctgtcctgtaaaccaggacccaggttatgcctaaaacattaaaagcaacatgttaatagagaaatgactggaatgatcacaacaaacaaagtggttactgttggagaaggaggaattccaacttttcgctttgtatttacccatagttaacttttttcaaaggctaatacaactgactcttcagccaaaacaacagtaacatgatgtgaaggtgtctccacaaatacccaagtgaaatctacctgagaccaaagaaaactcggcaatcgactccatactcccctcctgctcctgttcacgagttgcccagagattccctgaagtggagtagatgagcctctcaagcaagtaaggctcgcgatctttcccctggtggcacaggggaccccggggcccttcctcccggggactgatcaaacgtctgagaaatacccgctctcaccctctgcgagcagagccgtgcacacagagataaaaacgatgaggagagtgtccgcgaacatagtgctcatctcgcaccttcgtctctgcactctcacccgccagggggaaagcgctctacagccaggaaaagtgaagcgaaaacggcttccgtagactccgccaccaccgagtaacagaccaactctgacagcccgaagatcgcacttccgcttccggggcatagcaccggaaaggctcgtatcggagaacggtgtggccacgagagtctagaggaaaccaacccgcaactcactggagctgaagggctggtagtcaggccgaatctcgcgagaattggaactatttcagagccagaggaggatagtggcggcggcgaactttgcccggtagattttactgactggggtgctggcgcgcgcctttttctcggccagaatccagttattgggatagtcttgacttctacctcagcccaacttctgtggtcgtaatattagtttagcttgggtttgccgtgaagtaagaagactgacttccgcaaaggtactgaacgactgggtgtaggtgccagggcatggacgtgaagctggaaccgcgaaatgagttagttgtgggccgctggcctcaaggagcgaacgtcagcgcgaagaggagaagcttgtgcatacgctctgataagggttttaatagaggtattaccacagtgctgcgtgacacggttgagagagtggtcagaagaagctaatgaaaggaattgaagcagtgccttaggggagtaggagtacttttggagatagcaaaggactttctaggcaaagtggaagtcaaagcacggatgcctgaaaattcatagtgtgatagtgcagtgagtaatgtatctagagaaggggtcttaaacccagatgcctagactggcgagagaaaataaattatcttatgcaagctgagcctaaacaaatggtggaagttactacgatggataagtgagcattaagttcatctgaaaggagaatttgatacccaaatccaacccatttctctaggagaatgagcacccagtttctgagatgtcttcgtttctcaggaaaatccagaaatcctgggttttatgtgaaacttaatttataagtgttgctaactaattaaaattcaaaaatgtctcagcagcgtggtttcagccattgtagacggtttcagctttttcacactggggtgtgtgtgtgtatgggtgaaaacctggaagctggctgagctgtatcctcttgtacttcctcctatcattggtgtttttttgtttgtttgagatggagtttcactcttgttgcccaggtggagtgcaatggcacaatctcggctcactgcaacctctgcctccgggttcaagccattctcctgcctcagcctcccaagtagctgggactacaggtgcccgtccccacgcccagctaattttttgtatttttagta

SEQ ID NO: 35146 - DNA, 1382 bp, Homo sapiens
atctgtaaagtataagtaaaaatatctaccttcaggaattaccgtgaggtttgtatagggttgggaacaaagttctggagtcagactacttgtattcaaatcctggcttctccatttaactagatgtgcagttttaggcaaattacttcaccataccatgccttggtttttctggaatgtaaaatgtcataatagtatgtaaatttaaaggattttatttttaaaaaaatatgtaaggaaagtgtttagaaggtacatggtctgtctgtggatataccagaatcaatctattgtgttcttttccccaaactccaatattcccttgttctcttaatgagtagcaccaccatctaactggttttcaagccaaaaataagggaactatcttcagtaactccctctttatctcgcgtttactttgcaagttccatggatttcccccttttcatatctttttacacatctttcagtcccctctactacacttcaattcagttcatcattatctccactcgtattacagctttctaactggtctccaattgtatacccaattttgtccccttcaggccattcttctcatttaggcagtagtgatctttgtcaaatacaaagatgactgggtgtggaagattgggaagaagaaggaattggggggcagctcgcagatttttttcttagatacctgaatgaattcatatcagagaaaacaggagaggaatccggtttttaggagaagattttttttttttcctactgggctagcaggactagatgaagaccttcagaaaccctgggcactgagaagatcataaggtctcttcccaaatataattaaaaataaaatactaaggtgaaatatattttaattattatttttgaacttattttttccaaatgttttccctcgagtctgtgcatgtgtgccctaaatacatgtttcatcggctagttggataatcctgtactgttgtgttttcttttagagatggaatctcgctgtgtcacccaggctggaatgcagtgactcgatcataactcactatgacctcgaactcccaggctaaagcagtcctcaagcaatccttccacctcagccttctgagtagctgggagtagctgattaactaatgcgtgtcaccacgcccagctaatttgtgtatgtgtgtgcacaggtgtagagctaggggtcttgctatgttgctcaggctagtcttgaactcctggcctcaagcagtcttgtcttgacctctcaaaccagtgggactgtaggtgtgagccattgctcctggctgagcactgttttttttaggacagactgtattcattgttgcaatcttcagcttttggaacatcgtctaggacagagaagctgcacaata

SEQ ID NO: 35147 - DNA, 2880 bp, Homo sapiens
tgtcagtatgttttcagataccctaactccataggaagctcagtgtatgggatgagatactgtggtttagaagggaattgcttttccaacggagggcacccttcagataagcccctcaaattgcccttcactagagagtcgcacgaggacaggcctgctaaaaaggatggcgctggggggtttccaagacaggaaatatctaaagccagcggctgacatattatcttggcgaacgggagaagggaaaaagaaccctcattttttggaaacacaagtttttagcctggataatgggtaaatgacattaactcttcgttccacactaatctttcaagcttgttcaaattttgcttctcaaacctgggccattccttcttatctaatctgcctattatttccttcaagctttttatcccttctgaaaataggtggtagcataccaaattaaaatacagaacagcctgtttctttcccccagggtccactagggcgcgtcggagaaagggttaaccgggcgggtgggagggaaggtcgggctcacacctttcgcagagacctcgggcggcggcggggcccgggaggggcggaggctggggccagacgcctcgccgcctccgcctcggcgaatagcagcgcgctgcccgcccggattggagcagcagcatcacgctgacctctgcctgggatgtaaaccggaccagccgctgcgggcaaaggaaggctcttggctccttcgggaaacccagccccgtcaccgggctccgagcggctcgcaggcgagcgacagcggcctcagccccggcagcgcccagcggcggctgcggaaagcggagggagtccgacgcgggcgcgggcggggagcgtgcgtccgttcgcacaggcagcgggaggaggggcggcgcgaaccatggccggggacagcgagcagaccctgcagaaccaccagcagcccaacggcggcgagcccttccttataggcgtcagcgggggaacagctagcggcaaggtacggcggggcccggagccgcgctcccttcccggcttctgtccctgggcggcgcatgtggccggcggccgcgggccgtgtcagttgcggcagccaccgcgtggcccgcgcgcctccgctcccggccgcgctccagcgccgagtgcgccccgcgcggcctgggggcgctgcggcgggggcaggcgaagactcgggccttgggggttccgggggtacgcggccacgatcgcagggcgggagtgctcctccggcttttctccccccgcgttaataactcgtggccggggtcctatgggggaagggcagggaagcggatgcttattgttttgcaactccagtgtcgggggagagggctttccgcaggatcccccactaacccccgatggactccctcaagccccggtctggcacagacgtgctcgccccgcggcgcagcctggtgccgagggcggagcgagccgggaagcgcggccgagagggcgagggtggcgggaacgcgcgaggcggcatcccggggaaggggagcccagtgtggggctgcacgcaagggctggggattacaggggtttccgggtaaaagtctgagagccaaataggtgccgtgacatcaatgaaacgataatagtaggggcttctgttttttaaggttataagaggaaacgtggtcggcttcaatgagaaagttgtactggctccaagctcttcggtgtccaggacgtacgcgtcttggatccacggaagggggtcatcgtatgggtgtctgaccctcttaggagcctgtttcctttgttttatccgcaaggcaaggagagacaagggaaatgacttcctagctttacccggggttttttctgcaggtggagaagggtggagtcctcccagatggttctttctttgctcccctaacagcctttaagatgtggctacttgtttttcccaccgtttaacaccctccaacttcatttggagcacgggttcctcaagggatcctgagagctgggtgctgggtgctggtttggagaggcaggatgatgcttctcccggctggggagagcagagcaggaaggctggttggcgccatgaggaaagagccacgaggttttagctcccgaaccgactcgtcagtagcccctcctccatgttggttttacatttttccctcctggtctggactactttagcgcaaggagcccagccagacacggcggctggcgctgctggacttctttattgatgaagttgatctcgtccgtagctcccggggttaggaatcggcctgctttaggtcctgaagtttctgttctgtgtgctccctggttgaaggcttttaaaaaaatttgtaatttttgagtatgttctttactatgacttatactagtaattcaaagcaaaaccagaatgctagcccttcaggaagctttacctgttcttttagaattattcttgctcttctggcatattcctgttggattgggagcattttttgttgttgttgttcatggctgttttcccagccctcctagcacaatgcctgcctggcatgtagtggggtccaaattttaagctgaagtccagtcctcctaaagtggggaggaggcttaaacttgcatatgagcttttagaaacaaaatgatcttggtaatcatctgaataatttagttaccacgagggtgaaaactgcgaccctaaaaggtgaataactctgttattgttcttcttgtgtgtttctcagtcgtcacctgttctaacttgataatcaagcttttggtgttacttgggtaaagtgagggatgggatagtggtgagccaatgtgggagtagctaattctctgctatttttatccaggaggaagagtgtagaaactctcaagaaa

SEQ ID NO: 35148 - DNA, 3356 bp, Homo sapiens
tagccaaattatggtactaagtaccgtctgatacattaatttattcagcaaacattacgtgcctgttgtatccccagctcctggtattttgggtattaggtgattttttttttttttgtcattaaaatttcctccccccacccccaccccacaagtaacttgtaatgagcttcagaggcatttagctttaaaacaaaaatcttcctccctctttttaaccacactacccttggttcttagtttaaaaatttagttgacattcctgtgtgtttttatcttgcaattggccggagggttatttattaggaaaagagattttgaatgatttcagtaagtgaactaggagttgtgatacacgattatattaaattgcttatggttagttttccaggaggtgatttaattgttcaccttcctaagtcttcagtcttaggcttatccagtgggagctggaaagctttaataggcaagtttattggaacacacttccagagtcaaatgtcactcttggcagctgcagatgtcaactgggacaagtattcagagcctgagaattaaggatatgtgttaaatatggccctcataggcggccccagggtttttttttttttttttttacttttgcgaacatgttgacagagatgaggctcagaaggcaggtatacatgtgccttgtcttcattctctgcagagagaatgtttttaggggcttgggaaagtatttcaactcgaagaaaggacttatagttactagaatcttcacatctgctttctcgagtgaccttgagtcaaccacagtcttgtggggtagatggtattattcacccctcttttgttacatattaacatgacaaaactaagactcagagaggaagtgccttccccaagcacatgcagctagccagtggcacatccagtacttgaacccttttctctttgaatcatgctttgtactaagctgatcacggtccactgtagcagtaggtgacttatggtactaagtaccatctgatacattaatttattcagcaaacattgagtgtctgttgtatctctagtacctggcattgcaaagatgagtaaggcagtagacagataactgacataacccatgacagtgcagttgcgtaagtggcatgatctggagtgcagagtactgtggggacacccatgagggagccacaattgcctggggtagggagttggaggaggcagatgacaggaggtaatgactgagctggagctggagggatgagcaggagttaggcagattgcaaagggggtgcgggcatgtgctgggtggcatttccagacaaaatcggagggcttggaacagcagtgtgtgctcacacctggtacgtagcaggagtgagaggcaggaacagcagtttgaggcttgacagccctgtgtgcgaagcgaagcatttgaatgatgtctcattaccactgtataccacatgtccttcccctgcagctttggctgacatctgtcattctaccctactcctgttggccttactttctcccttttacccctctcaacgtttgctttaggctgtcagtgtttactgcaccccataaaaggttagatcctcccaccaggcctgatctgactactaggagagactgtctgtatctgctggagggattgagagaattggtacagaaggagttttgtggatcatgacatctagaattagcactctgagaaagagggagtaagcatggtattaggattggaaaaaggtttttttcctttcagaccattacaaaaactcatgagttcaggatgtatcagttgtgtgaataaggtggatgtttgaagaccccactagcatgtgttgagtttacagccactgtgcaagatgcatcttaaagattgatagtctgtgcacttttatcccgaggtgtgaggtactggacctctgtcataggggagagagtagaggctcagagaggttaagtaacctgcctgaagttgctccaccagtaagatatggaaccaaggattcacatgtgggctggccaacctcttcatgccctgtgcctcctatgtgtgtaggtgggtctgtcactactgccctgggtgtcctgcagaatggctgtggttcccagtccacccccttgggagccttgcctacattagctcgatttgctgacaggtgaacaaacaagcaaccagctgctctgataggcctgggaacttgtccccggagagaatgcccaagtccaggaaggttatgccaggtcatgaagcagaagtgtctggacatgtcacacagtctgctgagccagcagtgcccacttcatagccctttctgtagggcccctgtgttgactccctgcatggtactcgtcccttagcccaggagaggccccatgggaggagggagagttgcagcaacttctggaccctgagccataggaacttccccttcccaatctctgagaagatgttcacagtgacctggccagggtcactgcaagaaagaaaatggaatgctgatggggcaagggtgacagggaagccaggcattccagctgtgttcaaagcagtgacaatgactgtgggagcgggtcctgttttatatattcatcattctgaggccttcagggactattttgttagctacataagtgttgaaagggctgcgtaaaccagaaatcaaattctgtagattggcatctgctggataaatcttctgctgggattgctacaacatgttgaataaccgtgtgttttgaagaatgaaaaagataagacagttcactgagttgcaacgtttatgacacagggaatggaggactgtaattaaatctacataaaaaggccatgttttccaagtgtactttgaacttggggcaggtgttctgagtgggtgggtgcatcatctcatttccccctgcggaggaggctgctggcaacctgggaatggaggttaacaccatttgttacccctgaagtttctggatgtctagaggaggacccccttcctgcgccccgcccctccatgcaccagtccagagctgtggtctccttcctgtgttggagactcgctgctggtcctccgctggtgtctgagttggttaaccttaactgaaccccttaactgaacttttcttgttacatgtattccagctctcagtgaagtgacattctgccctctgggcccagatccctgaacccttccctgcatttcagacctaaatagcaccctgtcagaaagatcagtggggccgggagctgtggctcacgtctgtaatcctagcactttgggaggccagggtgggtggatcactttgagcccgggagtttgagaacatcctaggcaacatggtaaaattcttgtctctac

SEQ ID NO: 35149 - DNA, 680 bp, Homo sapiens
aaatggctttcatctgggttgtactccagacttgctgctgcttcatgcttttccaattgtgccacaggcctgatcccttagcatgtgtgcagctgtgggctagagggttgaaagcaggtcctgtgtctctttcctggtgaactccacagggacacagctgcaggtcttttgtaacgctctgtatatgcacaggaagtcccttacaacccactctgttagatctcatttcctcttcggttatttgccctctgtggtctctgggtgtcagcctggcctgccttttcagggttcaaggagctgctggattggtgccctcttgtggtctgcctttgatgtggttgggatcttgggagctgaaggcaaagaaaggacaagtgagctaccgaggagtaaggaagacatgaagttgagaagataacagagggaagttaaaaaaaaaaatctttggttgaggaaattgtttctgaatataacatgataaaatcagtttaggttaatcagtttaactgcatcaataaagaatttctttgcaaaacactacttaaaaagacagttaactagaaagaatttgtgaggcaaatgagaaatggccagtttccttaatatataaagagcttttataaatcaataagaaataaaagaccaataaatcaacagagaagtgaggacaggatatcaac

SEQ ID NO: 35150 - DNA, 362 bp, Homo sapiens
tgaagcactcactcttaatggctctcagctctaattatttgaatcttgggcttttatttagctgctctcccatccttagttagaatgatagcagtgctgcaaggtggctgcttgagcttcagctatcaggtcttcatttgagtcaacaggaaggaatgtcaaaagagggaacagttgcatagtcatgaggaactgcaaaggtggctgaaaaatgcagtctgtgtgcccagctaaaattcaaggactgatggcttgagtccaggagttcgaggctgcagtgagctaagatgttacgacttcaaaaaagacttctgataaattttgacatttctatttaacagacatttgggagacacaccccc

SEQ ID NO: 35151 - DNA, 673 bp, Homo sapiens
agcagggagtgcaggaaccagcacaggagattagaaccaagttttgagcagcagcaagacgctggaaataaagtgcatcctagtgtctaattcaaacagatcatcacggtgtggtttcaacagaacattttcccttcctttcttgcatgggattcttatgtgaaataggagcaattcctacaatggtgctggccctctgggggtttcttagggccagctctgcctctccgccttctctgaacaggctgcctgggcagggctctgctttctcatttcagatctgctaacttcacatgtcacctactgccgagtcactttcctgatggattcatgggacttttctgcatgctatttctacaaattcattctctctccacgtaggacaaaaaacatgcttggcatgtgctttgtggagtgcgggggtgctggggtagggaggctggttagtcagaagcagctgttgagtgagcttgaacattcctggagacttgagttagctccatgattttacccatctgtcacaccctcctgggcatgtgacctccagattctgagttgaccctcatgtgggagagagatctgtgtttgagtgaagcagccctggaaactacctccttcctgatggaaacccttgatcttctcgggattggtttctagcctcatttgccttcat

SEQ ID NO: 35152 - DNA, 1545 bp, Homo sapiens
tatcctttgatttggagtggacagagcaggtccttgcaaaggcagtgggttaaacaacgggatgtctgtgggacaggccagggaaggagggcagagacagggtctccagttcaccttgccgcagaactagcctaatcatccctgcttctggtcttggccacttggcaatcatggggaagttgactccccgcctcacttgggcttggagctggatacttgtggccacgcccaggataggttgccagagtttcattaggccgctgggtcgggctggaggcttgtgtacacctcggagcagtcgggcagcaggagggccggaagcctggttggtttgtatatgacctctcttgcccttgtgcactttccttgatttagcaaccttgacctgcactggccctcacagctgttggagggaagtagcctcttgcagggaaatattttcccctgccctggaatctcctatgtgcctgttaaagattccagggccaagaactcggcaggctgaggagcagctaggtaggtgggttatgcggttcaggactgcttctggaagggactgcctgtacttctgtaccaccgttgccctttacactttgctcagggcggggtgggggaagcattcaaacaaaacaaggaagggaactgtctggcaaagcataagtggatgcatccagagctcagtcccctttaatcttttgtctctgggcgttctgctgccttcctcataccggggactggcattccaggtcagcttggctgtggtcttagaggcagggagtgcctacccagtcctgcctcaggagcagggtgagtagctaaatacagacttaggcttttttttccccccttttaagatgcttgctcctctcccttttctttttaccaccctacctttattgttagtggttacaaagtgaccacatattatgtactttgctgtaaataaagacagacaaaaaggctctcgccttctgtgtgatgcttggcccagagcagcgaccgaatcctggctgtgtggcccaagtggctcaggaagggccatgctgtgcatgtgtggtgtagatgtcactgggcctgctgtcacgaagcctcatgatcctggggtgtatgtggggcagaccccaggcctcacctgggctcagatactggttcaggttagtggacttgcagttcttgtcaagtgggaagcccgggccagggtttctgggagcctttggttcttaggacaacctggcgctatgttcccctgattccatccagtttacctggcctctgccccattgccttccttaggctggtgacccagccccttccttgctcaaacaaacccttttaaagtaaacttttttgagggagatgggtggaagatgaggaaagtttacattataacaacacaaacagttccatgttgtccacacgcagtgaatggatgtatgtgtgtgtctatccctgtttttcaaagacctaggctacccaccaaagatagatgattggcttttgtcagggtgtggtggctcatgcctataatcccagcactttgagagg

SEQ ID NO: 35153 - DNA, 740 bp, Homo sapiens
ggcaggaatctcaaatgtcaggtattattaatactgctactacaggtaagaggagctaatatttactgaaggcttccaggcagtctactaaattcttgctatagtaaccttcaaagtaggtactatgttactcttttttttttttttttttgcataaaggagctgaggctcaggctaaatgactcgccattgtcacaaagcaaataagtggcagagatgggacaaacttaactctggcctctggctctccggtacctttgacccctcttcctggtcaaaaccaaaggcttttgcagccagtactgacccaggtcctctaacctgattctccctcccccaccatccccacagcacagggtttcctcataggtgacactagagcagaggaatgtccccaaagaaagcacagtggcagaagggcaggactctgctgctggagcagtcatttctctcatttctctcactggcgctgggcagggtaagggtgggaagatggaaggggcttcccagtttccaccaaataatgctcaaggtgtagggggaagggtcaaggtcatgaaagcggggcagagggaggcagacacaggaaaacagaaggggagaggctgaggatggagtgctctagcagcacagactttaaaatcagagtttattgttttcattaactttccactttgtgttctttgcatgccacatttcactgcatgctgagtagggcagcagatgtggggagtttccgg

SEQ ID NO: 35154 - DNA, 621 bp, Homo sapiens
caagtgtagagaacaagttagaaatctcagataagtacagggctacctgttacagaggctggagcagctgtctacagcagtaacacattgactgtgattcgcagacagtgtccttgctgtgcttatagtctattttggaaatataaaaagtctcttgctttagttacaagttaactgggaatatcacttccttttggtcacctgaagtgggggaaaagtcaaactcccaaggtcaaagtctacgtctttataacagaaaactgtcaagtggtaagtggactgggatgccctctgcatgggggtttttcaggggatccaacgaatgcaggtcatcaaagttcacagcatagttcttggcacataataagcactcagcaaatatgcattattatctaatttcctctaacatttaagaaacaactagccatagagcagcgtccctggcttcccagaggctatacttcattgcctgttccattcttattgctctctggctaaatttccatccaggtcatagagattttgcctaagagaatataagttgagttcagttaagttgtgtgatccaggctctcgaagtcacgttttctttattttaacatcagaagacatgactcagtg

SEQ ID NO: 35155 - DNA, 1646 bp, Homo sapiens
gagctggggaggggggtcaaggtggcaagcagagctgggggcccagagtccgctcccgtgccgcgcggcgagtcgcttacatgcccaggtcgctgtaggtgttgaagaactccatctgattgcacgcctgaatccagcccaccacccaggtctcgtggcgggggatggggggcatgaccacgcgggcggaggctttgaagtagggggtcttgtagcgcaggacgatgggcgaggtctcctcgatgcgcgtggggcactggtcgatggtggcgcacacatcgtacaccacgatgttctcgcgccggatccgcgccttgcaggtgatgctttggatacagcccatcctgcagcccggtgccggcacggcgcggcgtggggcagcgcgggggcccgcgcgggcagccgggggcgcccgtcacgccggcatggcgacgcgccgctcgctcccggtcagactcagctcgcacctaggagcggggagccgccgggcatccttggggaagccccctcctcttgcagccgcgcggggtccccgctgccccgacgtccgcccacgcccgccccctcgctccggcagggcgcgcggagggtgcactcctaggaggcggcgggtgccctcgccggctccagcgcccgggcggagggcagggaggggagcggcgctgcgaggaatggtgcccaccccgggccggagccccccgcccctcgccggagaggaggaggcggcagcggcggcggcatggagccgggggagggcggcggtggcagcgcccggtctgtctgcctccgcggcggcagcagcagcagccgccgccgccgccgccgctgcatgaacctctgcaccacggctgccccccgcgtgcagcgcacccagcggcgggcgagcgggcggcccaagaggcaggcggaggcagcagcggcggcggcggcgaccggagctcccgccggccccgccccgtagccggaccacaccgacactcctcggcccggctgcctcggcccggggggcgccaggaggctgtggcccggggtggagagccccaacggctggagcagcacaggacgtgctccgcggaggaaactggctgtacgccatgagttttgtccctattcggctgccgtccgggtggggggggggtaatgtgtaagggtgggggtgtttaaagggccgctagcgccggggtggggccccgcacgtggggctgaggcggggcggggccctggtaggtggtgccctggggtgggggtgggggactagggcgggcccaagcgccaccgggtgggtgaggccgagcagggcgcggcgctgtccagagtccagtggggaacccggtagcccagtaggggctgtagagtgagtgtttcgggcagcagaagggttaggggaacagctttatcagagattggtcgttattcagaatatagcttgttggattagatttaggcttgagcccttttagtatcctaccttcagaaagggtgaagggcgggctccagcagcgttactaaatgcagtgtatttgcctctttgcctgactgggtttgttctggaagctcttctttccaccactgtgtgtagtggggataccggaagaatccctccgtactccagcactaagtctctcatatgccagagttttggcaga

SEQ ID NO: 35156 - DNA, 831 bp, Homo sapiens
gtttactgcatcctccactgtgcattctaaagcattgtcctcatttgaatgtttagttctcattgaaaggcatggctcatattgctgagtttattcaagggcacatctgtggtgtgctggcaaatgatgaataacaggctctgggggcagaggatagccctgatttgtagtgtttgctgagttctaaggtgtaaatactcccaccaaggccaatttcaagctaccaaatgactcattgaacacagagttaggaagagatgcacagtagcacatcattatgcagtagtttcatcgtgcaaatacaatacatagaagtaactttataagtgttgataatagcaacatgtagtaattaggaagtaatggttttgagtttttcttgtctttggttttcatagaattggttcgtaagtttatatcatttaagaattgagcaactgccttgacaaattcttggaaacttaacaattgggtctgaccaaccaatcccagcaggctttgtctgatctaagtgacctttctcctgtgtaaatgactactttcacaatgcttctgactcttaggggaaaaaatccctgcatccagtttctggaaagctgctttcgtttactggaggcactcaataaagcaaagtcagtagaggcagtcatgattcaaagggcagaccacctgggcaaagtgttggggaggtattgggcaggtctcaccacccacattggcttctatggcaatggcccagcaagcagtgatgttgcaccatgagatgacatgtaaattatacaatacaggttcaataagtcagccccaaaattcaacttaaagaggatgtga

SEQ ID NO: 35157 - DNA, 2975 bp, Homo sapiens
tgtaattattgcttaatgcttgtctcccagctagagtattgagtttgttgggtttggacggtgccaggttaatatttgttcctttagcaatgcctggagagcagcctatactaggctcacagtaaaggtttgttgactggatgactgagggaaaagccacaaaagcaaggactggagtatgttagaacatccctacaagagtccaaaatctgaagtgacaacaatgcaggcagttttggctacatcattggcataaaaagaaaggacagcagaaagcagctccaggatttggagtgagaggtgatggtccactcccatatatgctgagcccttctgcaccttctcttctcacatgcatctgtgtttgccccaggagatgcatcagatcacactagactctttagagacacctacagagcaatgtcagccaccttctcccagtgttttactatttgccatttaaggacagcatcaggaaatggaaatctgtttatgcagcaagataggtctgtgaaggtagataattgactgactcaggcccttaaatatataattcgagaaataaatcttctgcaaatggagggtgttccgaaggctttgtatgtttcagaagggatgggcaatgtttaatttgttgtcttccatttctcatgtcctccccttgcctcaagttagcttcctgggaaattctccaaacatcagtcagaagctgtcctaaggtggcccttgggtgagcagggtagagagtgcttcagccagcaatcttttttgcttgctcactcaggtaggcatcaagccagaaagacaggttgaccccaactgtaatgagctaagccttttgtagaagcctcatcttctctgtatgttttgtagcagagatgggctagcgttttgccactactacaaatactacagccacaaaaccagaactctgataccagaaaactgctaaaatcaatagccttctttattatagagggtcagcttctggatttcctgtgcattatgcagccatgagtgaagcccagccccatcctcttccaacttccccaccatctcccaccggcacccaacatacactcaaggctctggcctccataggacaacagtgaccaccttgttgaagtatatgagctgcctttcttcacttaccttctcccccgtggaaattcttattttattcaaccgtatatcctcagggctcagaccagggattggcccattgaatatgctcaattattgcttatagaattgatgaatggataaagaacatttaaaagggagagagatagagagtaaatcccagagacagtgcagggacaagaggtttagagaattaaagaatactaaagtaagaatgtttatggagactacttagtttaacccattatttatacacataagagaactgaagcccagagagataaagagatttgtccaagaatattcatatggtcagcagttgtttacatttgaagggagtaaatgtaaatcatttaggtcttaagccaattctttcccccttccctccctgtaaccactgtttctcaatgaaggatgaaggtccatagaattaataatttcatctataccactaatatttattgagcctatatcatgtgccaggccctgttctaggatctaggaatagggaaatacacaaaaccaacaaaagcccttatgtttctggagcttacagattctggcgaaagaggtttatataaagtaaaatagacaattatatagttagaagagattgtgacatgggaaagaaaagggcgtaataagaaagaggaagagcagggggccagaaagggacttggaaagtggcatttgagaaagagcaaagacttgaaggtagagagggtgcattggcactatttaggggaaggatgcctaggtccagggaaaagcaagggcaaaagccctgagtcaggagtgtgcctggcatgtctgaggtgtggcatgttcagtgtgtgcaaggggaagaagtgaagggtgaggtcattgagagagagagagagagagagcaagagagagctagagagccagttaaactgtgaagctcctcgtgggccactgtaagcagcctgacttactctgtgagatgagaagccactgggaggctttgagcagatgagtgacttatgagttcagcaggtaactctgactgctatgttttgaagagattataggtggaaataagacgagaagtcttctcccaatggaaggtcttttctcgatcgaagggttcctggtctcacgggcttccaggaatgaagccgtgggccgcagtggcgagtgttacagctagattagagaaacccgcggacccaaagagggtgcggtggcaagatttattagagcaaaagcgaaagtaaaatgaaagcaaaagtaaagcttccacgtggtggaaggggacctggaagggctgccgtttttttgcttctgtcttatgcttatgtccccttatgacccctcgtcttttcctttttctgtcctacataactagcttattttcaatccgcttgtgggttgacgggcctgattggttaaaaacatcaggctgcagctagagcttaaactccctatatgattggttgaggtttcaatcccttagcttgcagctgtgactcattttggcttaggggaaagtccccttagggaagttcctattggcccaggaagtccagccaacttagccacttagtccctcacaaagggtgaaagcaataggcccagtaatgagactgttgtgctaattcaggagagagaagatggggcttgggcagggtggtggcagtgggggttgagaagtggtcagatgccgcatatttgtggaacagctgggaagatttgccgatagactggatgtgagatatgagagaaacaggaattaaggataattccaaggctttggcctgagcagctgttaggaattgagactggagacagttcctcccttgggagggaag

SEQ ID NO: 35158 - DNA, 533 bp, Homo sapiens
atatataatatacctaaaccaaagaataatgtaaaaactttatataactaaacagaagatggagagtggtataaacaataaatattttaggaagagataatgatggagaggaatggtgaaaaaaagctccaggaatgtggcagactacagttctctgctcccacccttgtcagagcgttatacagcccttcccttgccttgcctcctcatgggtgaagtatgcttccacgctccagtgtcaagcttggccaggtgacttgctcttgataatggaatgtgagtggaatgtgtacactataagcagccagaaattctaaatgcacatgcttagttctgttggcctttgcattcctgccctctgttataagaaaaatatgtcctagatataccacagaagctgcccttaatgagctagaaattatcaaatctactgagtcagaaggttaaaagagtatgacagaaagaaaacattttggacctggcctgagtaggtcaggagagcacagataagttgcatgctccagactccaatg

SEQ ID NO: 35159 - DNA, 2284 bp, Homo sapiens
ccacaaaaacttggaaagacaggtcttttccaacagatattcaggtctcagagacaatctgaagagtttgacggactctttccttgaccaaagtttaatcaggcttaagtcctcttcttcagcaggcctccaccctggtcccctgaccactcaccccgaacctttggcctgcccagctctattttagcaagaaccctgctaagttaggttagagagaaatcaccacccttgatatctgatcaccctggatatctgatcaaatttctcattcccccacccttgatatctgatcgccctagcctgccttcagcaagaatcctgttaagtgggttcagcaagaatccctctaggtgcttgatgtctcgtatcagtaactttccatctactgaccccttcgttctgctccttggctatacatccccagctgtccttactgtattccgtgttagacctcatctctccccccagtgtgatcatctttacacctatagcaataaccctgtataaagtcttccttactgttttaacaagtgtcagaataattttttcttcaacaagttctcaacaaaaacccatacccagaatctttttctggaatgaaaagggcttcagggcttctcaggtcacttttgttgtattgcccacagagctgagagtaaacaactcctttggacgttttggagaagaaaggtccttctatacacccacttcatccaaggaattacatgcttgggatattaagcaacagctacaaaaatcaggaagttccttctccatgtatatgacgaagttctggacaggagcccgctgccagaatacgaatactcttccccaaagacccctcctcatgcccctacacgctcttgccggtctagcctttcattgcctgaagcacggcgagaacgcctggagagctcgtccaagcaagtgcaacccgctggtgactgcaaatgagcacatggaactgtgcgcccacgctacgctcggttaaaatcaatctgggctcttcctgcctcgtccacgccgaggtcacacgcagcactggaagcggcctgcatcgggcggggcggggaaggccgagggcacggctacccaggcccgccagggactgcccggaccggccggaagccgcgcctagaggagggccccggagctcgcgcgggcgccgtcccccggcgccgccgaggcctgctgacatcagccgcgctcctcccctcgcctcccaacaccctcagctccgggccggaccctccctcctcccaccacgtgtcctccccgctccctcccgaggggccgcgcgcacgggaggacggagaggcggaaaggatggcgctgtgacagccgggccggagccctcgcgtccccaccccgcgccctggccgctgggcccggcggtgagtgcgcgcgggcgggggcggcggcggcgcggcccctcccccgggtcccgggcggctgggccgcggcagaggcgggggcgccgaggctgcgccgccgccgccgccgcctttgttgcgggcccgccggggaggcgggcggcgccggctctcgccgcccggcaggtgcgctggggccgggagggggccaggtggggaggcgggccgggcggagggggcagcggaagcgctcccggcgcggttccgcggagaaagggaaatggggcaagatggctggagaaatccgaacgcgcccgggggcgcggcggcggtggcgcaggcggggcagggcgggcggcggccctggttgcggcaccttagcgcggggaggcggcccctcccacctctgccccggagccggcagggagaccgccgccaagttcgggccccagctgcaggcatctgaagcctagacccatccatgccgcgttcgcctatcttttttggaaatatcgaaggaaccgactttgaactccagagggatcttttctttggaggttccccgatgcagccctcaagatgcatccgcactccacacctaggaattgcccgcgcccatagagggcaggagtgcggccctttgtactggccaagagtcagcgaatagagaatttgcagcccagaggcaatgggttatttccctgtcggggtgggccccagccgatttctgcacctttttgggtatccaggcataaccctcactatgtttcactgactcctgcgtttgcaaagtcccttaaggtagaatgaccctattttctgaaccagctcgtggacagaacctttgaatttggaaaatccaggcaatgggcctactgagccaaccgctccgcccatgcttaactggcttc

SEQ ID NO: 35160 - DNA, 1474 bp, Homo sapiens
tgctctttggctttggctttgactggatactgattttacccttggccattctgcacctaacctgactgtgcactaggtcccctgccataacctggatgaaggtctggctgagcgtctctgggatcctttacagcccctctaatgcatcagtcgggaatcaaaagcgtgggtcccaactctgacagtgacttttgaagagttacttgtccgcactaggtctcagtcttctcatctgtcaaatgggaataacaactgtacctatctcacatctgttgtaaggattagataatatatttagagagcttaaaatgtttaaaatgtccgctactgctatcatcactataattgtagtgttcaatgactgtgatttcaccagagggtccgtctgccttacgaaattgctgtcaaaagagcttaccaataatccgtagcagatcacaccagctcaacaggcctccacctccaggaagccctccaggggcgggccgccctgcgctatgccctctggctggacgcgtagggctccggctcactccgcccaagtcagcctcccgcatcccgcacgcccgcgctggggcccgcacctgctcagcaggcccttgggtgcgaagtgcgcttctcccgccccacccagggcagacagtcccgagcaacggcgcccgccgatgtctcccgggcgcccaggaggcccggtctctccagggcggtgagttcaggtggcccgccccgccccggccggagaaaccccgaagccccgccgccgcggactccaggctgcacaggcccccgggcgacgcgggcgtctccggggcgggctggcagcccgaggccaggagagcacccgcgtgttggcctggacgctgtgctagggcagctcttactgtttcacgttgtcccccagggcctcgcttaagttcttcttggccgcctccagctcgctcacaaaggtcgccattgctccgcgtgtctcagcccgaccgcagaccgcccggccaccgcgatcaacaacccaaaaaccaactcggcggaaggccttggctctggaagctaagccggccgccgtcagtcccgcccccaatctctcagaagtcgtttgtttggttttcggctccgcccgccttttcgcagggaaggtgcccggccaaactctgctctcttcctcccgcccctcgagtcacgtgatccgcttcaccttgtcgcgcgcccatcctaaacccgcgcgccccgcctcggctgcaacgttgctgacaggctggcgtgtcccaagctctttcattctgttaccgctggggcaattccgaattcagcctgctgttcttctgcctggaggagtaccttacccctccatttaaaaaagtaaatgcagtatcagttttactctttccttgccttatttttccccgagcactaaccgtctcatatgacatttagttgatttatcttgtaaatgttatggctcgaggacaggagttgt

SEQ ID NO: 35161 - DNA, 1298 bp, Homo sapiens
agatgcgtctcacttgtcattgggcttctcccccgccgcccccatcattctctctctctctctctcacacacacacacacaaacacatacacaaacacacacgttgccccctcccccactttccaccagaccgctaagcagctttaaacatggtcagtaaggaggaaaatgggggggcggggggcgcggtgagaacagaaccactacaggaatatacaaagttattcgtttctgttgaaaaggactcttacctgttagccagaagagagaaatccacctcagcaagaccctatccatcttccccaacttcccagccgaattacggagtgaggaaagtgggaaatggctggaacagaaggatcgctgtcaccccgcggcagcgggcggcggcggagcggcgggcaccgggcgtccctgggcgcagcgcccgccgggccggccgcgcaggcggggccgggggctggatcgcgccgccggctgagcgcgcgctgccgcgggcttccggggtccgcgcagcgctcggcggcgcatccgcatgcccaggcagcgcggcacggggcgagcgtctccccgccgcagagcccgccgcgcgggggagctcggccgccgcaccgcctcccgcgcctccgccccgccgcccgctgccgcgactgccaaagtttctcggtcacgtgctggcccccggcggcccaaaggtcagcgtggagtgattgaggccacgcggagagagggggtctctgggtggcaggcagcgagaggcgcgggggaggccgccccgcgggccgcgccgagcggggagcgaccatcgcggcttctcccagggacgcccgcgctcgggaacccgggcgagaacgctggctggggactcgagcaggggagcctgtgtctgcgggcagccacagccaacctgaacggggagagagtgacagcggcgagggtgggggacggcggggacttggcgtaacttcttacaggacttaactagcaagtcctctaggctagaatgttcgcttctgcggtacccccgcccctccgtctggtttcctttttgacagtgcaaggaaccaggcaagaggctccgcagaattgaaaaaggtaggcgggaatctcgcgtcattactttttcctgttaaaatatgaggtagaataagggcatccggccctttaacagaaaatatgtaaaaccagaatgagataaatgattataacggcttaaatccatccaacactttatagattccagcacgcattcacatggattattcctatttgtcagacggatttgtcttgtgtctcaa

SEQ ID NO: 35162 - DNA, 832 bp, Homo sapiens
cgtgagcagttaatcaagttaattatgagcagttgagccctgggagcttttactgacagtgcaacctataatttctctgaaagttacagagccagagatgaaggttactgctcttttaggagccctgtctccagtttttgcttttgtttctgtttttatttcatggttagcatcctttggagaccagaagagcattgacagccccccagatgagcagcagagcaattcttatactagtggtcaagcagcttcctacagccaaaaggctataggaagaaagggtaactggctgccctacagtttacacgatgaagctgccttgggctctgggtcttggtgatttagccagaagattgtttctcagagctcagccctacacattctcctaaaggccttcttcctggcataggtcaaagacagaacctgagagagggaaatgagccagaacaaatatgtcatctgatgacctcacccccagcaaatgggcagggaagagagctagaatgagaaggccagaacatggagcaccatgaaaagaaactgctcaagcaagagaagtggcatgtgggctttaaagaccagggttagaaaacagcagccctgacctttgtgttgaagtagcggggcgaggatctctcatagaagtgttaattctgtactccttccccaattctgagtaggtgccttttacatagagatgatcaatgtgtacttgtctaattaattacaaactgcccccagtgtattcatcttaccttttcgtcatctctccttttcttttccctgaattcattcatttattccacacatttattgaatacttactatattc

SEQ ID NO: 35163 - DNA, 404 bp, Homo sapiens
ggcgatacagcatttcttaaaaaagaactccactgttgtctctggggttttcttctaagcatatcctttctgcaagttttgatgccagttctttcttgatcttttcagaagaggtcaaaagaaagttttcagggacaaactaatatgtcctcaaataatctttaaatggtttattgactaaaatgttgaaggattgcaaatgtctggttaccatcaagattaataattaaatttgtacatggttaggcaatggcaactatttctagactgtcaaatagacattgtgcaataccttcaattgtaagatgcattctaattttggttaaaatgtcaagaaaatgtgttttataattgaagaaatacagtgttgagttcagcagagtagctatactctacaacaagac

SEQ ID NO: 35164 - DNA, 1070 bp, Homo sapiens
atttcctcagccgattgctcatgttcctctaatacactgtccccaccctggacaacctctagcaggtatatgcacacctgaagatactgagacagggagactgactagttgagattcactgaggctgatgtgtctagaaagttgctcactaagtattcccgcagggtgtttgaagcctcttcctggatgcctggtgagacgagacactttgaatccaccttgcaaagctcctgctccaagacagctgcagcttgtgctctgtagagcgatatgaaataattgcccgttggcacaataagcccatctcctctccgggcagcacaaaagaaagctcaaaagcatctccggttttgattgccaagtgggggaggcagtgaaagtacactaaattatgagtccaggtgcctctctacagaaatccacttccgcctcgctgccgctctgaaggcgcgcagtgggtgttgacgtcaccttcggccacaggagcttggagaggctggggccctgactccccgcgggatccgctggtagaccagggcgtgctctcagactggaagtgcaggaaggctcgcttactctcgccatagaccagactgacaggggtctgccaaggctgctgggaatgtgggaagtgaactttaggtggaaacagaaaagcttctctctccgtgggtagccttttttttttttttttagttcaggagagaaaaaaaaaatcatagaagcctgccaagccaaataaactatgctcaattaagtctttcaactgtgcaattcctcttgttgattttatgaggaaaagggcagaatagaaacatgatgggcttgtttaaaatacttcaaaagggaagaacctatattctcctgcttcccagaccgacctctttcgggctttcctttcctccagccatgctgcaggcctttcactgtcatctcctccatctgtgataaagctgtccacagaacccgtcctcagctgctttctcaccacacaccctcactcagggcatgtcctccatgtcatgcccctcatccaggcctgtgactcccaaggagctgaatcagccaaa

SEQ ID NO: 35165 - DNA, 3438 bp, Homo sapiens
taattgtagaaccagcagttctacccaatttaaacttcagtcatatctctcaagacagattaactagagctgattttttttaaactttgcttaccatgaaatacacctttctattcttaaaaaacaaacaaacaaacaaaaatagggctttaaaaattcgtaaaataattagacctgggactttgtccagggaatttcgccatttaagataaagaaaactcagcaacattatgtctagttaccaagaaagatatgtgcaacgcgaaacctttccccaataccatatttactctgagaaacacagcaaaataaaattcacgatgaagttacgatttcgacatttttattagtcatcagcttactgctaggttttaaaaggtgttccaaggcgggaagaaggcgcggggggaagcctcagaatatggggtctgtttcgattggggggagcggcgttagaggggcgtgaaggcagaaaggaagggtagggcggaaattagcgacttaataagacgcctagctcccgaggaagccagcctggcgttagaagcaagtagagcagaagagatttagggctaattaaaacaatcacacgacactccccctcgcgtttgccggggccgggtctcctgcactagcagagccgggggcggggattagctcggattcaaatttaaagcgggaggcccgcgtgtggctcagcaggtgcctcatgcccggctcccgtggcggtcgtttccgcccctacctgcccagagggccggaaattacctagcgaggagcggcttatccattgttgccaatgtttcaactgcgcggaaaccctgaagaaagtgcggagcacagggcacgcgggccgctcactgcccttccacgcgcccccacgtttctggccgctgcgctccttgccgtgcttttacaatgccacaggccactgggggagaccggagcgaagccaggagggaagcaaggcgggaggaaaagggagaagtgtaagaagacacaggcgcccgggatactatataatctggttctgagctagagggagcgcatgcgccggcgacacttctggcggcaggagaaaggcgcgcatgcgcagagccgagacgaaaaatgaagccacagggtgcctggctgattgagggcgctgctttagctaccgaagggccacagcgccccgaaggcgcgtgcgcagagcgcgggaagggggtggagctcttctgagggggccggggcgaacagagccggcctcgcgcgccccctggcgcgcgcccggggagaggaaggagcgggagggggcggagaggagggaggaggcaagcagggcgggaggggggaggggagccagagcgagggagggtttatcgaccgggcgattttggttaaaatattcaaaatggcggacggaggagcagcgagtcaagatgagagttcagccgcggcggcagcagcagcaggtaatcattacagcattttacatattcatattcatactcaaccccggctcccgctgcccccccccgcgacttagcataatttattagtactcaggattattataattaacggcggggagatggggggccggggagcattgagcccccgccgggcgctgagcggagggggaaagaggctcggagcggccaggcggagggggaagacaaggggcaaagggggctgcgatccactgccctcctcctgcacccggcccaccccgccgccgctcgccgtctgcccgtcggcaccggccctcctcctctgccggccgccgctgccgcctcctcgccgccgtgcccgaacccgagcgggtccgcggcggggcggcggggccggggcagagggagaggacaataaagacattttacatattcatagctgctgggccggcggggcgcagtagggcgcgggcgggcggccggggccgggcgggcgcggggtggggggcgtgaagggggatggaggcggcggcgagcacaatgccggggaggcggcggggccggagcggaccccggcggccggacacccgcacgcgtcttcccccgggagcgggcccgggcgggggggcgctgcccgccttggggggcggccctcagggcaaccgggggtgcgcgcggggagagctccctgcccgcgccccgcgcggggctgagcccgggggtcacggccccaggcacttcggcctcgccccactggtccccaatgtggtggcctgacccaagccaggcctgctctctaggtgggtaggggtgagcggtcgtgggcgctgcgaggtggcctggggcggcgggggtggggaacccgcgcaggggtctgcgtgccccccctggggggtggactggattggaaggagtccttggggcaagttccttccgaggggatgtcctctggggcggcccgcgcgcccccggccggcggtcggcagcccctttgcgttgtcggccggggcttcgcgggcgagttgggctggaggtgcctggcgtggtctgacctccgtctccctttgcccctccccgctgccccccctccgttccccccaccccctgcgcctgaccgggacgcacggggcgggtggccctccggggcctctcgctccgaggccccagaagcgcccagaggcctcccgagaacttggatgtaaagggctgccctcctgccccagaatgggctggcctgacaagttgatcgtattctcgatttcctctctcctgttgggagtcggtggggagggacggggatccccctcccttcttctgtggcggtgttttctcgctgtgtgctgggtcgtctttactctctgcttagctgaacctcttctcatttgaataatgtctaattcggggaggtttatattattgaaatggccgcctggctttccccgcctctcatgtttagtaattcagacctttaataacagccactcacagcccaacgccgtgtttatattttacattcgccccatgtgcttttgtggttcgatatgattttttttttccttggcaatccgcagggctctgagatcaaacccaggccgtgctgggaagagaggggggaagctgggccttggcttctctagcagttgcctaggcctcatgttctctgctgcttgatttatttactaataaccaaaatgactacctccaccaacttccacacactttcccctcctctgcgggcaaaacaaactctcttggggctttactagcattaaaacaggtcctagctaagtatcaactctgtgatggtttgttttctcttaaaaagactttcttatactttgcagtagtattgggcctagggggaaaaatctgtcctgtattttattttcagagcctatgaaatctattttggtttaatccaaatcactttgttttggggatgggtaccccggttgctccccacccccatgttaaatactttaaggctttgtaaaggtctgtagta

SEQ ID NO: 35166 - DNA, 741 bp, Homo sapiens
cccaggctggagtgcagtggtgcgatcttgactcactgcaagctccgcctcccaggttcatgccattctcctgcttcagcctccctagtagctgggactacaggtgcctgccaccaggcctggctaatttttggtatttttagtagagatgggttttactgtgttagccaggatggtcttgatctcctgacctcatgatctgcctgcctcgagcctcccaaagtgctgggattacaggtgtgagccaccgtgcccggcctactgtgtcttttttaaaatcttgggctttgaaataccagtgtggtaaactgctaatctgtgtttaccctgcaggtggcgctggtggttttgtggtgttcttcagcgtgactcaagtaaaattcccttcagctgggaaatcacttagatattggttctgcttgtagaatgttatctttcatgtaatctgttgaatatcagacattttcttactattatttcaagaaatacatgtagcaggaaaaaatctactaacaaattattaggatataattatattttataccttatttatctactttattattcattacaatttctgggaaaattaaatttatttcagcagttcattactttccaactcccttaaaattccaaaacttcatcaaaaaactggcagtagaactaattttttcaaattaattctctttgaagtctttcattttcctttctgtttgtgtgtctgactccccctttctttct

SEQ ID NO: 35167 - DNA, 1015 bp, Homo sapiens
atgctgtatgggaagactgatttttttaaaattataggctagaaatggtgcaggtatgcttatataactaagataactaagttgatgtgcaagacaggaaagaatggttgaaattaaaaaccataatttaatattgattttgcactaataaccagacccaattttggaaattccaacttgttcataatgtgcatatacaacaggagttttgcagagttttggcaaagtatgtggcagccacatgtcttcacagaacactgaaataatccttagtaaactctggtaactctaacttgtgaacaccaaattaataactcttaataatttaacgtatttgttattggtagtttgctttcagcttcagacaattggaactggctgaaatacaaaggagtttgcgtggctaatctgattgagaaaccagaagcttcaaggacaatagggcagggctgtgtttggactctgcacttctgtgttttgctttaccctcatggttgcaaaataactgccagcagcagccagggaaatatgcttccttgttaataatgtccagagaaaagagagtagtctcagtattctctattaaaagtaagactatatcagaaaggttcaggagctctgtccttgatttcactgcccagaattgaataaaaatttgaaatgcagttcacttctgagcaagccattagctagggggatgggattaatcattcaggccctttccttgtccttgctcttattcagctagagagagttggaatggcaaccagcatgtactactactatgtaagccctcagtcaaatgtcacaaccaacagaagcaacaattttgaatcagctctatcccactagtggcaggaagaaaatactttggcaatcactagtgtaatgagaattgggctgaggatggaccctaaggaacactaacttttaaccagtagagcaagaggccaaggtgggtggatcacttgaggtcaggagttcaagaccagccttaccaatgtggtgaaacccc

SEQ ID NO: 35168 - DNA, 1369 bp, Homo sapiens
ctttgcagtaaaaagaaacgtgcttctgatacatgcatctcctgtgaatctcaaaagcattatactacatgaaagaagacataaaagactgcatacagtatgattcaatgcacatggcattttagaaaagacaaaactaaggtacataaaacatattagtggttgccagggacggggggctaatggtggggattaactgcaaagggaacaagggaacttttgggagtgatgagaatgttctgtatctactactatctgtagtaactgctactgcaattagtagcagttgtatgactgtagttgctgaaacatatactttgcccttttaaatggtgaatttgtgaatatgctgaatgcaagagtgaggttgggattttgaaaaaagcctataccagagacttcttcctggcctccgttctctgcatatggtggcagggccgttgtggcttcatcctgactcctgctcactgaattctactctgccatttctagatctggcccagtccagcctgaggtttctggagctggggtaacttatctgtaaccaccccatctaaaggtacccaagcgatttttagtcctttattatttgagaatggggctacttcaggcccggagatgaagtaacaatgtgatagttaagactcacctgtaactgtcaaccagtttcgctgtgagaaatgtacagctacataggggtctgctatggttggtgctcgttttggctcctccaaaatggtcaggttgaaaattacgcagtgtcagcatgacatagaaatgaactttgttattgtcattgaaacaggataagagaggaacttaactccagttgtcgcctgtgtaatgcttattctgtagttttctgggacagttagttcctttggaggaagccttgactcataaggtaaaggtcaggcttatataactcatctaaatttgaagaagaaaaattcacagccacagactttatctgtaattctggtttataatcgctcacctgggctactcttcacaggaggagtcaactgagcaactaagatgcagtcaggcagtgcctcccactagtgaggtgtgttccactcagggcttgtgaatagaacagaataaccttaagtttgtgtgataagaaagtagagtattttatttttaaaaagagactataccctcatgtcccaaaataaactatacatggatttaaataatcaaatattcaacaaagaagaagctagcagattaaaaggaattttatcaatgttagaaataagtgaagctttctcagatttgaagtaacaggatatattagaaaggaaaattaaaagctcacccaaatgacaatttaaaggtttatgtaccctgaaaaataaaagga

SEQ ID NO: 35169 - DNA, 2066 bp, Homo sapiens
acatgaacccttacatcaaagaaggtgtgtgcggcaagattctggcagggcagaaagtggaggaacaggggctggcccatttagcgaagcgctttgcgcccagccctggctcagtacatttctggtgatgacttgccggggtttggaaggacctcagctatacagaactttcacgataatggtatttggtgaatatggttacatttatatatgaacacagaaaaccaactactgctggtaaatagcatgatcactattgttattatccagtgctgtaaggacgagatgctttcaccagcagccgagtgagatgaaagcgcttttccgatccaccgaatcagtcccactgcaactgtaagctggagaccctctgggccttgggagctcaggctgcctgggcaacgcaagggaggacaggggcggagggggagccaggagggccgcacctgcctcgctcgctggtcgccctcgctctgggatccgtcctgccggtcccaggctgttgagggcgcctcctcagagtccctgtggcccccgcagcttccccggaagaaacccgtgcatccatcggctagcccaagcccaagctcctcccggagctccccgagccggggccaggcctccgcccctcggtgcccgcgcctgggctcctcccgctgcgggccgcccgcccggacgcaaggcacagggggacgccccgccgagccgctgcccactgcaccgagtttttcggaggctgggagaggaaatgccacttggattttaaaaccgtcaccgatacgctataggtgaatatttcgctgggattttaaagagacgagcttcagcctgctaagccgcgctcacgccgcctctccgccctggcctccccgcgtccggcttggggccgggtccctcccgggtcaaagctacgccgggtgcactgcgggctgggcagctctcccactacgcccaaagcccaggcggccgggaccgccgtcccaaagtcacaaaccacacccgtgaaggacgccctccgcaagacagagaggaggctgggcctgggaaggaacctccggcccttcctcaccatgcagccaaggtgggctcccagccccgtgttgccgccagccgcggctcccgtgcggttacgggagcagcagccccgccccgccggcccccagctggctcctcgctcgaggtttcctgtcgagcgctgccatccagggcccgggttatcgcgcgtgatctcccatctgagctgctcacacgctgccgcccgcccccacttgcggtcccttgtccccgaaccgcacccgcccccaggcccccgcgctgagagaccagggcgtggatctgcgccgggctccggcgctgggggccgagggtctggtttttagatatcaaaggagcccgacaccagggtcccccagacaggcaaggagagggacccggcctggggcctgccttcggtggtgggcacagtggccaggatcgggcctggctccggctggcccggcacacgagcacggcgacagtggcaagactgggagggccggcgctgcctccttgggaagccccggagagacgcaaccctgagaggctgggccttcccaccccccgccccctcccccttcctcagatagcagggaggaagcgccaggggtctctccgttctcacatagggggactccaaatgtcgtcaaacctgccactctcggaatcaacagctgctttcattttgagccctgtgagcaaaagtttcagggctttcctggcacacatacccagtgcatggagagcgctaaattttatcttcccttctagagtgggacattcctgtgtggagctccgagaatacatgccggcactgcctgtgcctggggctgtgctggctcccacccagctgcaggaatgagggaccacggtacggagggaagtggctgagttgacagccactgatagagctttttcctgattgtctctggcttgagctaaccaggtggcatgacaaagtacttaacaaaaactacagatgcagagaattttggaaatttttaaaagacaggaaaaaaggtggttgaggc

SEQ ID NO: 35170 - DNA, 559 bp, Homo sapiens
tgttggccaggctggtctcaaactccggctgccccagcttcccaaagtgctgggattacaagagttagccaccatgcccagccagtttccattttgtagtttaggaaacttaaaattaagttatttttctaaggtcacaaagctggtagaatcaaaactaaaactcaagttttctgggtgctggttcacagtagtggaagaacatgagctttagaacaggttagacctaggttcaaattccaaattccatctactagctggctgtatgttttgaacaagttaataaatatctgaaatcttttgtcccacattggctaacaatgcctactgtactgtcttgttggaggaatgagtaagatgatgtaggttatgtgcctagtatatagaaggtgttgggaaatgttacatcacagagaggaggagaggactgtaaaatgtttgctggcaactgctctgggaaaaatccttccaggaatgattggaacccagcatggggaatggggtcactgtcttggtggaaagggtgggagatgaagaggaggaaagaggaggtggtgtg

SEQ ID NO: 35171 - DNA, 1077 bp, Homo sapiens
agttcggccaaagagggcaccccattcccagacacagtgattattcgggaatggctagggcccagctaggaaggacacatcctcttggtggtaagattgctggctgcaatgaaaactaacacggcagaaagaggagccaggaaatgaaagccaagttctgaataatataagatcaatgaactctttttgtttaaacaactttgacttaggtttcttgtcactagcaacagagtcccaatgcagaccattatttggtggcctgcttatattgatctgatgaaatattctgcagccattctcagccatcctcgtgaatggcttctaggaacacggttgtttatgataaagtgaaagaagcatgatacacattcattaaacagcaagatcttgactatgtttaaacatcactcccaagaaaacacacccaaaatattagcaaccatgctggttggtgaggttataaatgtcaaactttttattctccacatttcctatacaaatgtcttacaataaatcttaaagaaaaaactgaaaaatttacattttactgatttgtaccccccttaattccaaaaggaattataattaaattataattatcttctctaataatatttatagaacacttggttttgaagtgacagtttggaattcccctaggaaacactgaccaaccagcattacacaaattagagcattatttcctcagtactaaaactgaaaaacatgctcccttaaaagaaagtagtctccttttcaattactttgtgatcttcagtctaaatactactaagaagggaacatcacactagcaacctcctcagaatatctgatgcatttatttcattgaacttcgtcacatttcataaagatttttctccactcccccacatacctgtcaaggactttgaacctggactagaacacagaataaactatgattattggccatggttggtaaagacaaatggccttgaccagctgagtgcagaaggatggtcaagatagcatctgccaaacgcagctgtctggactctgtagcttcaggatcctgagctactccctctttccactttt

SEQ ID NO: 35172 - DNA, 823 bp, Homo sapiens
ccactttaagaaacttcataagtgttgctaaattcaccacagtctgcttcacctagaaaggggaacagagaagaattattttgttaaactgggttaacaaatcttaaaaattaattcattctagggaaggactagataaaatttctgatctaaattaagattttcagttcatttcaaccactagaatatactaaataaccacttgggtttgttaaaatgcagactcctgagtttcggtttcaataggttgagggtggggcctaggaatcctcattttagcaataaccctcctctccaagtatgattctgacacactgataaacgctactaggatgtagcaagaagcaggccactgccgtggctgctgttgttatctcatttaagagtatctgaaggcttaaaagacaaaaatagttgagaacagaaggggtcctgaacatcagggcagaagagcagtgattagccattgcccagtgatagtgaccacagctgggaggtgaactttccccctttctgctgccaccaaccagggaatccatctctaggtatcaagactgggcaagtctgtaatccatgaccttttgttacctgtgtgtttgctaggaaatatccggatgtgcgccagaggagataaaatgaggcttagcacaaacatgctgctgcccagacttaacagtggtcaaaagcaatgcttatgcttataagaactgcttgttgggcgggcgcggtggctcacacctataatcccagcattttgggaggccgaggcgggcagatcacgaggtcaggagattgagaccatcctggctgacatgatgaaacc

SEQ ID NO: 35173 - DNA, 1704 bp, Homo sapiens
tgtggtggtgcgtgcctgtaatcccagctactagggaggctgaggcacaagactcgcttgaacccaggaggcagaggttgcagtaagccgagatcacaccactgcactccagcctgggagacagagtgagactctgtctcaaaagaaaaatgatctattctttcattgtgaatacgatggtgttctgaaaccatctcccttcctgtaggataactacttaccttggtcacagttcctgacagcattatgtgaacacaaaggggactttgtggatcaaatccatgtttcttgcagaagttggtctgtgccaaagtcatggtcagtgtagcatatggattctcctatagagagaaaatgaagatcctctcatgtgaaatatggtttctggagaggtaataaatttcaaaagttgcatacatgatgtccctagagcttgactggtcttccacgaaacaatgaatcataaaacatcaccttccactcaggggaaaataatacttggaaagtatcctgaccactccccaaagggggtgcgggggttcatatttaaaatgaactgacttggtaaaaattatttcaatattctttttctgaaaccctgaatttattccatattcatcagaagaattataattatagtgacacccaaattcaaggctgttctataggcttcactgaaagatttaaagggttaaactctatacaaaaccattgctaaaaacaccacagttgctcaattggctaactacgcgatttaagcaagaaagtagctgaatcatgctacttggttatcttacattagcagaaactgtcatgtgatttcaaaactggagaagttgttcattcctgctttagtaacaatgagttttatcccacattcaaaaagtaacacaagtaaaattcttaatgctttcttattcagaaatcaacttcataaaaggcactgttgacagattatagcaaaattcacacatcgcattttagactatttagctctttaagctctaagtgccttgtgtggagaattttgccatttcacactgacccatcaaaacaaagagtcataaagagatttctttgaaatcatttagccaaatagtcactgtctagaaactattaggcaaggcaccacaggagaccaaagaaggggagggggacactcaggtaaactctctccctccgtgagtttataatctggttgaaaaggcagacataaacaaatgtgtatgtccagcatagaccagagtgatagaggaactgtaaggagctttataatatattcaaaaccaggatagaaggtgggaggacatattaaagggagaggagacactgactgcaaaaaacacagaactgggtgagcctaagacttgatgaacagtaccaagaaacctgatttgctggaaagaagggctttcctacgggaggagcctggggttgggagtggagagggctccaacctaagttaaggagtctagattgtaatttgtgggccaaccttaggcactgttttctaagaaccacctgcctggagagcttgataaaatgctgatttgggttaaaatgttgaaacaggcttcactcccaacccaaataactgcaatttttttttgttttttttttttgagacggagtcttgctctgtcacccaggctggagtgcagtggtgcgatctcagctcactgcaacctccaactcccaagttca

SEQ ID NO: 35174 - DNA, 1214 bp, Homo sapiens
aggcacgagaatcgcttgaacctgggaggcagaggttgcagtaagctgagatagcgccactgcactccagcctgggccacaaagtgagattctgtctcaaagggaaaaaaaaaaaaaaagagaataggagcacagttaatagagacactgggccccaagacgactgagaaccactcacggatgagaagtcctcgggctgctggcagagaatttaccccaggtgcgtggcccagtggcggaggcttgtgggaaattcctggtacccagctgcccaacatctgggacgctgcaacgcccacctacctgcctgcgcggcagagaagcaacagccgttcgagccacgctccacttcccgggaagaattctggggagagtgaaggctcgctctgtggccgccccgcccacagcccgcctggggaagccgcgggccccagctcacctgcaggttgctcacggagagctgcagcgggctcaggtagaaatagggcacgccgctgcccgcgcccgggggcccgtcgctgagcgagaggacgtcggcgaagggccggccgcgcaccgcctccagcgtggagatggtggccagagcgccccagtcggagacgtgcgtcacgaagcgggccacgcgcgccgcgtcctcgcggggtggtagcggcggcagccgggaggcctcgtcccagtccccgtggtcccggccgccgcgaccccgcgcgggcgacacgagcagcgccaacagcgtcgacgccagcagggcggcgagcagtgcgcgcgcggacccgcgggatagcccggccatggcggtgtctccaggaagagtcccgggccccaagacctgcagggacccagccggagctcggcgcgcccaggccccgccccctccgcgaggcgccaatcagagctaagcacaatgcagggggcggggtccctctgcagctccgcaacctgcaggagaagggattggttcatctgcattccaatcgctctgcctgccctctttaaggattgtgaatttgtcctaaacgggatatttgttttgttttgtttgacaggcggaaaaagaaaggcttgaagaaatcaagcaacttgcccaaatcgtactgctaggaaaagaccagcctctttacacaggcacacaccccctccttttaatacctttggagatgaatatctggcatctgagaggaaatgctgcattttctacccatgcgcctcttttc

SEQ ID NO: 35175 - DNA, 681 bp, Homo sapiens
taccaactattccaagattacttccctttagtttctcctgcaggtcctggtacttagtaatttgcctctgggtggagttctgcagatttagcaatttttcatcatttcttcccagcatgcttcaaagacatagaaagcaaaagcgaaaacaaacaaaagaagcaaaaacaaaagtgtttcatagttttaagattgtttaaaatgtgcctttctccagagttcaaaggtgcgttgtgctcctgacacatgagggcactatttctgtagtttgtaatattcatggtacagaaagaatattcatgtgggaagctaggtctgcagaaccgtggctaggaacatgcagagaaaaatggtttgctatgtgttctaggctcgccaggttttccaagtgtgacatgtcctaatgtaccctatgaacaatgccaggactctcggggctgcaacctggccttctgaccacagggttgctagctggaacttccttgaaatgaggatgacctcatctcatttagctctgcagggatagaactagtgtattaaaacaccagctttggagactgactgagaatgaaagatgaatgacctagagcaagctgcttaaccttttcttgctctaatgatggaggtattgctgagcacagtggctcacgcctgtaatcccagcactttgagaggccaagg

SEQ ID NO: 35176 - DNA, 3156 bp, Homo sapiens
gaggaagagagagagaaaagagcagagaagcgggtgcacgtgggaagctctcggttagcaggtgacagggcaaaagcaccaccaggacctggaagaacgtctgaccaggctacagagcaatggatttctcttacgctgaactgaaagtagcctaagaatgcaagagtgttttagaaataagggacgtctgcaacttggccacagactgcaaggagccggagtgcagagtggcgggctggggtcgtgaagtggggggaagcggtgagagcagtccggaaagcaggcaagacgagctagaccccaggccgggaaaccacaccggcgggagaccccgcactcggactcccgctcctctgagcagaagagcagtagggcaggcccacattttctgctggacgggagggagaagacccggcccactgccactgccctctcttctccaagctaccgaggtaccaatcttctccccaactctccagtccctttcacacgccccagcccccagttgtcccaccctccaggacctcgggagttcctagaccagcgccaccgccagctcctagcccagtggatttatgtgagcgacttaacatctctgagcctcagtttcctcatctgcaaatggagatacaatggcacctaggggattattacgaatatcaggtgagttcaatacaagcaaagggcttaaaagagtgcactatccccaaatgaaggttcggggagttaacttaatattcactcctatgggatttcgtctcccaccacccctttcttagccaggattcgggtattcccttccctcgctcggactccccgtcttcattcaccgacccactcgcggagcgagcaggcccagctctgcgtgcactgacgggctgggcgcgggcggggcgccgccgggacttggcaccgggctgcgtcctgaggcgccctgccccgccccgcactttcctcagcccgggctcccgggcgcccgccaacactgcgagtggaacagccggggcgagcccgtaagccggaaggcggcttccgggagcgcgtgcgaacgtggaggccacgccggcgatggggggttggaacggccggaccaggcaaaagccggtccctccctgctcctccacgctgtggggcagtaagcgctccggacccgaggcttagggaatcagaggacacgcagtataagggtcgcaggtcgtggttgctcggaacacgaggtgagaggcggaacaaggctgaagggaagctctgggagtgcccttgccgagagcggctcgttggtctaggggtatgattctcgcttcgggtgcgagaggtcccgggttcaaatcccggacgagcccaggcttttacccaccccacacccgaaatttaaaaacagattttttccccctaattccccacatattccattcagaaacttaaatgaaaacatactggtcccatgagctcgaatgttgatcccctttgttttttgaagcgagggaccatgtgagctcaattaatacaacatatggttactgtacgcccaaaggcaacgcattcaaattgctttgtaccatgtaaaacacacactcttgaaaaacagacgcctagtgcggaatcctgtgcacgcctttaactcctccaaacgagcagggggcgtcatggattagcatgtcccggggttcgggaatcagcatttccgaggaaaggggcgctcaggagatatccccacccccgatgaggggcactgtcgtggatgagtttaaaccacgccataggcagccaagaactgagctcccgatggccctgtacacgcgctgcacccaggaatagacagctagggacaatgttttcatagtacaatactacattactagcaaactttttacattttcaaaatgaggccttttaatggtatttcaatgtagagtgtgctctaagtttccaaaaatctcaattttgtgttttactctgaccaacctgtatttattacgtttagtaatctatccccaaaaaaactcacctttaagtgattcttactccaaaacagggctcgtccgggatttgaacccgggacctctcgcaccctaagcgagaatcatacccctagaccaacgagccgacacaaactccaccttactgtcatcagaaaggaacacatagctatttagtcctgcgccctcaagtggttgctcgcatgttaggattcgatctttgggttgtgtttgctttctatagataccgcgttttcaattttctttcttttctgttttgctctttgaaaatcagtaacacagaagacagcaaaattgtcactatcagtataatatcgacctcttatttcgaaaattgtaattgtatttctattcatggctaataaatggctattagtgtgggacaatgtcactgtggcagattccagactctctccgttactgagtgagttctggatgtttcattcgttctttttcgcacttttctataatgttaaaatctcggtttcttgccgatattttttattgtaatattcaaagccctacctatctagccttgtgaattcccatctctgtttttactcgaagtgttctcttcagctggaaaacctgtttgcttttggacaaatcccaaactctaaccttcccagaaaaagatcctttaacatatcaaaaccaatagtatgtggtaaataactgggtttcagtcttatctcctccaactgtaacttcttagagcgcaagacacctacaccaacacgaaattctactgtagaattggcaaccaattgtgtgattgctgttcgattgtcccaatatctttaattagatatagtaagcatggcttcttaactatattttaaattctttttcctttctttctttttttttttttttttttgagacgttgtctcgcttcgctctttcgccaggctggagagaagtggtgtgatctcggctcactgcaacctccgccccctccgccctccaggttcaagcgattctccgcctcccgagtagctgggattacaggcacctgccaccatgcccagctaatttttgtatttttagtagaggcgggtttcaccatgttggccaggctggtctccaactcctgacctcagttgatccaccctcctcggcctcccaaagtacaagcgtgagccactgcgcccgg

SEQ ID NO: 35177 - DNA, 2454 bp, Homo sapiens
cttatgatttcgctgtactgcaatgttagctgaaacagcacagatatcaggaatggcattgttaagactgaccttagacaaaaaccctgaagtgagaggttacattttgggttctcaccatactcttcccccgctcttgtcctaattgtctaaagcttgcttcccttcctcatcgtatcagcctcccacctgaatcttcccttttcctccttcacactcatctttcttgtgcccctgtcccccatttttcccttttgtaagccattttcataaggatccttccaaatatttcccctattgattggacaacccgtaggtggcagactgttctgggccaaggcaaccaagttgagcagggccagcaatcagtgtcgggaacttctgcagggcacttcagaatcagtgttgggaacttctgctttctatttttcacggacacagacaggaacacagatatgcgaaagcaaaacaatcaaaaagcattttcatttgtttttcaggtagtaggaaagagttccagattcccatccttctgaagccaggagggaggttcctaagaggaggttagggcaagatggagacttctttttaaactagtagatttcgcaaattgcaacacatacattatctagtccacgcaaaggacaggccttggggacacggcacggggaacgtgttccacctggacgactgaatcagaagtctctcccccatcaattgaacgcctcattatttttctttctgtcttttctttctttttaaggtaaatgaattgcttctttttcgttaggtgaggccggcagagaacaagaagagctgaaacggaggcgaggttagtacccagcaaagacctgtggcgaggagagacaatgaagaggaccacgggactggaccctgagaaaggcagaggagacgctggctggtggggcccgcaggcggacagccacgcaggcaggcggaaggctcggctcggcctgggaccgctgcagacccggcctccgcgcggggccgaggcgcctgggtgggaccgaggaggcggggccttcccggcggacggatgatggacagcctgactctccaatcgcgtccttaaaagggtgcgggcaggccaatgagcggacagcgagggccggagtggggctgaggcttcggtgcagagctggagagccgcggctgggaccggagtggggagcgcggcgtggaggtgccacccggcgcgggtggcggagagatcagaagcctcttccccaagccgagccaacctcagcggggacccgggctcagggacgcggcggcggcggcggcgactgcagtggctggacgatggcagcgtccgccggagccggggcggtgattgcagccccagacagccggcgctggctgtggtcggtgctggcggcggcgcttgggctctgtaagtgatgccaggaccagggctggggccggggagtggggcccccgggcccgacacacgcccatcgcggcggtcgcaggccaggcgcgcgcactgagagccgaggtggggagggggcgcggcctgcgctctctggggccgaggggacccagcccatggggaacgcgggcctccgcgactggccgggaaggcgcagagcctctttcttctctttcctggatcctggagtgcggaggaggaggggagagtgctttaccttgctccttcccggggggcggtccaggggagcggacccggcgggcggctgcggtgagccctcgcggcgcaccctgccctctcctcgtggtgactctggatcgtctaggccctcccggattctgactcaggaactagggttctggcgttcttcacctttgggaggtggcggaaagttgcaggtttttcatttgtagggcctttgttgatttgtttcctgttaagccagggttttgttgtaagttccctttcccatgctctcattcagttttaagtctccgtaataaaagagtctcatttccgtggtctgcaaaacgccaataaaaaaatattgttacttctaggttagaatgcaaagagcttggaataccagtgagatggcctggcttaaaagaatttggtcaaatccatcataattccagacgtagccaccataatttgacaagacatagagcattaaaaagcataattttcctaaaggaaaaaaaaagctcctttttcttaccaaatattgtgactcaagcttaaggtaaacctcgggctcaatttatgggaattggatgacttgttttatggacatctgaagtggtatctgccacaggacttttctgtgttgttgttcaaagcaaagtacttgttgctgtctccgaatttagttaaataatagttataaagagggccagctgctaagaaaccacgtagatttttttcattccctttgttttcaaaatgtcagttatgatttagcatcacagtatctgaataccagagtttactcagtaatt

SEQ ID NO: 35178 - DNA, 1312 bp, Homo sapiens
ttgagtcttctcagtataccagataaaattcaagtgcatctttcataaaatattccctgacctcttcatttttcaaattttgactttaattagctacatatagtctatttgctacttcagggggatggtttagtaggaacttaccttagggaagataaggtggcataaataacaataagatacagaccaggcagtgctgactccctgcttggagggccattttcccatgccctgcactgtgccataccctgcacactgtaggacacaaagtttgttgtacacattcttgtgtatatttccatgtacagtatctaatgagactcatcccactcagaacttaggacttattatatattcaataaatgaattgttcagttgatactgtcttttaaaaattctgataaagccagcatctcaataggaagcaggggcagatgtttccattcctccctcatattttactttctgttcaagggtgagtgtttacactttgaactctttctggcagtgatgaatcagtgctgattaatcaatactcttttgccagatttttctaggagccagagagagcttgactggggtcaggcatccatttaagggcaggttggtttccttattttaggaaaaaaaatagtgcttatatgtttcattaatcataacttcactttacaggaatccaaaaaatttagtgttatctgttcactccttttgaagtgttctttgagagctctctgaccaccaggaagtgtagtaggtgctaggcacactgaagccaagtaaggtgtagttccatggctcaaggagttgtgagtctaacaggggagctgaagttaattgcaagggagattgtgcttttcactgaaaggtgtgtcttcggtagactacagccatagagtcgtgtgagaattactgaagagtgtggcagaagaaaaggtggtaagatcagggagggctttaccaaagtcacgttcaggtggagtcttgaaattctgtaagctttcagaggtgggccttgttccaagctgtgtgagtatagccctgaggtaagctggctgcgtggcatgttgaaggaagtgagagcaagctgataccagctcgccaccaacagcctttgccaaatgtaaagcaggaaaaggagggttactttgaaaagcctagtgtgccatgctgagaatgatggactttatgaagcaatggaggagcttttaaatgtgttttcaataagaaattgtcatggacaaatcagcattgaattcagatctcattaaaaacgtgtccaaaggataactcgacagtaaacatatctcgaaag

SEQ ID NO: 35179 - DNA, 693 bp, Homo sapiens
ttttacaaaatctcgtccatgatcttgccggcccagcagaatcccagatgtttgtctataacgcgtctggatgttcctatctgagaaaaagccttagtcttttacttgtaagctattcctgaagaaggttgcctcagcaggggaaaactttctgaaaagcttgatcaagtacctgggtcccaagaatgtcaagcatctgtggaacacacagttcccagcagccagcaagtcccacactgctcagtgtcctgcagccaaggaagctgaactgagctcatggggttacaggaagatgaaacaacactgcctcactggcaaggagatcacactgctgagtgctgcctgagtccctctgacacaccaggctcttggagaggaggtcgtggtaatcatttaatgctgactaattgaggttgagcaagagagaaaaatacccgagggagatacatgaaataaacttaggaggagagcttgtacttggctggaaataactggccttcttccatatcctctctaaaaaataccataagagaaagtaaaaaatttgtggtttctattgtaaattgtgttgattcaaattaatttcaagcttttagattgtagttctatggctacccatcacacctcctcctcccatcagtaggcatgccattaaagtcacggcaaaatgcaggttcttctggtagaggcaga

SEQ ID NO: 35180 - DNA, 1370 bp, Homo sapiens
caggcacactggtcttagtgcgagaaatagagaatgagaacaatacctttacccttgagttgacaggcatgggggttgtgacagaaataaatattttaaaaagatcatcactttttcattcctgttcctgaagccttcgtggattatttatgtctgccttctcctaaaaataattctatccaggatgccccgaggatgtcatgctggaagcttcctgtaggtaacgaggggcgccgcagtggtgctaagtgctgaggctgcaggtctgaagacaaaagcctccagagcgtgaccaggaatggttcgtttggctgcagccacagtaaggagccagtgctgccacctgctggccaagagcaggttcgcccacacccattctgttgttaggaggctgaatcacagccagatggaggagggaagggattttatcacaactcgcttagtttagagatgaggaaactgatgaaaaagggacttgcccaaggtcacgtaactggtttgtggcatagtcagaaccggaaccaagtacagggttcctgcaaaacctgatgcacgctcctctggattcaggcacatggaacttaaccttcaaattgcagtatggtcttttctcgctttttcctttctctcttccctcccccctttccctcccctcctctcctttctcctccccctccctcctctctccttccttccccctccccccatccctcccctctcctccccttcccatctctcctcccctctcctctttttttttttttttgaaaccagttctcatcactgcacttccaggacaggggaagcactggggaatgaggcatcctagctctgtggagggaaagggagctggtcaacatatgctttaggtatttgtgggtttgtttttaattaataaactttatttatagagcagttttagactcatagcaaaattgaatgaaaggtagagaattcccatatagcccctgatcctacatactcacaacctcacctgctaacagcattccccactacagcagttcatgtgatacaattgatgaacccacactgacacggcattttgacccaaagtccatagtttacattaagagtcactctgctgttacacattctatgggtttgaacagatgtataatgatgtgaatcctccttcagagtaatgtacagaatagtttcattgccctaaaactcccctaggttcctcctgttcatctctcctcctcccaccccactggcaaccactgtctccatagttttgccttttccagaaggtcacatagttggaaccatagagcatgtggccttttcagactggctttcactcagtaatgtgcatttaaggttcttctctgtttttttcatggctt

SEQ ID NO: 35181 - DNA, 854 bp, Homo sapiens
ccgcgcccggcatgattttctaatagccaaatatttaaagccaaatcggatcaacagtaggcaaaacatcttctccaggccatcaacttcatcttcatctgtgctgtattcttccattgttttgccactaacaaagtggatgactctccttgggactttcttcttttttcctatgactcccagttctacgtttcaaagcctctttcgttactcatccttgagataaaatttggctatggttgtcctgacatcaacgtttccttttggaccatgactcagctttttggatcccttaatttcctgccccgcagattccccgaatgccgcggcggccgcagctcccgaggctgcgacggcttctcctcgttccacagggcccactgggtcctggtccatcgtcgtcgccaccacagggctgctggcgccgcagcgccggccgcctagccaagtctctgggaaggggactagccggccttgaggggcggggccggccagaggggcggggccagcccgcgcctcgcctagcccgcctggctcagcaccccgagagctggccgactgccctccaggtgatttttatgcccactaaagtctgagcagcattggcctaggacacagctgtttaaaaaattctcctgctgagatagacaagaaaaataaatttggatgatttctggactttagattccttaacctttaactcacattggtaagttatttgattttgaactttaattggcaagagtaatcaatttttggattttaatttctcctcattaattttaataataagaggggatttcttgccaggtgcagtggctcatgcctgtaatcccagcatttgggaaggctga

SEQ ID NO: 35182 - DNA, 1002 bp, Homo sapiens
ggctcatctagcagcacacctttcttccactttcataccctcaaagcacagcttttttaattgtccatatcccagggacagttctgcttatagtcaatctgcaacttaaccacaatgttttctactaggcagagccacaggaagagaagtctctcttctatcactgaacttcgccgcacttgctcaactccaacctttaccttcagtgatccctcatcctgggttaggagggtgttgggtaaagaaagtgagggtcaatgacagcctttaaaactattcccctctgctcctggatgaaccggcagacccttctggttccttaagcaaggtcgctagcccctcaaaaggcctcaatccccaaattccatatcctcagttacccataaagaagcctaatcatttcctcctcaagctcaccagcctgggctcctcccagaggagctgccctggactaaagcctctgtagcctaacccagactgaccccatcccaatctccagcccaggagctttatgaaaccagcgtgcccagtgactcttctggcagggggcctctgttacaggctggcagaactttctgtaagtagcagcatcacacccaccttaactgctctctgatctggaacactctcaatttcaatcatgctccggtcacagagctgccagcagtttggtgacagaataacatcattcatctgagccatgttctgggcaaggcgcacatcgtccactgcctgaccaatcaccagaaagtggctgtgtgtttcatctccaaagaccaacatgctgatgtggccagcagccagtcctggcaagaaggcaaggaataggtttgcacaagaagttctggattatttcccagcagcacaggtttttggaaaaaccataatcttggtgggactatactatctcagagcaaaatctcacttctaaaactttacataggaattatggcatacctcttttgggctcgggccttccaaagctccccttcttccaaagct

SEQ ID NO: 35183 - DNA, 1335 bp, Homo sapiens
tcattccgtggtaacaaaaacacacacatttcaaacacttctgaagaggtggcaagtttattagtaagatgtaaacatcatctagggagatcatttcctgaggtcaattttgactgggatgtgtatggggcttggggctggagaggatgagtcagtgaagttggggcagagatactggagcaaagaatgggacttgagcatgttaaagatatgcctatgactggcagtcctgagtaagggaggatgagagagagccagggccacaagctatttcctccctcttgtgttctcagtggagcacatctgctgtgacagcccaagggctccagaatggcctccctactctgcaatcaagctctgcatgtgaattcccacgcgagcctgttgctcatccacattaaacaaacatcccttttgcacttgcctgaaatatcaacaaacatcaggactccgtcaaaataatccataaagggtcgctctggggagaaatgtccatagacaatgaggtctggtaaatgagctgctattctgactatgggccagtcctggaattcttcttttggagtgttcatgttcaagacaaatgttcaggattttatggtgacaggaagcagtctccaaataggtcttctaaaaagaaaattgaaatagaggaaatctgatatattcatttgctcattttcctattgctctttctccatttgttttgttctaacctgcggcctgcttatagtggtgaaaatgccagagttgttgagccacacttcaaaagggccaatttctatacagaggaagaaccctcccaccctgaacagctgttgcataagtgagctccattacaaagaggctggggtgaaagagggtagctgaacggctcaactcatttgcaggaaggggtaggccctcgcagggcaagtccagttgtagtgggctgttaagctctattcactcaggccagacttctttttcttctgtcctcatgtttccttttaccctctctctaccttggtcttttacttttttctctctttaaaaaaaaaaaaagtgtagatgtgattcgtgtgtgtgagtgtatttatatgtaagtgagtattagagttttgtatataggcaagagattaagactataaaggtataatgttaaataaatggaagaaaagagttcagaaatgtgtgtgtgtgtgtgtgtgtgtggcagctggaaagatggaagaccttaagctgtaaatggaaggaaatgctgaaatttcaatttgttgcccagttagttctgagaaaactaggatttcctaaggccttcctgtagctgctggggcagattaaatgctcatgcct

SEQ ID NO: 35184 - DNA, 806 bp, Homo sapiens
aatctattatgaccctttcacgtggaacccctcacagctctaagcccttaaaagggccaggaactgtttctttggggacctcagttcttgagatgcaagtctgccaatgctcccagccgaataaagcctcttccttctttaacccgggtgtctaaggggttttgtctgtggctcgtcctgctacaatggtatctgtggttttgtgtttccttgttggtactaaggagattaagcaccttttcatatgttaactagctatttggatgcaatgcaattttaagatacataaaagtgttcaaatctaatccagaggactgaagttcattgacctctttaaaattcattgactctggaatgtgaggaatgatggcagagactggaaataagtcagaaaattatgacattttggttaaaattgtagttgtcttcaaatatttgggctgaactgtgaaagttgtggggtaagtggtggacgtgggctaagtgggggacatgggtgtgtatgcaaggtgtaatgtgggaccctgcaatcaaagaacaacttccctaccttctccttgaggtagaaatttggtttgggttagcaagattaaagttcatgggaagtatgcagtgggaaaggaaagttggtgtgtttttcttcagtggagggagctagttatcaaagaataagtgactgtaaacagtatgttccgtaggcatgggtgctctgaagtggcttccacagatgtgctgagtagccagagaactaagataggactgagcagaactgagcagggcgtagctctattcttccctctcctgcc

SEQ ID NO: 35185 - DNA, 960 bp, Homo sapiens
cacgtgagaaactgcagaaaagaggcaaataaagaaagtaagctagaaagacagagcatccaggttgagaaggtgaggcaatatttaagccttcaagcttctaagctcatgtaagggactgacacagaggtatacacaaacttgaaccctgacttctagccccaggcttcccactcctctgcaatagctgtcttctttcctgacggtcgccctcatcttcagctctgcaatcaatctttctgctgagactcttacttccacatacctccacttcatccagggctgaggaaaagccagacctcagttagggactaggtcttttaagactgcagaagacaggagaggaggccgggtgacattattctgaagacagctgaagcgccatgtctgtctatagctgacccataaaatgacagttttgtctaaaagccgttttccaggccacaccctcatcagtagctcattgttccacgggcaccgaccatgtttctgattgggtggcactgccgtcccctcccccaccaacctgagtggcctactactgtacaaggaaggactggctgtttcaggttctcttatccgcacatttgaggcaagggtcaggggagactgacatgaccccagagtagtttacacaattcttcccttggccatgtggaggatggttgaaattaggcaatagttggtaggtgatcatcagaagtatctccagagcaagcaaacacctaattttagtcaatagtggttacagcttgtaccaggactatgaaatttaccagttataataaattcaatacttaccttcagatatatttgtgaggtaaatttttgtttgaagaattatatacctgccctttctgactggtcaagtgcacgcttttaatcaaatttatcccaaagataacttgaaatccaatgggcactggatttgagttttctttatctgatgtgacactggaa

SEQ ID NO: 35186 - DNA, 1144 bp, Homo sapiens
atgaaacttctgagaaacaagaaaggaggactgcctatgattgtatctaaatgctacaacaaatttgactgacaagaggggcttaggagaccccgcacagaagaggttttaatgaaaaggaagtgaaacaccaagctcacataaatttttaataaacttttttgtgtctatgtcatatttcataatgtttttcctaaatgcttaacctaggaaacacatgtgtgcacacccatgccaaacacacaaatgaatttaacagtgtggtttatgaaatgaaagcaataatagtttgactcttcagaacctcttcattgtggcctatgtcaagctctctaatcttttctcctcaatggtaggccatggttaagggacagatgataaagtacaaggttttcaattgctaactgccaaattttcataggttatagtattactcaaaaagttgttttgtctcatttcttcaaattttgaaataacttgctttgctgactcatctgactatatttttaatgaggactggctttattagcacttttagaaaaaaagctctgcactccacactgaaagtcaaatcaaatagatagttaattatttgtagcgtggagtaatgtatgctcagtctctcctcacaacggagccaaaggtcacaaacatttacagaaaacctacttatgtcccaggtactctgctaggtactttcctaacttgtctaaagtcacagcataggctgggtatggtggctcatgcctgtattccagcactttgacaggacgaggcgggcagatcacctgagcccaggagttcgagaccagcctgggcaacatgacaaaaccctacctctacaaaaatacaaaaattagctgggtgtggtggtgtgtgcctgtagtcccagctgctcgggaggctgaggcaggaggatcacttgagcccaggaggtagggtttgcagtgagccgagattgtgccactgcactccagcctgggccacagagcgagaccctgtctcaaaaaaaaaaaaaaaaaaaaagtcacaacagataagtcatagagctgggattcaaattcaggtctgtctgaatatagagtattttctgctacattatcagttactgagggtaattgaaaaatttaacacttatcatgga

SEQ ID NO: 35187 - DNA, 765 bp, Homo sapiens
cacatctttttctctctacaagatagaaaataatttagtttcttctttggttaaggttggaattgaagacatttttacgaagggaaaaaggggaatataaaagaaaacatgaagccactgagtttcagaatatataatcctaatttaactaaatattagccaagtcagcggttctcaaccaggagtgtccccccaggggcatttttagttgccccaactgtggtgccccaactgctgcagatgctgctgctgctgccgctgctgctgccgtctagtgggtagaggcctgggatgctgttaaacatcctccaatgcgcaggacagccgctcccagaaagtagagggttaagaaatcctggcctagggcgactgataagctaggcaaacattcaactagtttcatgctattttatggctcttcagttcatgctgtcccttctcaatatcctgcttagtctttacctaactcctatccatcagaaactcatctcaggttgcatctcctcaaggaagccttaaaaaacaaacaaaaaaactccaggttaggctaaattgctccttctcttaactaccaaagcagcctgtatattcttctatcattttctgttaaaatgattatttatgcatctgtcacattaacccgaagacaaggtccttttcttaatcttccttgacaaataataggtatgtgccaacagaactgaattggatccaccatgttcaggatagatgctaatcaaagatattcaaactttctgtctgacc

SEQ ID NO: 35188 - DNA, 321 bp, Homo sapiens
ttctgctgtaatagatatccttactctgtatgttgctcaaattttagaactgacagttattgagagtctaagtgcaaacgctgtgctacatgttttagagacattagatcatctgattttcacaacaatcctgaaatgattacaattactcccattttatagatgagataactaaggcaggaatttagggtcaaggtcacacagccaagactgaaacgtaggtctatttcccttcaaagcctagctccttttactacactgaaaaagggggttaaaataactgaacgaatccaaggattttcaggtgaaatgcacatcctg

SEQ ID NO: 35189 - DNA, 3491 bp, Homo sapiens
aaaacacagcataattccaaaaaaattgaatgttaaaagaactaaaaggcaaataaacaaaaactttttaaatcagtaacaaactgtccttaatgatcagttttataatgggttcaatgttgcagtaaataatattaagggttagagtataatccagatgttcaattcattccattatcaaactggaaatcagatttagtaaccagttcagactccagagagctggttcataatcagataatgggggaactagacaactttcctaatgataccaactacagaatacagattttaactatgtaggagaataaaagccacttttcgggtagcacttcagtctttcaatttacaacacattttctagtttgccaagtcttaggcttgaaacagacctcagaatatatctgatgttagcccctagcaaataagtattattacaactcactttatagaagaggtaacagaattctagatctttaataaagggattggaatctttcagtttcttacagttttttttttcaaccacaagaacacagttttccagtaggcaaagagagatgtaacgtttactgagcatttacaaagagtcaagcacatatgttatctgtcattctcatagaccgcgtattacacaaacagagatctaggcttttgctcaaggtcacaactataagtggtagaagagaatgatatccaggtctgtccacacaaaaagctctgggtagagcttgttcaacaatttcataaataaggatagacttaaaaaaacacactggacctatgggatgagaaatgacactgactcaagcctggatgaagtaaagcatgcagtttgggggagggctcagtctgcaggcctctgccagcagcagctgaagaaagtgacctttactccaaaccctacagtgcgacaaaccacccatccagctctgcctagagtgggttaatatgccacaattcgaaaagagaaagagaatgagtgtttcatggtggccccagacagtttggtggccgcagaagttgagaaggctcaaatctggagatcaggtttgggttggagtcgtgcgtaagggagcggatgtcacataggtggggaagggagctgacttgagatacgttggcttaggaagagatgttgcaggagagagggtgaaatgcacaggctaggagagtagacggcttcacttgaagggaagggattggggctgtggatgcctctagaggcagttgtcagagggcctctaaaaggtccattttagaggaagcgagaaggaaggtctcgataaggagccattcagggtccattacctgctggatggttgtacaacggcctcaatttctcgggcagcatcagctccactttatcgaggagccggtggtaggtggcccgcaggcctcgggcaccggcggccgacatcgccgccgagggatcgttggcagccgggtgggagcgtggctgtgttctcgtccctggctgacaacgaaggggagctagtcacttttcctgccacgacgactcgcgtccgcctctcgcctggagtacccttcccgcggctttccctgcccgctgtgaaccgaaaagctgcggcccgcgccccgcgaaggttgagggggcggaggctgccgactgccagcccccggtccgcctccggcccccggcaggagagagggaggagccatggcaacaggtgccaaaataatcacctcaccaagtctgcgctgcgccctgctggcagcgcgcttgcgcaggccgagctgcccgccatgattggcccgccccgaggcgcgggcggggtcgagcggaaacctcctccttctccccatgccctcgaggccatgttggagaagggaaagtgaagctgcgctggttctactgccctttcactttgattaagcaggcccgtagttaaaatgggtttttgggccttcagtgcctaaagatgatgccgcacaattctcttgcttcttttcactggagactcgtgagcgagagactacagaattgagtagcttctctctctactcgtcttttatccctagcgacttaaggatctggttagagtggcccgaatgcattcttccagggtgagggcagccgcagcacacaccagcctcagtccccagggtggtcgtcatctcgcgagaaagggttggcggggagggtatccaggacgaggagagggaggagtcgccatcgcctccgcctccgcctcctcctgttggaggggggctgagggaggagactgttgctgatctttggatgttctggttagtctaagaaggagagtatgaggcgagctccggcccgggtgcggccgggcttcaggggcccaggcgccgctgctgccaccgccatctaacgctgcgccctggaggcccggcgcgcggatggtgccggtgcggctcgggtgttgaaacgggtgtcccctccccctcctcccctcccccacgcggtggtctcccctcccacccggctcaggcagagccatgtctcggggtggctcctacccacacctgttgtgggacgtgaggaaaaggtccctcgggctggaggacccgtcccggctgcggagtcgatacctgggtgagcgggggccccggggcggaggcgctgaggtcgccgcctagagtgggggagggggcacgctgccgggtctgttggaggtgggacggcgtctcggtgggggcgcccggagactctggggtgttgggtggggccttggttgccgaattccgtgccggtgcctcccccagtcaagccccctgtgcatgctgccagccgccgcccttgctgggtttttctcggagggccgggccgtgggcagaaggtactggcttgtaaaggtgttggggtcgctgatgggttgggactcgggagacttgcggaacctccaggagctgccgcgtttagagcaaaagttagctcttttgctcttttccagcgcgctttccccgctcagccgaagaacctaagttgttgcccaccctctccttcaatctccagagggtttaggtgtcggctgcgacgcgttgaccaccctcagggacttcacgctccagacagaatccgtgtaaactgtttttgcggcgctgagccaaaacctaaaagtgatagctgagctctccccacccccgcgcgctctcccagttccactctgctcttcagttcgttttgaccgcttaaaggtggtgtagggtttcacgttcctcttcccacccctggaaaacacacttggcatttacagtttcgtagttaagctttctaaaaacaaccttcagtacttgggggaacagtattccacttttttcgttttgcataacattttttttttgaggattctaggtcacgcccgagtcaactaaaaagtttggtttcttaaaaatggacgtacttagtaaaggtcttttttgtttcttcctgtatactcttcattactctttctttctatttggagatacggcaaacaacatcataaaatttttttctt

SEQ ID NO: 35190 - DNA, 1127 bp, Homo sapiens
tagaaaaaaatattttaaattatttttaaggagaatatacttgatagcaaaatgtttatcttaactttgtagatgtacagcagcagcaagaaagatcaacagtgctaacacttgcagaaaaggcgattaaaataatagaaaatatgatgataaatttccaagagactaaatgtgtatgtccatggatcaatagaagttttacgtattaccatttactcttcatatatggacagcaatccctttctgtcccaattgtgcctctttcacagttacatactagtgatttataacagtaaccttaggtatattttacaaaataaatataagtgggaaaaagataagttaaagtagttgtatatattgaaaagtaggtgaatgaattactttcacaagactactagaagataatgaatttattatttataaaaggggaaaagtagaaataaggtatctttgacagtacacagctgtagaaaaatgtttgctttaacctgtttaagcttctttcctcaacatgtttttcactttggcttttttattttataatgtcctgtgttattcactttgaactttggcttgtaaaagtcttttgaaattaaccattgatttttattttcagtgaccttttggtattggctcaatgcctattaatacgttttaaaggttactaataacagtgattttggaattcctacgagatacaaaactatattcattcctcataatttcaggtgtagagggctgtaaaattagaaatcaggattactttataaatatactttgagatttttatccttgcagtgtatttatttgaattaggaaattgatgaagaagggtatgatggctaataaaatgatttttgagtttattctggttaaaaacatgaaatctgctctgtcattttgttactgctatgcaaatttccccttgaaatacatgggtaagtaaagttatagtcaaactgtgattgttacataatgaaagagttggaagtccatagacattttaagtgggccaactagttttgataccatggaatacttagccaaaagatatttatataatcagagtgaatgaggctgagtcatgaacatttttttttctgggagacttttccttggtcttg

SEQ ID NO: 35191 - DNA, 2099 bp, Homo sapiens
tgcaaatggagatttagcactaagtcagctgtgttgttttcactatactgggtgcctacatagcaactagaccatggaaagtcttcgcatatctacgaggatgcaatttttgataggagttggtcatagtcaagagtggctagatggccacttctaaatcttgttggtgctggatttcctaaactctgtgggattacttctttttttgacctcaaaacagaaaaatttcctctgtaacacgattcactaacacatgaggtaatcacactgctttgaggtctgtaaggatcaagttggaaccgtcatccccttccctggcagtccctaaaatccttcgagatgacgtcacccaacgagttcaagagggcggtgcgttcctaaccacaccttctgcaacccaagtgccgcccctctgactttctcctttttccttttttccggaacgccggaacgtaagacgtgggtcacgcaacaagagcaactagtcccggaagcaaaaagcaaagaggcggagaagaagacgggaagcagagcccgcgtccgggtcggccggcagggggcggggccgggcatggtaacggctcggaagcctaggaggctgggccggagggaggcggaggaaccggtgttcgccgccgccgctgcttcagcttattccttgtggcctctgcgggtcctgcctcagccatgatgatccacggcttccagagcagccaccgggatttctgcttcgggccctggaagctgacggcgtccaagacccacatcatgaagtcggcggatgtggagaagtgaggcttcggggcacggggtctgggcgctggccggttgctggcccagggcgggaggcagggcgaactctgtgcagcccctccccttttccctgaggcggaggttcggtccctccggaccggacctttgattgacaacttcgataaataatccagtcacacttccgggccctttggttggggatcgccaggcgctgctttcgtcaactgtcaatccgcctgggtttgagtagagtgtgactgttctggtggactttcccctcaccaaacgtctcctcctgcctcagcctgcaccacctttctttctgggtggctgttgcctgttttcttaggggttaatgacggggatgatttataagtttggtttctgtcacgtcaggtgctgtgcccggcgcttgagataggaaatgtaaaagacaacgtgcgcctcaattcacagtctcgtgagagagacagacaattatattacagcgtgaataaatgtaatgaagatgtatacacggagtgatgtgaggtcttttaggggctcgaaccatctgggaaattgggatgcctgaactgaatctttataaaaccgttgcggggggcggtggataggtacatgccatcaggtcaggcagagtgagttgtgatgcgtttttgatgcctgggctgaatcttgacaaaatttaggggaatcaggggacgcatgtaaagctgggggctcagggagagtgaaagctgtgatgtgtttaaagagctgtgtccgtgtgattggagcgtgaggtaccatagggggtgttgtgagagatgagaggtaggccccaggggaatcaagatactgagggaatttttatgcctggctaaggagttttcaattttatctgacaaccactgggtgtaattttatccaaaggagctgcattatcagatgtacgctctgaaagatttctctggaggccatgttgaggctggattgcaggtccgcagggatgggaaggagaccagttagtaagagaaaagataggttttagaagattaagtccctgggatggccagctgatgggaggagaaataaaaaaggaagagtctatgctgatgacaagatctctggcttggatttttgcatgtatcgtatgcctttgaacaagatgagaagcacaggaggaggagaagcagatgggggcagggtgttggttagaggatgagtttagtttattgaaatgtgaggtgggtataggtcataaagtgaagatgtgtagtaggcatttagatatatttatcttggagctcaaaaaagataacgtctgtgggtttaagtttgggaat

SEQ ID NO: 35192 - DNA, 1710 bp, Homo sapiens
gttttgaagagatgaggtctccctatgttgcccaggctggtctggaactcccgggctcaagccatcttcccaaagtgctgggaatacagacatgagccaccatgcccagtctacttttagtttttttaaggtcagaaaaaaaaacaattgtacaaacacaaaacaatttaacaatctattattcctttcaacattccttcagtcactttttttttttttttttttgagacagagtctcgctctgttgcccatgctggagtgcagtatcctggtcatagctcattacagcctggaactccttggctcaagtgagcctcctgcctcagcctccggagtagctgggcttccaggcacgccccaccacaccagactaaggccttgagtgattaaaaagaaaatcttttcctgtgtaggcacgatcgcaatatggatgaaccacagcctttgttcccgtctgcacaaggcttctcccccgtctttgtgtctccggagccttgcacgtggtaggtgctcggcattcgttgactggatcaagtagggcgagggagcgcggcccgttccggtttgaaactgctctggacgccgaattagtgtttggcagcgcctggtggtcttcaatcccagcccctccggcccgccgcgccccccgggaccaaaacaagcggaggcgagcgcgggcgcgcggggcatgccgggagccccccggtgggcaggtgcctgggcggggcgcgccgcggttggcgcctgggcggctgggcggctgcctagcacccggaagagccgtcaacttagcgagcgcaacaggctgccgctgaggagctggagctggtggggactgggccgcaatggacaagctgaagaaggtgctgagcgggcaggacacggaggaccggagcggcctgtccgaggtgagtgagcccggggccgtcggccccctctcgccgcgctcccgccctgcgtcccctgcccgggcctgggaagcctgcggggactccctggagtttctggacggtagctctgccccttctcctcctcttcttctgcagggctccgcgaagaggtctggcactacacggggcagtggccgcggcgtccttttctgccccgcgccccttcagcccatcctccctgacaagggggcggcgcaggaggaaatccccggactgagctgcgagtgggagggtgggcgactgggctgtcggccccggccccaccggccggggaatgcgctttagggccgggtagggctgggggccccgaggtccaggcggaaggagcctttgctgggtgggtcggggccccagacccggactggggtgttggggtggcggtccctacctcgcgacggggctggtggccgcgccccgagctctgccttggttttctgtccggtttaggttgtagggtgtgacactcccacccgcccctgtacacattgccttgtgattgggggtgagaaactgcccccatcccatgaggacagggaccacatcttgtgtctctgtccacactgcccacaactagtctctagacacccagcgcctcaggagactgcctgcgtgttggtttgttttattagaaaagcttttttttctttttttctgagacagagtctcactctgtcgcccaggctggagtgcagtggcgcgatcttggctcactgcagcctctgcctcctgggttcaagcgattctcccacctcagcctccc

SEQ ID NO: 35193 - DNA, 2237 bp, Homo sapiens
agtccaagggggtttgggaaaccagactcctccaggagaggtttacctcagcgtaaaaccaggtggctcatctgtcagatcttaacactgggcccctgctgtctgttatcatccctaatttgtgccttctgtgcagggtcatgagcccagttccatatatatgaatgtataacctgacctaaatacctttctcctgagtggagagtaaggtagtctttggcaatacgtgccacacctgaggggagcctctcatccttcttttcaagcttctggtttgacgggaactctggagacagggttgaaaacagatccctgagctgggggtagtcaaggctgacggagttgccagtctaatgactcttgactttctgccactacctaccttcttccatcagctgggtggaaatatagtaggaaactttgaccacattgctagatggagactatgctggccatacaaggtgagccctgtgtgaatatacatggcctagctgccctgtgtggtgttggtctcttacggcagctgtctttgtccagcttggaacaactgttcccacttgcatcaggtggacagactggtagggtcaccagtgcaaaaactttgatgtcatttttttccgagacagagttacactcttgttgcccaggctggagtacaatgtatgatctcggctcactgcaacctccacctcccaggttcaagcaattctcctgcctcagccttccaagtagcagggattacaggcatgcaccaccacacctggctaattttttgtatttttagtagagacaaggtttcgccatgttggtcaggctggtctcgaactcctgacctcaggtgatgcgcccaccttggtctcccaaggtgctgggattacaggcatgagccactgtgcctggctgttgtcatttttgacatgggaaaagaaccactgggagctactcacaggctctcctgtttcagtagtgtttttggaactcctggcttcccctgaactttgctccagggagggattaatcatgatggcaaagactcaggatgtaacaggacagtaattaattaaccaggatctgtctcccacttggatgagttggctgatgccagcatcctgtaagtacaatatctgaaccaagagtgaataatgtgggtgagagttgatgtaggagacgatgaccagtggagcagctgcttgagtgccgtcccctcatcttttccttatttcctgggaccctgcctggtggaggatcccaggtggacttgtgagtccctggtggacgcatgcctttccaggtgtggtcttcatcctgcctgggttgtaggaaggctctgggctactctaggattggctgtcttgccttcctgttcttgaaatgggttgtgcttgaggcaaggagtttctacctctgaagatgttcagctggaggcacagctgtcagctgctagagaggagattcatgtctgcataataactttacagctctgataaagtctggatttgatgacttacatcgcctgagtgtgtaggattctgtgctccttgccttccctaatacaacttaacactttctagatttagttatgtgcttgctttgtttttagtaaatgtgtgtgtatatgtattttttttttttcaattttaggttgttgaggcatcttcattaagctggagtaccaggataaaaggcttcattgcgtgttttgctataggaattctctgctcactgctggtaagatttcccttcctcctctgtcttttccttctacctgtctttgctatatattcccccttttgtccacctcctttccccttttgcccttcactaaaatgcatggatgagaggagaggggaataagggaggtggggagggaaacggactcctcagggcttcctctgggagctctgcttgtgtggccgggtgggagggttgctcatgtgcaaacactgtactttaaattccagggtactgttctgctgtgggtgcccaggaagggactacacctcttcgcagtgttttatacctttggtaatatcgcatcaattgggaggtaactgttttttaaaaatccaattttagccaatcattagatgggaaaatggatgttggttgcccttgagggaggtgaaagaggaggctccagtagttgtaaggaatttggagagaagtagttagaatatctcacattcatatcttattatttgaaaacattttatatcttagtttgaaacacctgggag

SEQ ID NO: 35194 - DNA, 1261 bp, Homo sapiens
atctaaagacctcttctctttttccgttcagcttgacttattaccctattcctataaccatgtggcagaagggaacactctaagtaatactacgatcccctcctcccctactttgtgtttcagtgggtgtcaaggtgctaccagttctgaaaagcacctctagagggcattgcttgtcagatgagccacagtggtgtggtggtagtaagggagctcagacaccttcctggtgactgtggaagccacacacaggcagggcttagagggaataactcagaaacacaggactcattctctagggtgggtgtcctgtcttatagaatggcctctttattcctcattatctgacttggggacttattactgtttttcatcagtctccccaaagtgggagtggcctccttatggcctgtcatccttgtaccctgctctgacaacattgtctttagctttgttgtatcttcctgttccattgaccctaaatgcctctcatttttggcctattttcttccctgtggttgtcaaaatcattccagacctacattctctggacttttatagctattgcaacatttggaacttgaagaacatacttttatttttagtttcatttatataatctcatttgttcaaataggtgagttatcaaaagctgtgaccacatttcctgtttattttgtgtccttttagagtattgggcacaatgctggacacagagaatatttaggacatatttgagtagttattgttatagaaggatggcgaagaaaggcatggctgactgctctagcaccagttgtccttggccagcctcagatgcccacggcctggacaagtctcttgcagaaagagctttctaagaatggccttagggaaagtgttaggtgataggtacacaagtaactggcatgctgactgtgagattgatatctcaggttaacctttgtcctcacatgtgctttctgctgcagagactagcatttggtaggagttaaaatagaaagatttgtgttaagcttactttagtgcatttgaatgaaaagatggatggacggatgaatgggtgggcctgaaatgtgatttgtttgctgggcagaggttctgggaaaacttgaaagtaaaagaacatcttatctatgtgaatctttattggctagtttgatttcatggagatttttaactattctgccaaatatgggtgctcaggtgggttaactgctttgagatgaaggatgcataagttttgtgcatttgtgaagaa

SEQ ID NO: 35195 - DNA, 815 bp, Homo sapiens
gaggaaactgaggcccagagagcaaagatgatttgttgaaggttgtccagcaagttagtggcaaggccaggtctctgataccacctagcagtccagaggcccttccctaatgtttcagggtcctgtgctctttggcatattccagtcttgaggacagagtccaggtctgctcatggttgctgtcttctgctgacccagactctgcctctgcctcttccctgccacagtccctgttttctatctaagatttggacatccttgtgagagaagcagcttccttttggtgcagagagctaattccaaacaatgattgtattcagaatgactggggagttggaaatacggctgatgagtaatctatcatacagcttggacatttgttctttcatcaaatatttactgagcacctagtaggtaacaggcactgtgcaacatgctgagaagacaactgggtttttaggctagtggaaaaaagagaatgagaacatagcttaggaagtgacatgggtacagagagcactgacccagtgtggagcaggggttgggaaggcaaggagcagttgggcaggcaaagagataatggggaaggaaggagggagaaagagagaaagggaagagagagggagagagagagagagagaggtgatttcagggtttgcacgaggctcagtgtgtctgaagcagtgtgtgctggcttgggagactgggagatggggctggaaaggtaagtggaacagactgtaaagtcttttatcgaccatttaagaagcttggattttaaatagcaaagagtggggaacaacaagtgtttacag

SEQ ID NO: 35196 - DNA, 721 bp, Homo sapiens
agtgctccactgaatattgaagaagaggaaactgttttctgaaatctcggagacagcccagcccaaagttgggagggcttctactgcattattggtcagacactgtggccctggctgtggtgggatgggaggcattggcacatttgtagctctggcaccaggagcagcttcttggggctggcactgcagattcagaggaaacaacaggaggctgtggccttggccatgctgaaggcttttctcccatggtgtccatggagactttgtgctttggcatcacctttgagtttcagagacctcaggcattgcagcaggggagaagaaaaatggctgaagccacgtggtggccgagagtacactttggtgagcacatatggagacatattttggggatttccccagtagatatgttgacttaggagggaggttgggattctctaatgatgagtaagggcagtgttaagtaatgctaaggaatgaatgtttgtgccctccttgtccccaaattcagatgctgaagccccaattctcaatacgatggtatttggaaatggggcttttgagaaggaagtatggttagataatgttatgagggtggggcctaggtctgatgggattagtggcgttataagcagagacatcagagaactcgttctctctctccccacccacaggcactggggaagggccacatgaccacacagtgaaaaggtggctgcct

SEQ ID NO: 35197 - DNA, 908 bp, Homo sapiens
gattacatgttttcaacctcatatattattttaggtgtatgtgaaaatagtgaaactgtatttctttaacaacatattttttctttttcttttttttttttttgggacagagtctcactctgtcgcccaggctggagtgcagtggcatgattttggctcactgcaacctccgcctcctgggttcacgccattctcctgcctcagcctcctgagtagctgggactacaggtgcccgctcccacgcctggctaatttttggttatttttagtagagtcagggtttcaccgtgttagccaggatggtctcgatctcctgacctcgtgatccgcccgcctcagcctcccaaagtgctgggattacaggtgtgagccaccgcgcctggccaacaacatattttttcattcagactttttacttaccaggtggatcttctcctggtttagtgcattctggagattagattatggagactatttctgttcatgaaagtcacactctaaatcacttaagtttctgtggtttccagaagaagttaaacatttacgggaaaaagtcaacatcctcgatagctccagtgtactttggcatttccgtggacatgggaaagagaaacatggttcatagctctctctggcttctgcataatgttacaccaaataccatatgctctgtcggtgacaattttcttcactcattgtgtcttttaactccaaatgttcacattttaataatttgcttgagaagaatgaaaagtgacacacatattacctttaaaaatctatattccttttggatatatctttttgaaaacagaattcatatttagtgctttgggtaaggcaaaattaaattcaaccttttagtttatgttcctgagaaaggtagtttcagaggcatcagagaaaca

SEQ ID NO: 35198 - DNA, 1753 bp, Homo sapiens
cagtgcaacctttgtggaaatttgtttaataaaaacccagagcaacattgaatctatattcaacaagaaagatctaagtcttaatattcatattgagaaactggtttggaatgttgataagataagttgaatataaattattaccaaacataaacctctttgggggattttgcttattttcattatcaaataatggcaatcagtttagttttgctggtcagtgactaaccctaaacctcttaacctagctgggaataggatgtcaagctttggtagtgagagctagatggcactatggtgtaattctgtggggtgcccaattatgaagagtttgtctgattgtgatgatagaggtttctggaataagaaattctgctcttttttgctcgtgtcttctctaactgcacttctctaagtgcaatatagtacaacataggaaggctaggaagaagtttctggtgtaggaaggctgaagatgagcattgtcttctgtcttgctcattcactcctgctcttgatttctttctgataagctgtgtgtgacatgcacagatacacacacacacacataaacacacacacacccttgttgagactttttctttaaaaatcaattaggagtatttcagacaaaagatgatttacactccttctaacccatgtccctgattcagcagtttttccctctggtgacacaggtgctatttataggtcatacacgagctgaggccagagcctactatgtgaacagcttgtactgtggcaagaaggacaatgattgtgaaagctaatcatatgaattggggcattcttgttataccctactaaaacagggtggagaagccagggggagaaaacattccaagcacatgacattgatctaagaatgtaattctctgcaagcctagttgctgaaatttcctgctgaaacctgatttatctaagagctgctgaaacaaccccttgtgttttacctactgccttcagtcaccaaccaaatcctgccaactctcccagaccttactagtgccagtgagcttttgcgaaggacaatatgtaacgtttccttttttaaaaaataaaacccctaacctctttgtttttgggacatgctaaagacagtctgcatgtatggcctgaattaccattgtttcctccccacgaaatggcttaatttcagagattcatctctatgctttatttgactttgacagtactttagaattggaagaagacattagcagtttctcagttcaacttcccactaccggatgtttgaagttcatctccttaattttgaaaaacatttgatttcctgatatttgagtctatttgcagaagtttaggaaggctaggaagaagtttctggtgtaggaaggctgaagatgtcggccatgactgtgcagtctcctatgatagagcaagacaggatgaaactgaagggccaggagattaacaaaatggtaccttctaagtgtgtgctgctatgttacatggcatcctgtagggggagctaagccattcaacagctttagctgtagcatttaaggcaatgatatcttttgcgtctcacaactcctctttctttaccctccctccgtagctttccagctgccagaaatgttataaatacgtcatctgccctcgatacaagaagaacagactattcagagcacaggaaagagaaagaccatgatggaagagatgattgtgtgagggcctctaggaaaatttcccttccctcatatttccc

SEQ ID NO: 35199 - DNA, 500 bp, Homo sapiens
tctctttagagcaatatgactgtatgttggacctcccaggcccccttggtaaggccagtatttcctggagaacctttctcaaatgcataccttattttttgccttccataatatcatttccattgccttaaattctaccatcccctttcctatcctgacctctcaccgccttctattgaaatgccgcctgcccttgacttatcaaactgtactgtcacggtttgtttgcttgactaactcctttagtttataattctccagaatgcaggaactgtgcctagtaaaatggttggtatataataaacacttgataatttattgattcagttactgagcaaatgtaagtgggacttaagtttgcttgataaatgtttcctattattgacgtttactaaaatccggcttacctaaggaattttatttccaatatatactgacactgttttccttctctgactacatttattgggtacttattatatgcaagacactatgtgatc

SEQ ID NO: 35200 - DNA, 2081 bp, Homo sapiens
gatgtaccaggcacaaaaccattacagactaaagaaagatttgatggatgccaagaacttaggaaggagagctgccttgaagcaataacactatgtcatgttccttgcatactgaaaaaactttcatcaaactattttgtgagactttttgatttttctgcagttcactcttataactctttgcaaggccaaggtaagatatgcccacacttgaagattcttcctaagagttttccaaatcagaatttttcccaattcctctggcacattctactgatcatccacttatcacctgactcctattgaagtacagcgttcattagtcagaagaacgcaggattggggaagatcttagagttattcatttactccttggcattcttcctgttctgtatgccaactgatgttctgtgcactttgtatgattaactcacttaatcattaatcatttaatcattccaataacatttattgagctcataccaagcttttacaatatattaggactaatgcttgctgtaaaatagcccttctgtcaaggaatccacagtaagttaggtgaggtaaacatgtaacacaatgtcttataattacctctttaaaagcaatgactaattatgcaaagaaaaatacagaatgagggaggaaggatacctaatctaggagacaggaaagagggaacatgttaggaagagcttcctgaaggtgccatctgagtgctgagtctcaagcaagagcctgtagaatggagtgaggctgtgatggggcatggtgggtggggagagggggcaggacatctcaagcagaaaggagaatgggaacaaatgcacagaagcaataaagacaagatctatgaaagccacgaccagcttcttgttgctagagcataaggattgagacaggcagtgcaagagagaaggctgaagctatggacggggttaagtgaaggagcatagtctttgacctgcgtagacaatggaaatccactgaagaattttaattaggggataagtggtcagatttatattttatatgtttcatatagcttagatagtctggtggcaatggagggaggtgcataactggaaatgtacaatcaggacatttgtactattagaattatgaacttcagcataatatatattcatattattaatgtagtaaactgttttatagtgtattagtctattctcacactgctataaagaactgcttgagactgggtaatttatacagaaaagaggtttaattggctcacagttctgcatggctaaagagacctcaggaaacttagaattatggtggaaggtgaaggggaagcaagcaccttctacacaaagtagcaggagagggagagagagcagggaaactgtcatttttaaaccatcagatctcctgagaactccctcagtattacaagaccagcatgggggaaaccacctccacaatccaatcaccccccaccaggttcctcccttgacacctggggattacaattcaatatgagatgtgagtggggacacagagccaaaccatatcatatagctttctgtagtgtacttgaatatgcattaaataataaatcaactatactgagaaaatcttaactttaaaaaatttttcattaacttaaattttttcttttttctttttgttatttacttgaagggagccatgtttaggcccatttctggttaacaactaaagggaattgaaaaagcagttaaaccttttctcttctactctcgtcacagccatcgattagctgtgagtcattggagcaaggctcaggtttctcaaacataagataaagggattagaataaatggtgcttaagttctgtttaagcatcaaagttctatgaagcaatgtttattgtatttaacattttcttagtcttcaaagggaattgaaggcagatacgtaagtgcctttatatattttatctctcagtgtttctgaataggataagtagtgtgaatatatgtgataattaaacctcacagatctgcaacatgaacagtgtagaattaaatacgcatacagtgctcatactaaataggagataatgcatttttgca

SEQ ID NO: 35201 - DNA, 658 bp, Homo sapiens
agggactttagtttctatatatctcatgcctaaatgaactaaatattcactacataaaccacccttacaccatgattagtaatggatcacatcatggtaatgtactcacaccagattccgctgcagcctgttaagcatcattatgacacactggctggtcagtgttggataatttagggataggcccatgttaaggaccaggtagccttggttgtgttatcacaatggagcctcagaagcctgagacagcaagagggccaggaagtctgaagtgtttgaggagaaatgttccaaaaggaaactttccttacttcatctattttgcaccacacacgtcctgacacatcaagggtattctcacagtaactggcaattctatgaactttagaatccattcaggcaatcacatgtctctgtcagctgtactaaatgtctttgaagctgggaaattcctttgactctggttaaatattacataaaacatgcctgctttgaatgggcaaaccataaactgtacaataaagtgtgggagaaagaaatttgggcttggagccataagatatgagtttgagtcctttctagtggtctgaccttgagtaatcactgctctctagattttaatatcattcataattgtgctctactgtaatctcttata

SEQ ID NO: 35202 - DNA, 823 bp, Homo sapiens
catttcccaaggacatctaccccaacactgcagactagattcaatccatgctacgcattctcaaaacgtggctatcattttctccaatttactcacagttagaagttacgtatttctgtgattttatttatctttctcctttattagactataagctccttgaatataagaagtgtgcttgtttctgcttagcattgtgtcctcagttcctacccagaatctggcacatagtagagtctcagctaatatttgttcaatgaatgaatgaatgtgtactaatcagttatgactaaaaggtaaacaaatcaccccatgatgactaatgataccaagccttcaaaggccagcaggaagtcacagaatcacaagtcaacttctgactgagctcctttcctagggaagcacacactcccagacagaagtagaccatataaaatttggatccatcgtgaatgtttaattgcagccttattttccacatacaatgtcagtatttggcttgccttgtatgaccatgggaggctttcagaattagtttctgaataacttcttaaggttgtttgttatattgacttcagccaaagatcattggtatttcctgagaccggaaagatttgggccttgtgcgtaaacaacatcttggatcaggcacggaaatttcaacagtacttggcaatttcctagcagcttacaactgctgatcccgccaacacagggagtttagatgcagtttcctcgtccttctagtttctataaatgtccttcctgcagaaagcaagtggccagaggcacagagaatagtgatgtactcaagttctccttc

SEQ ID NO: 35203 - DNA, 817 bp, Homo sapiens
atgcaatgacctcaattgatcacccagtttaaatggttcaggattgtgtcctaactaaaagccgccatggtaactaaaagtgaagtcaaacagctgctcactctgttgcctaactttgttcacctagttaaaagttttcatgctagataatatatttcccacattttgtacttatttttagtttctaggaaaaaatgtagaggcattctggcttttttcctggtacaagtcatagtccatttgtcattatggttacagataagaaacatccaaaacaacaaacaaacaaacaaacgaaaccagataagaaacatcccagatatttctatgtaagtctagacatctaggtgtgctgaaagacacttcaaatttgaacatttcctcccacaatgtttggtctatgtgcattaaaatccagttgagcaaatctttatctcaaagcctgctatttggagaatctgacctgaaacaaacatctatatattttttcataattgggggaatcccaatatgagtgagagataaaatcttatttacaagaacagacattatcaccctttacttcctgtcagctagagtgtgagctcatgcctctgaaatttgaaggaatgacccggaggttcagggtcagagttacaaagttgagaccccagtagtgagatcacaaaggacgcatggtgacaatgccaaccagcagtgatctaagagggtaactcctatggcatatctttgactatgcttcatttcctttggcttccatctatgcctagtctattatccttcaaatggaggtatgggatattattcctataaattt

SEQ ID NO: 35204 - DNA, 9870 bp, Homo sapiens
tttatgccagcgaggttgaccttggggacagaagggtggccaggataaggacaagcatcctggtattggggaattctctgatatggggctgggacgtcaagatgggccatgatggcccctggggatagggcttctctgcagtggaagcagaagcatcccggtgttttctgctgtgtcactgtcctcagagggatgtataaagctgcttgggggctcataggagagggatgaaaccaagagtttggctttccagcaacagcggacaaagagtgggaaggggtactctatgccccaggtctgcaacatcttgccctatgcgctaggttttcccaaaggtcctttggctccaagaattttacagcagaacaaagggatcgatacccccaagggggcataaaagcatgccaatgagaatacccgccgccgaccgggcaccaagaaagtcctcggtggctgggtcacgtgcagatattgttgcctggggtctagactggcctgagtctcaattggtttctacgggacaactcactgcgggctaccgccctgggtgggtttggcaattgtcctgctcgaggtggttcaggccgcccacaaggggcacagccgggcagtcaggaaccggggctgccggctgggctggcctgcaaagaagagggaagggccggaactgcaaccgcagtggcggggagtgcgagggggcggcaggtgcaggagcgggaggcggggcggagctgggcagagtcctcgccagtccggcgtcccggagtgaccttcccccaccccgccagcgcccaggaggggtggacccacagcccagggaggccgaaagcgcgggcgggcaggcagaggcgtggaggctgggccaggactgccgggctggggtcctcgaggctccgggcgacccaggtgcggatcccccagccacggaaggggcggttcacgcccagccgggagctgggagggggctgcgcggcgctgcctgcgcgtccctcaccgccgcccccgcctcctcctcgccccgcgcccaacgccccgcgcccagcgatccaagcggcccctctagccccggcggctcctttgtgccggccccgaacccgccctctcgggccgagtccctgcccctggcgccggcgattggccaccgggccgctagagggcggggcgcacggccgccggggcgcggtatatagtaaaggtagggcgggcgcagccaattcctcggctcctggcgggagtgccggtggcgccccgcagtccgcttgtccgtccttccctctctgactctcctaccccgggcctgtctctgcagaggtcaggggaggcgggggcccagcacacgtccccagtggcagcgggagcggcagctacgggttcgcggagcccccgaccccccaagggctagaggagcgctcggcggaccaaagaaagcccgcgagcggctgcgcgcccaccaataggtgcggggctcggagccgcgcagcctgcgccgtccctccctccgcccccgccccgccgccgccgccgccgccgcctccccctcctcctgctcctgccttggctcctccgccgcgcgtctcgcactccgagagccgcagcggcagcggcgcgtcctgcctgcagagagccaggccggagaagccgagcggcgcagaggacgccagggcgcgcgccgcagccacccaccctccggaccgcggcagctgctgacccgccatcgccatggcccgcgggaaagccaaggaggagggcagctggaagaaattcatctggaactcagagaagaaggagtttctgggcaggaccggtggcagttggtgtaagtacggggtccgcagctcccggccgccgcgtctgatctttcccgggcggcgcatcccctgcgcagggtccgcggccggttccgcacccaccgcgctggccggggtggcgggggcgagggtggtggacgctgctgggtcgcgccggcctgggcttgcagtcctgtgcggaatgcggtgtccccagagtggggcgcagggtcggggctggaacacgacaggcggaaggttatgcatatcgtagcgatcttggcttggtaatttgcagtctttcctaccgtgcatcggttgagccttttactcctgggaatagtcaggctctgcgagactacatttgtctctcccgtgtcctgagtccttaaaaaaaaaatgagatctggggtcttgagagaacctcgtgaggtgatgggatctaatgcagacgaggttgtgtgttacagcatctttcttctagtctaaatacgtatctcaaaagagaggaaagagaagggtggagaggaatccatccacactgtagtatttcacagcgatggctaaggatttccctccatgacctcccctggagtcatcaccacccagaaatggttcaataagctccatttcaggactccgattcttagctttggcccgaaacctggcaaagtctggttgttttcaaggtctacacagacagttgtggatcagtcagtaggttgggttgattatggtgaagggaatataaacgcagagcagctgatcttaaaatattttgtgcagcctgttgcttggttggatagacttttttccatcgaaaattagatttcttgttttcagcctctccggaaaggtgacttttttttttttaaaaaaaaggtcattttgaagggcagagttgtaggcgaatctatgagtcgtgactgcgtgagggaaggagggagggaactccccctgctgcatcactgccccctcctcctccaacatcatcatcatcatcatcatcatcatgaccatcaccaccaacaccactggcaccaccactgcagtcattcagggagtcctgaacagaggccgattggtgttcctgcttgggaggatctgtgggaatcggcaggagaatgagtcagggaaatagtgcttagctgacattttgaaatggaagaagctggaatatatgaatttttgtaaagaaaaaaaaatgcagcctgtgagtctctcttgattgaaaattaaagggttaataatgcatcacacttcaaggttagtcaaggtgaagcgtctttccaaggtgttactgggaagcataggtatccctgagccatggaaaatgtagttctttaatggcttttagcttttgttttatattttattttggggagacttcttcattgagattattgtcatagtgtctcaggcataaaggtagtttcctgtgttttactgtggaaaggaaaacctgaagaactgtggggtgtgtgtagaatgaacagctccctggcaactccttgtaacttgagggaggcctggaaggtgcactgcggtatgggcacccttctccccaggttagctggggcttccttctctggtggtctgaccctgctgcgtcacaggggcaggggctgcattgactctaggcacattgtgaaatttgccttcttgtctttttccccttagtataatatgcatctttgctcattccagtttcatgcttctcagaataatacttgctttagagggtaaggcagtatggactgactcatttttaagccgacatttaatgggcagcacctccatgagagagagaaagagagaccgtgtgtgtcaatttttatgtcttgatatcctatccagcaagctatcagtatgctgatttgtgaatgtagacccaggactgctgtacttgcctcctcttcccttccatgttccacggtacaggtgctgggctaaaaatcccctttttgttttgtgctaatatgtctgcccctttctggcagtgtaaaaactgtcagagcctctcttaggtagaaaaggcggcagcaattaccgtctcctacggagaaaatgccccttttccagcactgggcccaacatggatgcccttggggcgagggcaggatgcccttggctcgattttgcttataggtagattttcaccaagatggacgcaggagactcgcctgtcacctgctggagaaatcacagcatgcaaatcactttgtgccttctgcctttttattaggttaatacagacattggtaggttttatatttacagctaggcctggatgcctgcctgtgaccttttgaagggtacacactgtttgtttgttcatttgtttgtttttccaaaaaaacctctgtattacttttttttaaaagaagaaaaattgcgtgaaagggagatgcctctgaagcctctcagctcccctcacagtgccaccccagatagttggtgtgacttatctagccttttttttggctagtggggagcccctggtggcctgtgtctgagtgagccactgcataggcccctctagtcctgagtgctccactctctcccagtgacctcacggcagtaactagggagattttatcaactaacatctcagagcaaaaagggaaaattcctcacttttcttaggatatcgtgtgggcagaatagaaaggctgtctgtttctgagcttaatcggcgtacttgcaaaatgacttgtttttccgttgctcttatttgtattttaaactgtagcctcaattatgtaccctcttatgttgttagaattaggcatctggagtccagggaatgagtatagagatgtttcagttgttcgaaggggcacatgtaggtaaggtaagagcaccaagatgaggtgggggtggggggcagcaagaggaaacttgaatcagggctacgatagctgccttgctgactgttacaccaactcttgcacctcttaggagcattcactggaaaaattttccagatctcttgacgtcacagcgttgccatttgcctactgctgcttggatacagaatgcagcacttaacccttgtcctgcggggagggagtgattgagttgggtgctgtagttctggattacacaaccttttctttcttccttatctttacttctgtctttgcttttttccttgttatttgcttttgatagaggagaaaaaggattatgattaagcattttgctgtggttttgtgtgttttgcttgttttaacagctctgtagcctgatttcctttaactgtttagtgcctgataggaaagttgggcttttaaatgtatggacagggcaacaaggctaattcctgcagttgtgtacccactccctccctggccccctcctaccacatatacttcttttcaataatactgtttttcagtggcttttctccaagtaccctggcatttttaatgcatgagatctggacctttttagcagtaacctaaggctcctttgtgcagtcgtgcttctgactcgataaccttacagttcacttgttccctgttttgcattcacattgagtcgtttggctggcacaggactgccaggcaatgcctagtacagcctgttactatgcagctaatcagggagataatccttgtaaaccagtaactgatagccaccctcattcccatctatgtgttgagtctttttttttttttttttttgcttttgcagctatttcagcctccatcctgttgtcttgttaactatgggaaaaagaaaatgcagcccagcaagtcagtcattattcttgttccagttccagaagatggaattaaaatgtgctggtcattttcactatagaattttctttttttccccttgtcttgtcctccgaggggaaagagtgtgctttgttgataatacaaaccaaagggagagtgatagtaaaaaaaacaggaggatatcatcactgggtttctcaggattcattgctctgccatagcaaaataaccctcaggcatctgagcatttggagaaacagcagagcttggattgtagtatttaaatgtcaagggatatgcaagcaaagaaaacataggtctctaagggagtatactgtcatattttaaattcattgcataagcatccaaacatagctctagattttattggtgatcttcatgattttttttataattttgagaataaaaaatatggatactttttttaaaatttagggaataaaaaaatataaggatcctagttctagctgaacattcctcctacccttaaccacctcccatacacactgcaagtggagggctgcccagcttctcgattttcaccctgtgtcagtggggtgaggtgcactcttgacgttggacaaggaagaaatcatgggaccgggggaaccaggaaggaagcttgttcatccgtgggaagattaaactttcattctgagcatatgactgcatcacagctttttgtttctgttcttcttgcagttaagatccttctattctacgtaatattttatggctgcctggctggcatcttcatcggaaccatccaagtgatgctgctcaccatcagtgaatttaagcccacatatcaggaccgagtggccccgccaggtaaaatccacatgaatagcttcatttccttcagagatagcatgggtgtcactttttctattgagaaaaaattctttggaaaattactctataatgtagtcttaaagcaaccatgaaaagggaaaagagaaacttctctcggctgcagccagatgtcctacccgcattgcaggcagagctcccacgggttgcagacatcttatttgcccagttctagagtgagggtgaagcgtcctggttcttggccagcctgctacccaccagctatgtgactgtgaacagattgagttctgatgggggcctctgtcttctcatttttcatattctagggtttggttagtgggatcctttccagaccttttcaactctaacagacatttttttacttcttgaggggggctatgactcaggtaaattcttttaaaaaagtcacttgggctcctgttttaaaaggtgaacttatttttagagatgataagaagctgtggaatgggcagctactcacagggagaggagccatgactttaggggtctattgtcccacctgctgttaatttgcagtttgagcttgaacaaagtcactcttacttctcaatatttatacccattgatttaataagcatctcatttgccagctttctggtcccactttgtagtttaattaactgtctcttttagctcttaaaaacttgggtgaacaaaaagattatcataagaaatgcaaactgccacacgagtccctgctgtgacttgggtgccatcagtgtagagctatgtgtgtccacaccagtcgtgaaaggcccatggccatcatgcctgatgctgataggacaaggcagtggaatagccacaaacgtgaatttaccatctggctgttgtaaaaatcattgtctggaggacctagagagaaagtgttgcataacttccgggctctcacttacgaatgaccttgaagctgctgctgagggatggcaatgacttgtcccttctctgctttcccttggcaaaggtttagtaacagctgtatttaggtgacaatcttcagatgatctacgtggccctgagcagcctagatcaagggctactgcctgccacaggcttttcctgcgtacctccttgaatgtgggaaggattcacagaggaagatcttcaaaatacggaggtggcaagcattgttgtgtagccctaagtcaaatagttctccactgtaagaaaaactcaaaatatttccagataaatttagagctgagggattggggaagtggaaaaaaaaaatcacgtaagtaaataacataacttaaacctgcttaataatccagtttccagcaactgttttccacaagaggtgggtctgtggaaaggttgaagcaagaattctggagtatgcagagaagctgaaacatgttttacgttgggtatggtgatagggaagcattgtgtcttttcatgtcctcttctgctagaactttgtggtaccattagttgtaattttaattggtgcggatattttgtttttgttctttgttatgccatttaaaagttattcttccatcatgatgtgattttataattcttttttttttttgagacagagttttgctctgtcacctaggctggagtgcagtggcgcaatctcagctcactgcagtctccgcctctcaggttcaagcgattctcctgtctcagcctcccaaatagctgggattataggcatgcaccaccatgcctggctaatttttgtatttttagtagagacaaggtttcaccatgttggccaggctggtctcgaactcctggcctcaggtgatccacccacttcggcctcccaaagtgctgggaggtgtgagcatgagctaccatgcctggcctgctgctgttttataattcttatactcaaagccaaatacgactacaaagtcaaatattttcttcaggaaatttcctagattaaaaaaaaaaatggtccttgactatataaactttgaggagtcagcctttaatgaaactaaaaattctctttgtgccctttgcagaaaggaaaatttaactttggaaaagaaatagccaaagggcccaaccttgtaagtaaggacttggaaatgaccttgcctgtaaatcaactggctgaagtgctcagtcctttccaacaccctctcacggtgcctcccttcccttccttccatccccttcctaaaagacatgttcttagtacctatatttagtgtgctcacagcagttggactgacctgacaaaccctgacttctccaaaggaatgctggtggctcatcttggaaaaatgcattcctgtcctgtggtctgagtcacaggaaaagtcctcagtcctccatcttccttgttctttggcctggtaatttctgtctcttcttttcctcatcccttcccccatcacctttcaggagagtctaggccaggcccctcctcttcacctgccttaccctgtggggtttttcgggggcctttaccaagggacatgacattcatatgaaaatgacagtaaccttgatcaggccaggccagcagagtgccgaaccttgatcaggccaggccagcagagtgccggctgccacaaagtgcagctcttgggccaccccttatggccctgtgttgcctgaggaccctccttggcatttttcaatgccaaggaccctccttggcatttttcagagtacgtgttagaagtttgtattttgcataggaaataactccttaagtatgcagacaaacagtgtgtttaagaataccctgacaattttttggcttcacattagtatctttaaagcctccattttcatgtttagttaaagagggaaaattgtaaatttgagttagatacacctagtgggtgtgaaagtttgcatatgatttaaagatataaagacttactaataatattatcagctgaatttgaggcatgaatgcaaatccagcctgactgggtattgactgccctttgtacaccggaataccttgtagttggatctcttctcaataacgtgtgaatgtggccatatcaagcagtggcaattgtgcagtgagtgtatttgggcctgtatggcgataatattggataaactgagaggccaaacatgaaatctgagaggagagactaaactacagaatggaagtgaaatgtaagaaaaaatggtgaatgtgtacagcttcttggccctgaacaatggtggccgtttaatgcacatgatattccttacaaagtcgtgttgcagccggtgtggtagctcatgcctgtaatcccagcactttgagagactgaggcaggaggatcctttgaaggcaggggttcaagaccagcctgggcaacatagcaagaccccatatccacacacacacaaaaaatttttttaagtctcctgttaaaaaaaaaggggtggggccaggagtggtgactcacgtctgtaatcccagcacttccgaggcaggcggatcatgaggtcaggagatc

SEQ ID NO: 35205 - DNA, 1304 bp, Homo sapiens
gacagggatgctttgcacacttagattttcatggagtcaataaaaccttagctttccatggaaatgtttaagagacatttgggaaacatgtttttaaaaattttaaagtgaatttaaatggcattgtatttgttgtgcagtctctccctttaacaaacccatgcttgttgggttagcgcctgccaagcttttctccagaggagacccccttaggcagtcctgcagtgctgctctgcagcatcgcttctcatctgttgatgcagttggatctggggagagacgcagcaattagctatgctggagagggctgagcaggcacaggcacgcacacccacgtgcatgcccacggacatgcaagcgtgcacacacacgcatgctcatggatatacacacacactcaggctaccaagccctggccctgatttgaccctgcttgccttgctgcctgcccagtggtgtaatggaaaagtctcttcttcacatccgccattgcccttcccccacctcaggctcacttagcaacagtggagtgaaatgaaggtcactgtgtgtcaatcggtgggtccgggagattcccagctggcttgcttcctggtaggcaggtatgaatgtatgctgctgttctctcttttaaggttgtgggtggctgtttgtttagctctgaagtatagacggctcagtgctagcagacacattttcaaagggtcatattcttggcttgttggtaatcagaatcgggcaggagaagtggggtggatgcagaccagctgaccacactggcaccaccagcagtttcagtttcatcttgattgtaaagaggaaatatctaatcttaaaactcattaggggcctggcgcagtggctcatacctgtattcccagcactttgggaggccgaggcaggcagatcacccgaggtcaggattttgagaccagcctggccaacatggtgaaaccccatctctactaaaaatacaaaacttagctaggcgtgatggcaggcacctctaatcccagttacttgggaggctgaggcaggagaatcacttgaacccggaaggcagacgttgcagtgagccaagatcgtgccactgcactccagcctgggcaactagagcaagactccatctaaaaaaaaaaaaaccaaaaacaaaacaaacaaaaaacccattagggttcgagtcattatcattctatctcagcttgattaagtaaaattcctgagaagtcattatgtcagtctcagaatacctaatttttccaccccccgcaaactacctcatacttgtattactatctctcact

SEQ ID NO: 35206 - DNA, 909 bp, Homo sapiens
cccaattactggaagctgaagcaggaggattgcttcagcaatttgtttattatacaacaaagttatttttaccccagtaaaatgactaaaaattgcattagcctaaggtatcaatgtcagtatcagtttctgttacagaaaatcatcatgtaaacactagaacaatgaattctttattaaaacaaactgaaggcaatactcagaaaacgtaccattatgatgactttatggaaagattcaaagctatgctgtgtgctactattgtataacgttttataattctctctgccttgtgaatagtaagcagcagattttagctctcagatggagattgtagagtaacaaacaagttaatgggtaatgagaaaagtggagaactttgcacggaaagatatgtacactgatattccaagcaaagaaattatttttgctgttttcaacttgcggtttttattcatttactcaacagattaagctatttctaactctaaggttggtaccaaaggggaccagtatttatcattagaagaattaccattcattacacaatggaatataagcataatgcataatggactttcacagtgtgattgggtagaatccaacgagacggctaattcactcaattctgtttcacttactctggtgctcttctctcttatgccagattcatttgttgtcataaggccagttatagaagcacagtgggaggcggggtggaggtgaggacagaagcattatcagaagcttccatggaggcacagtttttaaaattacccactgaaaatccatagatagcctcattgtagcctctttccagcccctactcttgctcagaccatagtggtaatgacagaatgggagatatcactcactgatagagtagactattctgtaagatgacaaggt

SEQ ID NO: 35207 - DNA, 1752 bp, Homo sapiens
gaccaatgcttggcatatggccaggactccctacaagctagttaatattcctaccatatacataaaaataaaaaatcaataagcaataagaaagagttaatgcaaataaatttaatagcagagctatcttttaaacttcatcaagagcatgactgtatcaaattcgtaactatatcaagtaagcatttgcccaatatgagatttaaaagtaacgactatagtagtttggatttcatctatgcttaagaaagtgtgactttgctgtggataagatactttcaagatgttgtcttattgctatctttgtggctaaattaacattcagattaaaggtgagaaggatatagcgattgttataacttctttcacaattatctcacagaaaattgctcatacaatattatttcttgaaagaaataatttcaatttcttgaaagaaaatttctttcaagtttcttttattttattttttttttgagacagagtctcgctctgttgcccaggctggagtgcagtgctttgatctctgctcactgcaacctccacctcctgggtttaagcgattctcctacctcagcctcctgagtaactgggactacaggtgcacattaccacacctggctaatttttgtattttttgtagagccaagattttgccacgttggccagactggtctcaaactcctgacctcaagtgattgacctgccttggcctccccaagtgctaggattacaggtgtgaaccactgcacccggactcatttctttaaaagctttccataacctgcaaaaccttctcaatacatgtgctcttgaaaacattgagcctaatattttcctgttagactagtcttctgtttcctcttaaaacaggaaagcccataactgtctaaaggacaaagaacagtagtaggtttaacaattttcaccctaaagccaaagtgggagtagctgtaatattttatgaatgaaaaacaggatgaattctattagggcaaccatgttttagactcctttctaagtcacctcctagaatttttaatcagtcacctaagagttacttattaactcaaaaactgcttagtcactgactgaaaaatgaggcagggagcagaccaaagtcaagagttcagggtcaaactgcagagagcaaagcacaatgagtgaattggtttcatctttctcctcagtcttccagagccaggaaaatgaagggactggacagtgttggtggttggtaatgtgaacacaataccagctgtcttaggtgagtagacacaaaagtcacaggttaaaaagggcactttgtctcccttacttgatatgtggatcaaagccatgtacccatacatgtattgtccttggcatcttttctcagttttctctttcacaagatgcccatacacacaatatattctataccaatgctcttctggaagttctttcaacttcaagattactagaaataagagcactagtgagcatatctatttgttagttttaagtaatatttaacttgcagggcgcagtggctgacgcctgtaatcctactttgggaggccgaggtgggtggatgacctgaggtcaggagtttgagaccagcctggctaacatggtgaaatcctgtctctaccaaaaacacaaacaatagccgggtgtggtggtgcatacctgtagtcccagctactcgggaggccaaggcaggagatttgcttgaacctgggaggcggaggttgcagtgagccaagatcc

SEQ ID NO: 35208 - DNA, 1439 bp, Homo sapiens
atctgaacctagcatctgactctacagagggggaagaaaaaagaagagaactgaatttaggaagctgcaggctggttgcaatgaattttgggagatatgaaaggtatacagtttgaagaatgtaatgtggaaataactgactggttaacatcaggttacctcaggttactttttgttgtatggatgaaagacagagaaaacttcattattataccaaacaaaattagcctgtttgggaaatttggctcgctctctcctgatttctcagaaggtcagataacaacctaggtcgttgacacagaactttagtatgaatgactctgtattgattttcagtctggccatttgggacctagtacaggagcttagtccaaaacactgcatcctatacttttcacttaacagtacaaatgttttacatttacttttatacttacatgatattcggtcactactcctttataaacttcatagaattcctcaacattaacccgatccatattgaactatattaaaaaataaaacaaaacaaaaccataaaccaaccaacaaaagggaaataaataagccacacttagcacttaacacttgtaatctcttctttactctaaaacataaactttacatagattactctttgaagaaaaagtgttattaaacatcaactcatcaagaataataatggataacagcatcactctaggttctatacgtgcatcatctcatttagccctcacaaccaccttactgcataggtagtattaatggctccaacttacagatgagactactaagactcagaggagtcatacaacttcctcaaactggcatcctatctcaagcagtctgaccccattgataatacttttacctactacactacacctctctctgaataaaacctcattcttgatacaaaagaagatttatatgcaatattaattatactattgatagattagtggcacaagaaagaaatattactaaagaaaagtagttcagacttttagaggaaacagaaaacaataccattttcctcccaagcattcggaaaaatccctagttagtctggtttgtgttaaagcatttatacaagtcatgtggacttcctgctactcttcaaaaagaactgtaaaagtgtgcttacaaagtaagtctagagggacttattcttatcaaggctgaatttaaatttagttaggaataaaatttcgttaaattctaaggttctcaaaaactaagaccttattttttttaaaaagtagcctcagaattcccagttttattttccctccattttgcttgtttattgttgccaggattgaagacccactgagaaatttctgccaatatggacaatcatttaagctaggaggatttatttttatgggcaacattactaccatagggaggaaattctgttggatttcagtgtttta

SEQ ID NO: 35209 - DNA, 2387 bp, Homo sapiens
ttcaaagcgtggatggcagcagtagagaaaggaggtagtgaatataagatattttcacacaagaagcaatgggattaaactggatacagagtatgaagatgaaagaaggataaaagatgatttcaagattttgaatccaagtgaatggaagaatgacaatacttttaagaagaaaacaaataatgatgaaaccaaattaataaggggaaagacactgaattattttggacatagaaacccaaaacatactaaatagcatttatagagtaggaaactgatcagatcttgaggatgcagcatatccaatggctgaatgagtaaaataaactccctgcacaaaattagtgacatgggattgcataccaacagatagagttataaagacagaataagaggtacagagaggttagaactgaaatgatgccaagaggcatttggagacagtactttatataaagagctggagaagaatacatattcaaggcaaaaggaacattaagcaaaggtaaggagatgtaaaacaccatagttctggaataaaagtatcttcatcttactgaataatagagtggaaaggaaatgagacagaagagaagggagcagaggtggcagaagccatgatagaaggacttatggaccatatacagaggtttggattttatcctgtaggccagaagttctcaaacattttggtcacatagaccctttagctcttagatagtactgaagacctttatataggttatctctatcaatatttattataatataagttaaagtgtgcttattctcctttacttgacaagtggtagtttcttagcctttatataggttatctctatccatatttattatgagttaaaacaaaattttaaaatatttaaatataacaaaaatcctttaaatgttaacataaataacattttgtgaggaaaattataattttttaaaaatgtgatctaagccaaaaggtcaggaagagattatagtattttttttaattagtgagaagagagatattgttttacattttttaaaaatctctttaatgtctcatttaataaaaggcagctggactctcacatttacttcagctttcaatctgttgccatatgttgttttggttggagtatatttagttgaaaaatagtggaatattttaataatcttttacaataactgtgtatattttcctttacttgataagtggtagcttcttaaaagtttgttgcaatgtataatctaaaacctttatcaataaacttttttttaccctgttacattaaaatccactggtctatcttgtatgtacttcgaatgaaactatgatatgactcagacatgatttttaatatcacacattaatcatttggcaaataccagctcactgagttatgcagattttccaaatgctgattcatttcattatacgtcaaaaatcaattaaaaatttgttaatatcatcaccaatttcatcagaatagtctttctattctgttatacaatgtattgggaagttgtcaaactgaaagtggtgaatacagttttccaaggttctaagtttagttttcctttgtagtttatcttcacttggattttatctttggcaaaggctattgtcagttgttttctttgatatgataggcttacttaatttgaaagacaacgcctgccaaatacccaagtctgaataagcacaatttgtctgtcagtcattctttcaagtaaaaatggtattccataaaagaaaaagcatctaattgagctgacagtgcaaacaattgtgaataggattactcacaaatgcttttccttaaaaccattatatggagctttatgtgtacttcacattacttcacacagagtattaaaaagacctatatttgaggatcaaaaagtaataaaattatttttactgcatctaagatattcttaactaagtatggcttttttttccccctgcagatgcatgatggttaaaaatacagtaactactagcacagtttggtgccactgccttgattcgttctaaggcagtggcagttttgttcaccatcgcttttgcaccatcagtgcaaatgacaacacattaaaaaaggcaattaagtatgaaatcagctttggtcttgcagatccataaaagggtctcattaatgataataaaaaaatgattacatattaaccctaatctaaatatgaaatttaatctaatctaaatattaaacactatgcttcaatcaatatgaaaagaaatttataatctatatctattacaaattctaagaataaataggacaagttcacacgatatataggaagatgctcaccatagaattattagtaataaaaaaattttaagttctaaataataaaaaacaggaaaaagt

SEQ ID NO: 35210 - DNA, 1347 bp, Homo sapiens
ggaagggggaaagagataacggggagaaggtcgggaggaccggacaactttaagtgcccatccgcccgaagacttggaaagctaagtaagtaggaccccagagccgttcttctggcatcccctggcactcaccattgtctcaggatctcagcactagaaaataggtatcgttgagacaggaagacaccaccaccaccaccatcatacggttactcaggcaacaaagccccgcccactgtcgcacgaggcgtgggacgccaccgccccacctcttcgtccttagtggctgggagtaatctcagctgcgttcatccaatcgacagacccgcccctccacgctgtcgcctggggctacgagacgccattattctgtttccggcagttttacttccgtttgtttaacagctggcccggaagtttaagtgaatatgcggcttgggctccaaaagttgctgtacggtattttattttaaagtagaaatctgtccgcttttcacttacggaggccttacagtgtgtgttctgtgttacttgagtttatacgcactgcagaatttgtttaccctgctcttttggaaacgtattccggaagcgaaaccctgagtaatcggaagtggttaggagtgagagagctgctggatatgcggagggactgggcgggtcggcttccgaatggaagaggtctgtgagaagttaacctggtgataccgatccgaagagcctatcaagtgaagccccctgaaatacggagaataagaatcttagaggtaaatccgaggacaagcaggtataactaaggatgttggaaagggacggaggtctggctggagctcggtggccagtagctttggatttagggaaagattgttccgggaagactttttcagacagggatgaaacttaggtttcgacttccccggacagcaaagttgacaggcttgtcgcttcccggcctatcgctttcatacctgctcactccccctacttacttcttcaccccctccgcttcatttggcatttgccagcaggcactcgctgtgcctgtacgtttcgcagagcagctatcaagggcagtttcagggatcgttactcttacgaagggttttttggatacctcttttcggagcagtagagtgtaagtgtagaaaagtttgtgactgttaagaaagttagtcgtcgggttcactaattgaactgagttgtatctagtactgagaacgatctttttttgtagtgaaaccagttgtcatctagtgtacagtttgtcatatttatatcattgcagtagcatcaccttcttatatgttctctggtaaatctgagtctgtactgtaagacaatgtatac

SEQ ID NO: 35211 - DNA, 4309 bp, Homo sapiens
gttctatttatttcaattattagttatacaaaaaaacgtagggtttgccacaaggtaagcagaggagaatcagccatgatttggtggtcctctgagaagacaccccttccccagactactagatttctcttcaaatcccacgcttttcctcaactaatttgcaataagagaagtacacttatgttttttgttacacaatcagcaaatagttactacgcctggcaactctgctttatttctgtgccccctgaacacacttcactcaccttgaaaagctttctgataggacagagcacatgatcttggtagcacgtcacacagcaaccttctacccagagcacatgacaaaacagatcagctttcaaatatcaacactgggaacatgtttctctccctgtgtttcactatccggaaaggcgcacaaactgtgcagatcacatggcagttcacatgaaactttaatggtcagctgttcacagcagtatcaattctgcctcagtggctacacctcagattcagtggttgttttgggtctccagaatcatactttctcatatcagtgcagtaattttcttgtaaaatcattctgtcatgaaatttggctgttttgacattattgctttaaatcagtattaaaactcaaataggttatgaataactgttacggtcgcttatgtaatgatccacaagactgagaaacggcccagccactccatcccacaactggcaggtcaatagggtaatttaaggccaggcaaaaagtcagtgatacttgctagaagtgaacaaatgtcagactctcaagtgaaaccctcaatacgtaagtcaatactgattcttaattctctctcaagtgcccttgaaaatgacggagcattgcaacaaacaaactgcaaacaacaaactatgagtaactatatctcgccagtgtgcaaatgattccggtagtgccatctcttgttctgacctgttatgcagggttactgagtggctactcaaaagaagtgactgactactacccacatagagaagagtaaggtttaaatgggaggagtattttacagcacctggggcaaggaggcagggtggaaggaacaggtgtaggaaaaaagaaaaagctctcaagtggccccttgactgatagtaggaaaaagaacatgagacctcagctttcaccctttgttgtattcaaggaagagggtgttgaatcggctttatttcggttttgtggaagtactttgggtttaatttctttctcagtttatatattgtctttcttctgcaaaaatcaagtgctggttttgaccatgcacttaaataggtcagcacatttctaaagtacactatgcgcttctgaagtactttatttgtaagccctcatctagggaaaaaatcaatcagcaagaaactcttgatgatggactacgtgctctcaattaccctgaacatcacagaaggccttcaaagacatcaccttgtatctgagaagcaaaactaacatctgtgaagcaacaattcgcaatacaagaaacactataattaaaagtcaattatgtttcaccatctgcctttatccctggaggttggtcttaaggtagagaggggcaggatatccttggacacaacctcacccaattaaaaatcaagacaaattaagatgttctgtacttctgtcctgtccttacttgattaagcccacccattctgccaaatgcaaacaaagtaaggtatggacaggaagcaggtgaaggaggtagagggaagatcctttcagaaaagcagtggttgcctactttcagtcaatgaatatttactaagccgtgtccaaagtacactttgctgttttcacttctttgtcaaaatattgccccctcgcccccagcaggaactgctggaccagtctgggcagtcacgctaagccacattacaacacgatcagcatactgcctgacgcacaaggcacggggcctctggacgcgtgttctgagcccttcgcaggagactcgtcctacagagccgaagaaaacagaaaatcatgaacacaaagaagagcacgaagccgacctccaactggcaaaatcagaaatctctgccgagaatggctcgagcgcttttctcggtcctctcttcctccgctgcccacccgcaggccggtcgcccgcccttcccgcgccccgcgtccgccgcgcgtacctccctctcggtcaggttcttgtccggccccagcaggtacggggtcaggaagggctcggacggcctgaggctggcgaagaagccgtaggcgcagagcagcgcggtcggcaagaaccagcattcgcgacggacccgagcggtccgcaggagcacagtggccgccgccgccgccgcccgccgagacaccgggccgggcacatccatccggggcgcgaggggaggggacccggcccggccccttccttctcctcctccgccaactggagtgagggtcaggcacttgtaaccgcgagtgacgccttctccctgtaaggccaggacgttctggactcgccgccgcctccggctacagaacccccagctttaccctacagacgcctctagggtcgctgcctgatcgcccagtttaagggagacccgtcctaaggcccaccctctgccaccgcctccactccgggaaccaatcacagcggacgccgggaatacttgcctgctcttccattggtcgtgggtcacacgacgtgaactggggcggtggcagcacgccaggcctctgacgtcccagggctcaagcgcggaggacatgtggaactccactccaaaagcggcggcttgcggcggagctctctctagtgaggcggccagctggcgttcgtggcacacttgctgtcggctccgctcatctgttgggaatgcgtcctgtgggcctagtcctccgctggaagaaacgcgctgttctccccaaccaccgtttatcattcttattcaccgtctccggaatgtccattcagtttccgctcctgagagacttagtgactgaggccaggcaaagatttcaccttggggagggggaacgttaaacctttcctccagcagctttcgtgttttaaattgtattcatccgccatggaaagacatcagaagcccaggatctaagagacagactgaaatgaagaaagtagataatattgtgagaataatgaacaagctggtcactgaacagcagaaccgtaatggagtcccagttaaagggttttaactttatttcgtcactttttgcaagcatgatacaaagaaaacaaacacctaactacgctacggtttatagttaaaaggaaggtggaagatcctgagtcattacagcaatcacaaaacatgatggatttcttcatttaaaaacacaaaagaggtcttggcatagttttcaagggcaaagcatgacaagactctccagtgctttctttcatccccctctgtgtgcctttttctgcctgactcacagcctggctcaatcctaatctttctactgcaaagatgcagcatttaaagcaatttttcctgtgcagtatttgtagaatgacagatcctgccagaagctcttggaaacattttggaactatcttgcttttctgtatgttatgatccatctagcaccgttttcctcctgtggtagcaaatgacacttttttcaagcatcagcagcagaaatgagtctaccagatggaataagatactggtaaagggaaagatttgtttctaagactgcacaaatgaatgcacccaaatctgtgagttgattaatctgtgaagaaatacaactggcagtatttacatatctcaatgagtctcaaagtgtggtcgaggaagccctgggggtccttgggaccctttcagaggttccacgagctcaaatctattttcataaccatgctaagtctttatttccttttccactccagaggctatataatgtctgatgacatcatcgctttataggatgagagaatacgtgcttgtatattcttgtgtttgtaagactttccaggtttaatttattaccatatggcaattttcaataagtataacccacaaaacccaacagatttttggggcacctctaacaagggtcctaagaccaaaatgtttgaggactgctaatcgatattattcaattgtctagtcccctaaactccaacccttcttatcaggactacagagagaaaacaggtggtcttcttgacaatcgctttgtatttacattcagtgctttagtagaagagaagaaagaaagagaaagcaagccagagaggcctcggaaagagaagcctacttatta

SEQ ID NO: 35212 - DNA, 2125 bp, Homo sapiens
aacaagaacagactgagtactggaagaggaatgtattctctctcaacatcaatgaccttgaatgtgagagtgattacagagttttgacacctagcagtgcctggacccaggtctcaaatcctgtttgtactcctgctcctatagacacaactgcttttcccaaacttgcagaaactggactcccactaagatggaaaagggtgccggccgcggtggctcacacctgtaatcccagcactttgggaggccgaggcgggcagatcacgaggtcaagagatcaagaccatcctggccaacatggtgaaaccctgtctctcctaaaaatacaaaaatttgctgggtgtggtggcacgtgcctgtagtcccagctactcgagaggctgaggcaggagaatcgcttgaacctgggaggcggaggttgcagtgagccgagatctcgccactgcactccagcctggggacaagtgagactccgtctcaaaaaaaaaaaaaagatggaagagggaaagggtttgagacactagctggatttgagagatatgtttagctgaggtcttaggaaggagactgcaaacttgccagcattgtagtgattggctaagctctgctgttggatttttctctgagaatgagaatgaatgtggcccagcattcagggtgtctcctttgggagttcccatggggcttccagagattgccagaggcacactgggagcagtcacagttacctatgaggtggcagttctgcaagccctgtctgtgactcaaagcagcctccttgtttcctcacatcagacagacttccattaagaatggggttcatgtgagaccagaaggggctggactatatatttagccaagacaggtggtgaaataatttattttctgatatactttatctttcttagagaatgtatcagaacttttttgggaaagagtgatgagtcttgatttgtaaaagcatgtcacctcttatggtaatctccaaagcagcatttacaatcacatgtgaatgagtcataaactaagaaatgttgaatgatctgaaataagggtatgttgatttctctcatcaaatattcatttttggcaacataatggactcaaggcacagatattaagtgctttgaaattctcaaagccacaaagacaggccatatctatgaatgtttctgatatgtgactctcctccctccttccctcttaatgaggtataaatgcattcaaacacacagtcacacatttattttatctcctctcagttatgtgttctccatgtggtttggtgagatattttaaaatactcttcaatggataattaaaggttcaaaaaattttatgtaaaattctcccagatagaagagattagtaaagaaatattctttccaagtctcaatctgaatacaatactgattcaggacccccgtccaggttctcataactgcaaattcccaatatgctgttcagcttttgtctccttctcaattctgattttcaagatgagagttcttggctggaatatttgctaacagtgagaagacatcttcagttcttggtgaggcattcaggtattacagaacatgactatttaagccgtgtgtgtgcatgcttgtcacatcctgcctggtaaataatttctggtttttatatacatgacttcctctcccactaactgtagggatttttgtgattagaaactaagtgtggtctttatctttcctggtgtctcctgtggtgttttaaatataagagttgtccagtaagtgtttggtggacacatttctgagtcctcatgaattatactttcaaccttcactaatgcttttttgcagctcatttacaggtattataacattccgtttagctatagatgaagcattccatccttatagttagccaagttcttctattgtggtgtagagatctttaggtgaaaccatctttagagtctgtcatgaaccacagggtgaaaaagacctatctgtattacagtatgaacatcctttcaggagaggtctacattcatgcttttgcatataactcatatcagtttaatttctaacctcttcttctttagctttccattggcattccatagcagaagctcttcctaatgtgaaataca

SEQ ID NO: 35213 - DNA, 3954 bp, Homo sapiens
atgctggcaaatatgaaaccacactatcatcaccagccaataatttttaataacctactttgtgtattgcagagaagtacagttttcacaatatctactataacctagcatgctgactgttctttctagtttattttctggcacaatttatttacctctcccatttaaactccttcattggcaactaattgattttttttttggagagaaaatttttacttgattttatttaaatcttcaaatttgtggatagtttgataatttctgaatcctatactaggcctgtgggctcaggatgtaaactaatgccaatagtccctacccctgagaaaaacataattaggtcagttaaacccactgaaaaaagtccatgcaagctgttcaattatttgtttagcctgaataattaaagcttgacctctatgtgaatgtcttcagaactctggctaagtacagttgaaccagacatgccacctactgggaagagcatcaagtatgggtagaaaatagagctgcaataaaaagtaatgagcagtggatggtggtgatggctgcacaacaatgagaatgtacttaatgccgctgaattgtacacttaaagagtaacttttatgtgtattttactacaatttctaaagaggtaatgagcagtattaaaaagcattagagaatagtagaaattaatattagtaattaataccattatattcatagtatatcatattttcattataatgctaataataaatactgatagaatgcttactatgtaccaatactattgcaatcatagaattatagcctttgtcactatttctcccagtctattcataaaagaaaagctttttaaacatttttacttgtcacatctgtaaacaaggttgccacattccagactttcagaaagtctttttaatcagcaggaaggaacttcaatacaaggtggagataactaagacggtaaagccattaccaaatttcctgtcaataaaaagcaggtggggtatgaaattaactgcacaccattcctaagacattgagaagcttcttctaagtgtaaaacatgaaagtacagatgaggtagaagtggtttagatgtggaccagtggtaaaaataaaaccatcgcataagaactttgaactcttgtcattgtccaaacatcctcaatgattgtctcatctctccattagtcaatttctcacatacaacatacttttacccgtcttctccccactccagtgtcattctcctatcaccctaagcaagtcagaatcctgttcctcatgggcgtcttctataatatttccaaaggtgacccacttttaatctggtcactaccatctgtaattcacgatttggagattagggatatgtattgtatctgtttttgtgtctttccccaccctcacatcatcagttctacccaggtaattcttatttgttttgaccttgcacatacactggatttatgggcatggtacaggagatggagggaggtggataagtcattattagactatatagagagggtagggaaaatgagtaggtatgtcagagaaagcttaactgggccctgaatttgagcataaagctcttatttatcctggtttttattgatccttatcccagtcctctcttctctggagttctgcacaggttgccttcatacacatctaatatcagatgacctaggttaaatcatctccaaaagttttcacagtctgattccatcccacaaggctactcatctaattgtctttttctttactactcagggtgtaatctgttaggcttaataggctcatagtgtctatttgcttcttatgtttgtcttctctatgcaactagatgatgtatttgaataagccagagaagtgtcttttatttcctttatatactctcccctacaatgcctgtcatagtggtttgctgtgtcgatagaatgagcttaatactttttaaaaaattaaaatgatggtacatgtagagaggttaatatcaagttttctttacatgtaccaaatgcaaaatacatgtatatgttttggtggggacagttcatacaagccagagataataaaatcttaaagctctgtagtctctcccaacaatttaagtacttggatatgaaaaaccttgttatctgggcattgaccatgtaaatattattccacacataatcattttgtctttgtctacagctttccctatctctaggctatgagaatatatgaacttgggagaattaggcattcagaattttccataaaatacttctccattaggaaatataaaacaagaaaaatgctaacatggagctatcagatatttttaagtatgtgttaggcccactgcattggggcatgtgccaatatttcgtaaaaccaaaattcactgcctagtaaattgttccttcctggtctgtccagagaagtaaatggtgaaatattcatggctcttgggaacatccaagctatttggcaagagcttttccctgggtttgccaaaatggccctgaactcaaaatatggtgtttattcaaaatgattataaaaatggcatgaagtttgttatttcttttaataacttgaaagaattctggagaaataatttcatgtttcttctagtcctttcatatttttgatacattcacagctattcttttccaaattgcaattagaatgactaataatgtttagaattttatctgttggtttctcttaagtcatgattctaccgtgagtcatttaacttctttccaaagcacccagttgtaacaaacagtggtttatgtcactggagacgtactatgtagtcaaacttgtaatttcatctaagtgagatcagagagagaaataaaaagtgggtatcttttttatttcaaaataacaggggttttaatatttctacacagcattagataatagcccaaacatattattgatccccaaacaagtattttccagatcaattaatagtcattatcaattaatattcatgtctacctgtctgagcaatggattagaaacattataagtttcattttatggaagagaaagcagactaaaagtctagggatatgatcatttggtttctggtttcagttctgacactaacaagcaatatccttgggcaagttgtttaatctttggggccttatttttctcaagtagagaataacgaagctggatctcatgctccattcccatctcttccctaccccccattatttcataagattttcttgcccctattatgccttagtaaattctagatcaagagagatcctgcccaatttcagagtagagaagcccaggactagctgcgtaatttgtggggctcattgaaaaatggaaatgtcgaattccttcttaaaaaataaaggatttcaagagggtaactgcaaagcattaaatttagcatgcggtccttctgagcatgtgaccctttgcaactgaacagatcacacacatccaagaagctggccctgtagaaaacaaagaaatgttttcccccaccttccaacattctcttttgctcttaacggaatggaaatcttagaaatgttgatgggacaatgacatgaatcatgaaaagaaaggaatagtgggaatacgaatattagaaagccaatgttttgtggatgtttgaaactctcatatacattcatagggcttaccccactggtatgggcaacaggtaactctggtagtttctaaagatgctcccagtgaattatgcctcctggtatgtggtccttatgcagttcccttctacactgaatcgagactggcctgtaatttgtgttcacaacgaatagaatgcagcaaaagcaaagccctgtctcctagagattctggtatgttgtctctttgttctcattggttttaaggaacttatttatttctgccttaatttcattatttacccagtagtcattcaggagcaggttg

SEQ ID NO: 35214 - DNA, 1575 bp, Homo sapiens
tttattctcttattggtatgacaactcctctgcccacttctcagattagataactagggttctcaggctttatctactctccccacagtaaaatacgcggattttttaaaaagttcctgagaaacttgatcaccttaaaaatgtaacacaaaactgtaaagataaagtttagtgttaccaaacgtttaactgaaaccaaagtgaaggaagtgctttgtttcctccttcttaagttagaggaactgctgtgaaatttcagaaaccaggcaggtgaatttttggagagggacgggttgagatcatttgggcatccttcaaattatatcaggcgtgagaacacctatctacatattcataacacaagctcgtacctttctcttctcagtttctgtttcagttactagcttacagggcaaattttccttgtgaatttccaaataggcacacttttcccagtgtgaccacccaaatgctctcttgccactattctcctattacctgggtacctagtttcttatctcattttgttctcatatgctttgggtgccacctggtagctgctgagagctaaaactgttagcgtcattcttattttagaaaagacacacaggtgatcatttcttttatataaacacttgtgcctttagagatccagaaacaagcttattaactttaaattgcagaacaatgttaattccttttcaatgtatgttaccagctgaagcacactggctttttgttgttgtggttttctgttggtttgttttgcagcagcttctctgtgctatctttcagactttctctttttgcctcacccacagtgtcacctgccagattacatcagccctctggaatgttaaggaaccggttttagttgtagctctgggtgtctcagaagcatctcatgtctaatcttgtgaatatctaagggcagaaatcactgtgacccagtgtgatttaattaggagattagatcaaagtctgaggaaaataccgtgaaactcatgggattttttcatttctgaggatgtgagtctccaagaacttcgggacttcttttcatagtaccagctcttcttttcatcaaaggtcataaatagtaagacaaattctctcatgtccataggcatgttgctgtccttatgtagtattcctttttggcagattaggaggggacctatcaagcctgagtgaatatctttttcctggaaaaacagagtaaattgtattgcctctttctcaggaatttccttgctcttctgataatcactcatcatatagaaaaggaaactttctgataggctctgaatttgaagatgaagattataaatgaatggcataataagcctggatatttatcacctaattctgttgtattcataatcctccttcctctgattgatctttatcccagtaacaatgatgataataataaattgataatataagggatactatttattgagaatctattactatattaaatgatttgcctgcaatctcccatttaatcctgacaactatcttatatggtaaatataaattcattcattgaacaaatatttaccaagtgct

SEQ ID NO: 35215 - DNA, 884 bp, Homo sapiens
tttagaactgcagcaaatgccggaaccctcattcagggaattccttttgttctgaaaatcttactgatcacttgaaatgtcttcatgcatgcctttccaagactcttgggtccctatactcattttgctctactttgatgtgtcaatccatctttggattacttgccttctttctgtcctagccatatattcaccctgaactcagtctaggatactattgacatggactataacaccttccattagtcctactctctcacccttttcctcaccacgcagagtatgtctgtgtacacacacacacacacacacacacacacgcttggaatagaagatcaaacgcatttctaaggatgtgagcctttgacctcttgcttaaaaatgttgctatgatgtcacccacggatttcatcaccaagtctttggactggaagtgaggattggaggtgccccttagcgagtagattttaatccatgtctctgactctaggcacagtcatatttcaaccacaggaatgaaaaactgatgaacaaaaatagtactctgacttactgctcatgatgtttgattcataaaacttggggtcatcacgtttcacctcatcaggattttcacaaaacttgttgatgttgtcctcaaggtaccagcttttgttctcatcaaacacagcaaacacagcctgctgttcgatgtctgctgccctctggaggacaaaacagtatagtactggtacaagaacagacgcatagaccaatggaacagaatagagaactcagaaataaggctgcgcacctacaactatctgatctgtgacaaaagcaagcaatagggaaaggattctctattccataaatggttctgggaaaactggctagccgtaggc

SEQ ID NO: 35216 - DNA, 1167 bp, Homo sapiens
cacctatctctcaaatatctacctctgagatagaggaatctggattctcatgtaactggctcagcatgcagttagtttatccccactcccaaaaaaatagctcaaaccacagagggaggctataggtgagggtgagtgtcagacatggaggaggagatgttttattttaatgcagagggcataataaaatcaacttataaggcttgtcttttaccataaaagatactatctgcttactaggtttgcatctcatttccaaggtaaaattttactttccctaccaatatgtatttacctttcttagattcataggaccagaggcaatattatatgccaataatcatgtctccagtgaaagctgtgggagcattttaagcaattgctcataaataattgctggctgtagggaatgtagggacaaataaacagtaaaggaagagggatagtgttgcaaggttcattcactgtgcaaacagcccaggtagggtccaaagtctacaattcttacctcctcccttatttgaaatgaaacctgcatgtgacattttgatattttgaggtttctcccccttcttctttacattgctgaacttctgatgcagtcgtctagaagcctcataagtaggtgaagtggttgttcactatgtcactgtatgattttaagaacataggagaaactcctgttcccactacctcacccagagtcttgccaaattcactttggaagaaatctcagtgccacagttaatgcttcattgtttttcctcaagccaaagattaagtgctaatgcaagtactcctaaggaaggtagttcattgacctattatcagtcacttataccttagtgggtatgagtttgacaacagtttatatagaaaacaataaatttaaaaattactttctgattttttctgaaactaacaagttttaagataaatactaaattatttgaacacattttaattgaagaattatctttactatcatggctaatatttattatctgttatatgccagtcattattctaagatttcacgacaacaaacctgtatgacagagacatgattattattaccattttacagatgagaaagatgaggcacacagaggttaaataacttcataaaagtcactgagccaggatttgcacttattagtctagttc

SEQ ID NO: 35217 - DNA, 1807 bp, Homo sapiens
ggttataatcatttccattttatagatgagaaaactgaggctcagagatgctaaagtcgtagaatcagaaatgataaagctagaattttaacttgtctgcctttaaagcttactttcttaaccacttcactatgtccaaaagtctaatactattaatgcttctagtctcaccaccaccaaataccacttattgagtgtcatctatgtgccaggaagcctatatcaggctagttctatgtcactatgtcagtggctcatgggccaaacccaaccaatttcctgtttttgtaaataaaattgtattgtcagaggcggtcttactctggtgtatgacttgagggaaagaatacggtaacaaagttaattagttctggcatctgtaaccaaagccaaaaaaataggtatcgtctatggctgcttttgtactaaaaggcagagttgagtacttgcaacagagatcttatggcctgcaaagccaaacaaacttactatctggccctttacggaaaaatttactgacccccgccttaaaccatctttcaatgtatgtattattattcccattttaagatgaacatatgagaattcagagaaattagataacttgccctcccaaacattaaagagtaagaacccagtgaaaaatgcaggtctagaggactccaaaaccttttccttttcttctctcaaaacttacaacagcaacaatttttataattaccagttgcaagagatttccctaacaacacgtggttaacagtatagttttaaatgttgatgctggtattaaagacttagacattttcccttttcagaaaaatattagatttatcttaccttctgataatttactgtacctaattccttgaggatggatgctcaagggcttatctgccttatttttaaagtgaacttttatgatgtctccgacttcagcatataaagtaggcccaagaagtcctgtgaaaacaaatatttaaactatgtctgtattcagggtcatcaaaggcagagttgctaagcaagaaaaacaaacagatgataccaagagtgattgctaccattcctcctggtcctgaggctgactcacttattttcaatctagaaggttttagcagctcattaactcaacattacatgtacacagatcacaatagaatggtagaaacacttgtcctggacccaaaagaagtcaacagagtaggagaaatagttctggccaagtcttgcccactttgacccactgtcattccttagcaataactttctttgcttaagaaagatgttcatttcaattacagagggtgatgcgagagggtagttactttagatttctctgacatgggtgtgctcagagacctagatgaattgaggaaccaaatcacacagctctctggctctgaggcaggagtagtcttgatgtatctaaggaacagtaagaaaaacagtacgggaagaaagaagagatgaggtggatggtaggtgtgtagaacaagggaggccctatgggctacggtaagaacttgaattttcttctaagtgaaatgggacatcactggagcatttttctttttttttttgagatggagtctcgctctgtctcctaggctggagtgcagtgatgcaatctcaggacccactgcaacctccgcctcctgggttcaagcaattctcctacctcaacctcccaagtagctgggattgcaggcatgcaccaccacacccagctaatttttgtatttttagtagagatgacttttcaccatgttggccaggctggtctcaaactcctgacctcaggtgatac

SEQ ID NO: 35218 - DNA, 3918 bp, Homo sapiens
atccatttgtgcctcagtttctacaactatgaaatgagattaatactgaaatctccttcacagaattgttgtataattttaaataagttgatatgtgcaaaaggcatagagctggcacactagaaatactcaatccatgttagctagtaatattattttgtaaatgtaataagagttagtctttacccttcaggttttctcagaaagcaaaaacaaatctgtagttacagtaatgctcacaaattgtaatatgtggaatacagaaactgtgttaatatgtgggggcagaattaaaggaggcacgtaagtacttttagaatagctagatagagaaggtagtggattctccatcactggaagcattcaagtagaaattagacaactacttggtaaggtcattggtgctgagggaaaggggaaaagtagaaggttaaagcgtggaagttgaatatgaattaaatgaactcttagcattcttctaacttaagaattccaggattctatatactaatgtccctaatgtggaagtccatttttatttatttatttttagtacaattgaaaagttattgtcctcccctgccccagatctttaatacagaaatgtagatgatggtgtaaaatctttactaaaaaatatcagtctcttacgtggagtaatttcaacagagagatgtttcctaacatgtttttactatgtatgctgtgtattcatactgaggtatgtctattttgatctgaacaatttctattggaaaataatctatctgattaaaaagttacagatcatatgaattcaaacaatgtgtacgacgagtttttcatttataaggattgtttaaagatgatttgttcataatcacaaaatcatataaagctagaaccctagaaggaaaatgtatgtatatcttttcttcaatatctctttgtatacatgtgagtgactaaacaagttttctaaggaaatttttgaaagtgttcaccttagacttggagcaagaataatagatacattttacctttaaaaggcattgtcctgctaatattatatgaaataagtagatagatgtctgctttgtgctaaaatacactttgccaaaagatggagttggctatgttgatattcacctagtgagtatcatagctctaggggcaggacaagttagaacaagttcttagtttaagcagccagatatatggattagatttttcataagaaaatgctagagagaaatgatatgatttagggttaaacaatatgacagtttgtctgggttgtgtttctatggttttgactcaacaattcctaccagaggaacgaatctccagaactttggaaacttacccacaggatgaggggacagaatgaccagtcatggttccctgtgtactcaccatgtgaatcagacctttgccctatctggttctgcctccggtattttgcttgttattttcaacgctaactacagacaagagaaaaaactcccaagcatgaacccagcatgctacaagaaagccaacaaccaagtctgcattctactcatgagcaggcaagattagtgttagaaggactgttattttccttggggttttagcttacggcagttcccaaagggtgtgggtgtgacctagattatcactttgaagtacgatatttaaaatgattatttttgagaaggagggatctcttcttattataagaccaagatggtatgtaataccctccaaaataacccagttacaatgagagttttaaaaaggttaatattatacactaaaagatctcaaaatattacattattttttggcagattactttggttttgtaattgtaaaagaggaacacatctttcataatgaagtgtgatgtaaggaaaaaaagtgagtcacactagcaggtttaccatttaaaaaataactaactggaaatattgaatagactgtatgatttagttaatttctgagaagtcttatttttaacatttcaattagaaaaaatagtttgcaactcaaggatagtattttatctgaattaaacctcctctcagttacatatgcctttaagtagccaaggtaaaccatatcccaggacatgatgaacagagagaaaaaaaaatgaagagtcacattcaataggataaataagtcaaatatgaagcagaaaaaaggtgaaagtacaaaaacatacaagaactgatgatattttgaaagtcatttataaggcagcaataaaattatatgacaaaaagcacaaggtgttcatttttagttttagaagatgaagctatgtagacaatggaataaataatatgtaactaggagtctcataaaaatactatacaactaaaaatctggaacaggagtttgcaggaagggctaatgagggagcaagtgcctggtgcctttgaattaaccaatatataagccaacacaaacatactaacaaaactgtattgaaaataaacttgaaaagaaggtagcatctaaccaatcaaatagggtgctttctaaaccctcagaatgataaactacattgttggatgcaaaattagcatttgcccagtttatttaattcagtatactctcctattagttatatttacttacctgaagttaaaaaaaaaaaaagccatgacattgcaaagggaatgttctctaaaagaaatagattttcctctctagagaagcccacccggactccacacctgagttaccttgagtttgtgggctcaggtcggtagctccaactgatgccctgagcagccacgtagaactgccttagctgtgccgcttctgtcccttggctcccccagcctacccagctggtgcccaagaccaccaggacccagaggcgtgggcagcctgggaacatgcttcctttcctgctcccgctggctgccaccaccccaggacctgggcagcgcttgccgagctgctaaccacactccgggctgtcccagctgcaatgagctctagaggctgtgggtggcagcgtcctcctcccctgcagttcttgcaaacggcagcagcagcctctggctctcactccctccgctttttctggggcttttcctggcaggggtttggtgagatcacagctcccagtgaccagaggtattagggagagcaaccaaactagtgactgttttactgcaggtgaagaaggggcagagatcagaggctctagcaggcgggacaatgcccagggattcatgagccggacaaagctgtatccctccatttccacctgccaacaccacggaagcagtcgtccgttaccactgacctgaggcctgcctgggtccaagctcacacttggagaaccttctgtgcagtgcagtggcacccaaccaccttaagcagatggctccccttttaatctgaggaaaagagtattgtgccctgttactgggcactgaaacactattttcaagtggtgaagaagcagggaacaaacacatggacaaggcctactgctctgaatcgccttcctggcctctatcaaggcacagttctgccttgataagggcctgtcgccagctaagctgcagcatagcagcgggcttgaagagcttggctgaaaaaaatcagttgtccagatttcagtttcacttactagctgtgttgtcttgggcaagttactgtacctctctgttcagttttgacatctgtgaaataaggatgacaataataatttttcctgatagggtatgttgggaggataaaatgctactgtaaactatagttccagcacttaacacacagaggctaggcgcagtggctcacgcctgtaatcccagtactttgggaggccaaggcgggtgaatcacctgaggtcaggagttcaagaccagcctggccaacatggtgaaacccttctctactaaaaatataaaaaattagccgggcgttgtggtg

SEQ ID NO: 35219 - DNA, 1558 bp, Homo sapiens
aggtttctgtcttatgctttatgcattcagtacattcaataaattgtaatctggcacctcacatgaggtctctgttaatgatatcaggctcatcaacagcctcttcctccctccccactccccccaatattctgtcttttctcctgtgctgatattattgcaccaacttagaatgcccattttcttcctctttgctgggccattctttacagtccagagttctgcctatctcccagattctgggctcaaattggcttttccattttatgaactattacaacactattcaaattatataatcatgttaattaccttttgttattccatgcaggtatctattgtctccctaactgaacagttgcttacacttctttatctacaatattatcagtgtctcccaaagttggcagaccatcagaattcccaggggaacttttacaaaatgtagattctgactcaggaaacagggttgagaccaaagtcctagaacacctagcctactgattgacatttaaataagcagtcagagatgctactggcagtgtatcagagaaacgttttgaaagcactgtgtccctaaatcccaaggttactaccagaattgttgcaacattattgtaacctttgagtaggctgcttttttatttgcatgtttgcttatgtatatacagtgtacatgacatatttatttaattacattttacagagacaagatgactactataatttttggctctctattttttttaacatcagttccagataaatactatataactttcaatgacctatttattaaacatgggatttaaagaacatgtaaaacacatttgttcttccctgtaaaatattaaggtgatgaagaatttttccatttctctgattttctcttgcagtgtagggtgtgcgatacatatttgctgactgaatgaatggttgaggtgtaaataggacaaccataattgtgtgttattacactgatggtaaacaatgtgatgtatacagaccttactgaacaaaccataaaatagaggaacacggcatttggggaaaattcttttaattacgcatttgaatattggtctttgggtcatttgagggacagtgactggtggcaggaaggtccacggtgacatgtggccttctagcttgattcttggccttctgcagcctctggtgccatccagaggactctctggaagcctcagagcagaggtccaagaggcctcatcaacagcaaccactggagactccagaagatgctacaggaatttcttccaattagagatgccacctgctttccaacaaagtggagaaaaccttccttcaatcaaaaaataaagaggtatttttatttctccacagtctggtcttcttgtgagtcagatgctccagtctctttggttcactggtatttcaagtaacaggtgagtcaaagcacagagactactgcagaaacatttgctcctggcttctgtggcttgtgttacaggaagagaagaggtgggacaggaaggggtggtaggttgagaatttgagattgtaccacaatcccaaa

SEQ ID NO: 35220 - DNA, 786 bp, Homo sapiens
gcatagtaaccctcgcacagagcattcagtaggatttgcaccattaacaaccctccatgcatttgcctgtgggcattcaacatctgtcatttttttaagttataatatttttagtcatttttttcctctaaactctggataattattattcattcttatgacagcaactgtgtaatcagctgtcgaaacactgtgaagggcaaaagaaagaaagccacaaaatattgtgtttctgtgccaagattttacagcgagcaagggagagttagaaaaggaattctgagatttcagagtcttggtctcttcacctttgcttggaagaaaatatcctttcccttcattagccaacactttcttgatcctgagagtaggaaagggaacactgagtcttttcagttgaaggccgtccttgcctgctggactttgatctattgaagtggtgatgggtgttgcggtttcagccataaaggcatctggcatagtaggcaagaagggccagagacccgaggagagttatctgtctctgttaacttcagtgtatccctctagttccccagatgcacctgtttctgtaaatataaacatgcatgtcatcagaacacttaatattctgcatactgatcatgacaacaaaatgtaccttctaacacagacactctcactaggatagaccatgtaggaacatcgaattctattcagttaggacagtgatgatgtctacatattatacctctgtcaaaacctacagaatatacaacacagcacagagtgaattctaatgtagcc

SEQ ID NO: 35221 - DNA, 861 bp, Homo sapiens
gggcattgggcccagtgagtcctggaaacctcatctgtgccagccaccccggcatggcctgtatgagtggatgagggtgacttgtccacagacaatagccatctagctgtgataaaggagtcaaggtagtcagctgcatctctttcacctgtttgccaatgttacacaggttgaaaagctaaggtttatgtaaagcaagcatcaaagatgatgaaatgatcaacctgacaatgagtactatgctgcattgtccagaaaggaactgtggaagattttgggctgaatttcaaaacagaatttcctcactctctggatgttggcttacttggcctttgatgttcagaggtggtgcctttgtgttgttgaacaatgttgattttggagagaaaacagagttgaaaaacccacaagtcattccctggggagtattaccggaatacagaggataatttcagcaagccagcaaggcctcatctctgcttctaatagataggaagaaaggaagagaggaacaatacttttttaagaagctcagctttatcgccttatctcatagaaagatgcctccagtctgtctggctaaaggtaattggcatgggaaagtctttatctgtgattctaacaagtggaatgtttcccttcattaagagagccttgtctggcttggggaaatgaaacactttctccgatatgagtgggctgtaacccctgctactaaatactcagaagaaataaggcggttgtggagcagtcaggaatgagtcacttgcctccctggaatattcagaaaactgaatcaaaagtacattcttctgggttttcttagtctaatagactaagggtctctactttgttaaattt

SEQ ID NO: 35222 - DNA, 814 bp, Homo sapiens
tggcgcgcagtggtgcgatcttggctcactgtaacctctgccacctgggttcaagcaattctcctgcctcagcctcccaagtggctgggattacaggcacctgccactgtctccggctaatttttgtctttttagtagagatggggtttcaccatcttggccagccttgtcttgaactcctgacctcatgaatcatccttctcagcctcccaaagtgctgggattacaggcatgagccactgcgcccagcccacaggtttttcaaagactaaacttaaaaaaaaaaaaaaaatttcccaatgaaatataaaactaaagtgctaaactgtgatagactgttttacaagaatgccagttttcacaagtgtctatagaacatgtaatttagataggtaagatgaaattttgataatatttgatggcaaatttaaacaggtatacaacaaaaataaaattctaagcccctcaaccaactgaatggactccttctctcagccaaaggaataccaaagtaaacctgaaaaactagttttggccaggattgggggtaggtgggggaagcccaacatgactcattattctctcctccctttggaattcaggcacaactgaatgtcagcattgacactaaaacacagatcttaagactgacaagccagactctttgtagcagagagccaggccctggaagaaatcaagttattttatcccaaaaaatatttctttgatatattttcaaatggccctgcaaagctgtctcttgtggggaaaattgacatgctgtacagaatttccttctctttccaagttttta

SEQ ID NO: 35223 - DNA, 1617 bp, Homo sapiens
ggtcctctttccaagcagctctggaaagaaaaaaaaaaaaaaaagaaagaaaatgatgattaaagcaaaatggcacatttcactaaagtgtaatattaaacagccacccccacccctccctgtcccaccatacagctgctttttcttaaaaagttgtggggaagagagagagataagagatttggacactcatacacaccttaagggttccaaagtgggagaagaaaatcaactataaaaacaaacagaagaacaacagcaaccaccaccactaccacctggacaaacataaagtccaagatattcagacaggacagcctagctacttgctgtctttcagctgtcttgatttgtgtccaaccatattcaccccctaagcttccagaataacttcacttctgtcttttacagaagaggtgcagtattttattttggtaagtcagcgtccctttaaaaacatgcataggtatggcctggtgtgtgtaaattcatccaagacttcactccaaacatttagtcgagaacagcagccctaagtgtatagaagtgggggtaatttggcaataattagtaaagactaattcggtggcagagcaaacgcaaactagggcactgcagtagtttggagagacctgtagaaataagaagcaactttattgagaatcttctatctactgcgctagacactataccatctgcctcaattttcacagttctggcaagtgggatctttgttccctttatacaagatttacaatttgggggagaggcgggtcacccagtcccgcggctaggaacgcgcctctttcctctcccatcacgctgcaaggcttggagtcacttccggctgcaggtcccggaacaaatccgaccccagaagtggggacttctggccctcacctccccatttgaatgtaatgtttacagtgatccagacctggggatgcttgcttcccgacgtgtcctgggatcgcgcttctgaaaaagctcacctcacaacgcctcctccggacctaaatcgcgcaccagtgagtcgagtcctccaggggctagagaagcccgactttctttccggccttgagggacccgggctcaccaagaaaccagccgccctcctctctatggttttggagccggcggagagcgcgcaagggttggcgggactgcgagtttccggtctgggctttggcgggtctggtttgaagctctcctgtttgacgaaagtatgtctcaggaaggtgcggtcccagctagcgcggttcccctggaagaattaagtagctggccagaggagctatgccgccgggaactgccgtccgtcctgccccgactcctcatatccttccttggttgtcacttctacctagagaagggtgtgggcgggtcgcgaacctttctcttctgtcccttcagacccaccgccaggctgggttatattaccgcggcctgaaccccctcttttctttgtcagtgagtgggatgaaaagtgagggactggaggggaagcgacaaccgtggtagatttaagtaaggctttggccctggaaagcctcgcggacgtgttctgacccaaggttttagcagtggatgtggcgttttcttccattccttctttca

SEQ ID NO: 35224 - DNA, 2445 bp, Homo sapiens
aaggtagaaaaggatatcctagtatcccgtaataggtatttcgtagcacttagcatctccactctataataaaatgctgagttgacagtctctgacttgaatatgcatcagtcttccctttaataatctccctccactcttttgcctacttgggcagcacataaaatttctggaccgcttgtagattaagaaaacccttgtctaggtcaaagggcaactcatacactcaactaagaaacccgtgtgctctatggaaatgtttctaccaaatattttcttttcccagcaattactcgagactaccttggtcctagctcccttagcttgaaagttccaaagataatggcttgcactctgagtattaaggatgcactgtactggctgatattctggtatccagcggtaacgttactccggcccttgctttcgtgtttcaggtatatattccctctgcggaactcagtccagcattgctagctgacaagcaatacacaattaagtctttatggaccaaaataattgtgatttcagctcaagatacattttataagaacatgggtccctaaaaacagcagttaacagtgacccccaaaattcgagacccgactccgagaatttcacatggattcctgaatatgctcttccgagaaatgtttcatctttattctaaacagaaagcactatgccaagacaggagccagctgggccttgggggacgggcactggtcttggatcaagaatgaggccgccttcccgagggcgggcgcgcccccaggatccccccgggctcgggcactgccgccccgggacagtgacccgcccagccgagcaccctcgccctgcttgccgcgaccccgcggggtcactgaagggccgaggcgccgctctcgcttcgctggcccctcaccttccacacctccctgcgaggaccgactccgcggccgccttggagagctctggccgcgggcgcctcacccgtcgggggccgcccgcgaagcgcagattacagggcgccccacaatcagcaaggggaggctgctccgaagctgagagcacagctcaaccggccgccggcgccgcgccgagctcgctcccgcgcgggccccagagcgcagacccgcgagcggggcgcgcgcccgccgcctcctccccgcccggccccttcccccacggcgcagtcctgcaaggactgggggcgcagcgcagggctccctgttacctgcaggaaggcggcgggggaggaggccgagggtcttggctctggtaccctgttggcccccctgttgacaccaaccacccctgcctgcctgtaaggctgtggccactacacccacaatcttctgggggccgggtttctcctacaccatagagacgggtccggaaacgggacagaaggcccaccttcctccctccgacgccaccaatgaggccaactaaccaggaaccgaggtagagaggccgcacagctgagtctcaggccggtgccatcttaagtgtgggcgccgcgacgataccgagtttcactcactgccccagtggtctagttagtccacgaagatgccccctttctagatgtgttggtcgaatgcttaagtttgtcttgacttgaatttttaggcttttaacagcacagttttaatttcatttccgcccaaatccaaaatggctgctggccacttgtagcaaacagtagaggtgcagggcggagaaaaggagtacgggaattagcgaggactttcaggagagtgacgtcactcaacctgtagctttgattggctgggctgcgagggtggagtcgtgcagagccgctgctggcggaggtcgtggtgatctcgcttgatctttgagagggaaggtcctgaatcacatttcatttagcaaaaagtaatatttgaaaattttaatattaatgcagtagttttgcccccctccatgctttctgcagtgtcagttacctgtggtcaaaccttggttcagaaatgttaaatggaaaactccagaaataaacaattcttaagtttcaaaccgcctgtattctgagtagcccgattaaatctcgggccatccactctgtcccacccttgacgcgaatcatctgtcgcaggtagccgcgctgtgtacagtatccactcattacccactcagtagctgctttggttaacagatgcacccgtagtatagcagagataatgagagataccacctgcttatgttcaggtaacccttattttacttaataatggccgcaaagcacaggaattgtgctgacaatttggatatgccgaggagaagctgtaaagtgcttcctttaaatgaaaaggtgaaagctctggacttaataaggaaagaaaaagagtcatatgctgaggttgccaaaatctatgataagaacaaattatccatgaaattgtgaagaaggaaaaagattcgtgctagttaactaag

SEQ ID NO: 35225 - DNA, 970 bp, Homo sapiens
cccagaataaaacatagagacaaaaagatgtaaaacacaagcaaaagtataattcagcaatgcatactgagtaggtctagcatatgtacttgaagtcccagaaaaaaggtgagagagaatgggtacagagcaatatatgaaaagataatggctaagtgacatcagtgaaaacggcagagtagggacctctagaggctggcactccccagaagcactaaaaacttggcaaaaaaaacctatcacaatcaacctcatcagaactctggaagacagtcaaaggtttacagcaaccaagtgaatgtttaatcagaagaaaggttacagaaacaaggtaggcgatcattatggtcttttcacttaccctagacatccaccccactctcaagcacagtggcagtcttcaagatggcagcccacgttcccactgttaatacttggttctagaggagtcaagtggaccttgctcccaaggaattttgtctgattgttttgcaactgactgaagtttcctttgaggtcagctgcaaggggctttcctttgttttgactaattttaaactcttatcaggatagtgcagctatgcagtcactgaaatcagtgaaagccaagcatacaagctgctggcccctgggataaatagtaatagctgggtcaaacaaaacacaagctgaaagcccaagaggaaagtccagggagtcagacattttgggggaatagatgctttgaaaagctattgcatataaagagaaatctagaaatccatgagcatgctcagggcagaatacatacccagaaaaaacctgggaagatcataagcttttacctctggctggtcttcaggctctgtgcaagcagcaaatgaaggctaaggtaaaattgtaaattgcctggctaagtgttgaagccatatccaaacactgagtcaacctacaaagatctgaagagtatttttttcttttctttttttcc

SEQ ID NO: 35226 - DNA, 1366 bp, Homo sapiens
ctgaacaaacctcttaataattactaaatgtcctacaaaaattatgttgtatacatgggagtcaaatggatgacatggatgcggaaagcagaaagagactggaaatcaacatctcaattcagccttccaaaaagtagaatccaccacttctttccccttcatcatttcaaaagcccatggcaatgaaccccaaactgaggcctgagggcggatgcaccagactttattcccaggctctcatgggatttatctattatgggaaaatggagagtctgggaagaggcgaaaaaaaaaacaaaagacgcggtttaccttgccctacctccctctccccctggaataaggtgatgtagcgaagaaaccatctttcaatgctgtcagggctccgccgagtcaggtcaaaggactttgaaacccccccagagctctccttttttctccacttcaccttttccctctcctttcggtgacttctctccctgcttcccatcccgtctgctaaactagcgttgcccagtgacatctcacagccaacccaagaacatcttcagggccctggcaaggagggtaggacagagccttggggagtcgtcaccttttgaggtatctggcgtcctccccttgcatggcggcagcggcagcggcgtggagaggatggggtatcttgagaggcaggcgcggttatttccggggacggtggccaaagtaccctcacacccagaggcgatgacagtcctgaggcctgcaaggcggggcagcagcggcgctgtggttaccacggtgaagcctccagctcctcccacagcttctgtgccccaaaacactggagcggcccagacccgcccagagtcgcctaagccgggccgtcacgacgcatgcgcttgctctgcacctcttgtatgcgcaggctcagtctgaggcggtggcctcagagtttgacgcaccggggagccgagcagggaagttttggtgcagttttgagcgtccgtgtataaggagtggctccgtagtcaccgcccccttgaggatgggaatagaaagggctgtcaggtcagcttgaaaggagagaggggaatccgataaccttttagttagcgaatgctatacagcagtccagctaataagggaggtttctatttgggggcctgaatggccctgattgcacttacaagctctaacttatggagataatctgaccgttgtacaaaatggatataactttgaaggcggcaagtctgtcactttgatgtcttaaatctagaatacacctcccccaaccaaaacaaacaaacaaacaaacaaacaacagcaacaaaaaacagttcctgaaattccaactccaccaattatcctgaactcaaggtat

SEQ ID NO: 35227 - DNA, 1660 bp, Homo sapiens
cgggcggataccctaaggtcaggagttcgagaccagcctggctaacatggtgaaaccccgtgtctactaaaaatacagaaaattagccgggtgtggtggccggcgcctgtaatcccagctactcgggaggctgaggcgggagaatcgcttgaacccgggaggcggaggttgcagtgagccgagatcgtgctattgcactccagcttgtgcaacaagagcgaaactatgtctcaaaaaaaaaaaaaaaaaaaagtaagaaaaaaagaaaaagaaatcccttaagaggaaagttacatattataattattcacaaaggaaacaacccaaagcaaaagaaatctgagagccgctccggcctgcgagagacctggttatgcctgttcccttttcatcaattataccccaccccttttaaatgtttcttcatcatcaaaatcctaaatctgatcatttcctgagttaatctgaaggaggcctccagcgctgtgcacactcccagcaaaacacaaggattttagggcacactaagagccacagagagcaccgctcccgccccacaggtacaggaccccaaaggcacttagatctcccgtttccgccaccgacttgttgctccttcccaaatacctgtttatctccacccttatccccatcgccatttccccccttagctcctgaagcgattaaccagcaacagtgagaaacaatgagagagagagagagtagaggtaagccagaggaaacgaatgtctgcgtggcaaggtttccttaggcagtttgtcaggcactgctgaaggcagcctggaaggaagccggaccctgaggccggggagagagggccttgtgtttggagcccgatgcactgattggccgcggccggggaaaaacccggatgagctgggcagcagtgttggcagtcgcggctgcgagatttgggcacttttgggggtgccggtggcccgggccgatggcgcaaggttgggcaggattctctgaggaggaactgaggagactaaagcagactaaaggttacaagatgggtttacagtggtttaattcttgggtcttaaggggaagaggcggggatgcagctttggcggggaaagggggcgtggaagcggctacgtttgtgttagcggaaggcgctgtaagtacgtggactggattagggggtttcagaggaggacttactgggagtcacgacgggaggggcaagccagaggactgggatcttcttttagaaaaaacggtccaggaatccactgtagggatttgactcttgtgaaaggaatgggacttgggagaggaagtgagcctacagccggggtgtctcccttagggaagattgctgcaggaatcaacggttggaaggttagggtcagggtaagggaaggaggaggggcgcacaccgtattagaattgtgatgaatttatagaagcagatggttggaaaaaaggagcacaggcgtctgaataaaggcaaaaattcggtacttttcacaattcatctggagtgttgcattcacttctggttgccagatgatttttgcagtacttcccaatttttgagaatcagcaaaccaaaagggtctttgagagggtagatgtgaagactttatatgtttatatacatacagtcttactgactttggagtaagct

SEQ ID NO: 35228 - DNA, 1607 bp, Homo sapiens
ctgtaaaaatgcaaaataaaatagaagttactacctgaatttcagaggaactattaataattcagctaatgagttcaacagggagataagcaggctaagtgacattttttgatggtgtgaataaagatcagagccaagaatgtgttcctgttgcaagatacaggatactttgtgtttctggctaaagtcaacaataacatttgcttttgatagtacttcagtcttttaaaaaatattttctgtacatatctcatttaattcttacaccaacttcatgcattaagtagagcaggttaattttcaaccagcttgatagatgaggaaactaaggtattgaataaataattgacttacctgaggtcactgagctgggcagaagcaaagctggaattgtgactctagagcttttaactatactttgggaaattcaaataataagcttgttttgcttcaaaagtcaatatgccaaatttgaaagtcccatttgagttgttcatttacaagaactgataacttcacttcccaggcatttaagagagaatgctatttatagatcttatgaaatatagtatgaatgtgggtcagattctccaattgtctgccctaagatgttaacactggcatggacagtccaaaaagtataatagaagtgttattatttataactttaaagatatttccccccagttgttttatcttctattgctttactgaggctactattaaaatcagtttgaatgcattgattagagcctgactaggcttcggggagtacaaccttggattgttctgtaggatgaaagacaacaatttaaggttaactagcattcctagaaataagagacttcactcaattacatgcctgttatagcatctgaatatgtatcacatatgtaccaaattgccctaaaagctgttaaaatttaagagagggtaatcccatttgaaaatgcaaccaccattttgtttcagtagagcagacagaaccataaatcaaatttaaaaccagataattcagtcacctccctgatttggtcaaaattagttgctttcttttgacaactatgaaatcaagttgaaaaagaaacttcactttgtgacctaaggcctaactcactgatggactttctctgaagataaattaagagatggggcagtttctgttaaatattaacattatgatctgaaaactattgaaactctacaggaagatggctgtttttcccctagactttcaagatagagaatggggtaggagaaccactagaattatcaacgtttaatgttaattttttattttcttagaggaattataattatttgctgcccacacaaaggaattttcctctattttcttttacatagatccatttgaaccacagcgacgtctccccgcgaagaaaagtcgacaacaacttcagcgagaaaaagcccttgtagagcaaagccaaaaacttgggcttcaagatggatcaacctcattacttccagagcagctgctttcagcaccaaaacagagagttaacgttcaaaaaccacctttttcttcccctactcttccgagtcatttcactctcacctcccccgttggtgatggacaaccacag

SEQ ID NO: 35229 - DNA, 1000 bp, Homo sapiens
atccaatagtttaatgcctgtgttttattgtcaaggtcgatttatttgccaggaatatgaggtctctgcttgaaaagaaaatagttttgttatctttttttttccagatctggtcataatccctagcaaagatatactggttaatgttaccaatagggtaaaggtcaatgaaaagcagtaaaacagtatttgtcaatgttttatgaatttaagtggacttaactgtagagaaactattaaaaatcatagtcttctcctctgtactaggcttcctattctaaaatagggctcatttttaaaacttctgaccattcagtaaataattttgtgatcaactatgtatgcatagggcatcgtgctgaggaaaatccaagttagactacaagacatgactcctacactctgtaagaactatcatccattttcagaaagaaaaatttatgtaatgataatgataaccaaggaattataactagcggataaagtgaaagttcagatgtcaaagtaaacagagacttctttgagttgatgtaattcctgagaaaaaaatcattttactatataatagagattatataacaactttaattttcatcacaagagaaaatactaagttatgtgcttgaacaagttttttgctgctgttctctggcgaaaagatcaaagaacatttgaatctcttccagcacctcagaggtcaagccaacaaaactagcttacaaatatactaggtctcctataaacaaatatatgctgcttttctccaacatggccgagcccaggagaggtggtgtgcaagtatccatgacggctgtctggcactagagtggagagggtagcgaagaacaaagcacttgcagggtgagaatctgaatccggcctgagctgaagaggagaggcttgttgttgccagtgttggtttaggtaatggtgtgagtagaaaccaactgctactggttttagagaaatgtggactggtggatgctctcttaatgccacc

SEQ ID NO: 35230 - DNA, 1353 bp, Homo sapiens
ttcttttggaaagtgttgatcaaacaaaagatacagaccatcaaaattttcaaaaatgcttaaaacacagaagagtaaagcattttggttatgagttccactgtgagaaaaacaatgtagataaagataagcatttgcctaggggtcttcttgatgtttgtgatagctttttggagaaatggttgagggagggttacattaaacataaacctgaacaattgaccataaatcaatatgaacctgggcatgactgtcatggattttaagtacccagatggtatcacagtgccagttattttgccttgtttgagttggctggtgatgacaggagaatctagatacctttgggcccatgggttaccctttggcttgtgatagccagaggaaagagactcctccctcctttccagagagtgataaagaagcctgacaactagagcaagagtacatccatcaagtttattaatagattgctgggcacttcagcagcatgagatatacagcttggccacacatcattgagtttttgaaggctttgccaagtggcttaatagtggctgatactggatgtggtaatggaaagcaccttggcatcaataaggagttagatgtgattggttgtgatcagagtcaaaaccttgtggacatttgtagagtgagacaattccaggcttttgtttgtgatgcattggcagtaccagtccacagtgggtttggtatgcctgactctccattgctgttattccccattttgcaacagcagaacatagaatgacagctcttcaagaacatgttggactcctgaaacctggtgggaaggcactcatttatgtctgggcaatgcaacaagaatatattataataaacagaagtccaagtagcttacaggaaacagaactagccaaggaaagagagaggagataagcagtgacacctcagtgcaggggatggttgtgaagcaaatgcctgatgtgggcagtcaagactcagcatcttctgtctcctccattaatgactcttaggagggaggatataattcaaggcaagttactaattccaagcttcctattcatattaacaggacttctttttgttctcgggatgtactggtcccctggtaccttaggggaaaccctgataaagacaaacctgttgagcaatttggtcccatatgatcctatgacccaagttccatgtttcatcattacttatgtgttctttgagggagaataggaagttgcctgcaggactgtgagtgatttcagcattctgcaaagctactacgatcaaggaaatgtgtgtgtgattcttcaaaaggtctgattatttacctgaacatatcatgtataaaaa

SEQ ID NO: 35231 - DNA, 2208 bp, Homo sapiens
ataattctaagtgacatcaaaatatagttgataggaaaactttttttgaaattctactatatttcatgactgggagttaggtgcagtttattttgtctaactgccaacataattttacctggtactaattttacctggttcctggtactaatagatcaatttgtggaattttgatcttttctgtgaccacacactgtactcagaaacaagtaaatataagcttgagaaatacaggcctttgaccccaaaattccaagacaggacatgaaaagagagagcagagaaaagtcatcctccttattgggctatctcaattaagtagctaagtttctacagtatttggaggactactatgagctacccacaaaagaactaggaataaggaaaacaaggtaaactttcaaataacacataataaaatggagtacagaactgcaaagtcacctgggagaaactacttgactcccaggccaagggtccaagagtataaccagcagcttgtgtttaccataatcaaaggaaaagtagaaactgggtggccatgggagactggcctacagtcccatccatcacagagggttggcgtgtgctcacccattcaaggaccaataaatgagtatctctttaagagcagctcctcccatttttcaacaatcttcctaatatgtaggctcactagaacattttctctttcaaactgcccagacggttggacaggacgtagacacacagaagaaaagaagacaaagaacgggtaggaaaattaaaaaggtaggaggctgaggcgggtggatcacctgaggtcaggagcttgagaccagcctgaccaacatggtgaaaccaaatctctaccaaagatacaaaaattagccaggcgtagtggtgcatgcctgtaatcccagctacttgggaggctgaggcaggagaatcacttgaatctgggaggcagaggttgcagtgagccgagatcacaccattgtactccaacctggataaaagcgaaactccgtctcaaaaaaaaaaagaaaagaaaaagaataaaaggtgatatagtaaagggttgagggtgggatgggtaaatgaagaaggagcatgctgtagttttataccaaatatggctagaatgagaatgatataattcaggcagtttgtttgtttctgggaatcacggatcatgatgtttaatcatccaagtctatttccctgcatagctatgtgattttgtctaaaaagaaaaaaaaaagtagtgaaagaagtagtggtagagcctaaagacagtgtcaggaacagaaaaaagttaggaaacgtaattttcttagaggggaatggacgctgaaggtagtgggaaaaaattgtttttaggtaagaacatgacttctttccccaacaccccccggagagaaggtctcactctgtcacctaggctacagtgcagtgctgtaaccatagctcactgcagcctcaaactcctgggctcaagcgataccccagctcaacaggactatataatcccagagtagctgggactataggtatgcaccatttacttgtctttttaattgagaaggtgaagtacattattgatggggagaaggggtgactacctggcacactgaaatacagacatcttcagaccttgttcctcattatccgtatctaagtaaaaagaagatacagattgcgtgtgtgtgtgtgtgtgtgtatgactgtgtgtgtgtatacatatacatatgtgtttcttcattcccatatacaggcatatgtatgtgggtgggtgggtggatgtgtctacaggtgttttagttgcgaatctttatttcttctgcttactctttttggtagacagtaaatgacaaagtccaaaagcaaaaaagataaatatgtatgctgggtcatcagtctcttaattttggagagctgatgactaaaaacaaagtgcttatttttttttcagaagaaaactttctctttagaaattagagagaaatgaaaatgtagttagatcactaaaaggaatttgttttctagagacaaggtcttactctgtcacccaggctggagtgcagtggtacaatcacggctcactgcagcctggaactcctgaactcaagtgatcctaccgcctcagcctcctgagtagctgggagtacaggcatgtgccaccacacccagctgattttgtttgttttttgttttgttttgtggaga

SEQ ID NO: 35232 - DNA, 1553 bp, Homo sapiens
agtcaaagttgaatttcctccttactggctcaaaccacacctcatattgaaataataaaaatgcatgctccctggagcaactgacttgttatctaatacatttgcttttttgtgtttgtttggagaacagtcttttcggaaaaattccaaggagctgtagtgtacatactcttctctcctggtgttataattggctgaggtcaaggggcaaaaaagcagagattcattcaagatggaaatattccaaggccttagcatctgtttcccagaacagagtcttacattctttaaccaggctccatcccacagttcagccctgcctcctttcaacaggcagctgaaaaaacctccttcccacctctccttcttctcacaaccatcagtagaaggcgctagctgtgggtgaaagggaagcactcagcctgccaaactgctggacatgagccttcaccctttttctgacctccacaaaaattttaaaaagtttaaattcctgtgcttccacgcttatgagaaatacagcaaccatgaatagaggaagattatgttttcaacttgagaaaaaatactgaggctttgggcagccccccacttccccacggggacacaatcctctcaaccctttccagcactttttgtttccctcttccagaggtcatctggtgtgagagggagagacacatcttgaatccagcagcaacgtgacattccatctctttccccccattgcacaagagtccttccggacctcgggaagcagaagctgccagctctgaaatgtattttcaaggcagcacattgtgtgcacttttaccctaccctcacaactgagaggaaatgtttattttcaatttagcttttgactgcttctaaaaaataagccacttttcaattacacagaggctttaaaatgaagtgccaagatttaacacatgttctaagggctctggtttcctgtgtttctttggtgaggagtgaagtccagcaactggtgagccaaagaataggattcatttacaacagagcagtggttctcaaagtgtggttcctaaaccagccacatcagcatcaccaggaacttgatagaaatgcaaaccaccccagactccaccccagacagattgaatccgaaattctaagaatagggcccaagaatctacggtctagggagcttccaggcgattctcattacgccaaagctgggaaaccactgcaatattgggttgttgccagtgaagagtttgctaaactccaaaagcaaataaataggctagaagtcagagcctcttctagacagttttgttttttgttttttttttaacctgagtataagatcagaaccagtggtggcacaggagaaagcaaaaaccactaagtggctataaagacagagctaacactgagggtaattacagtaagaggattcacatggaaagagctccagttctgtgccaggtgctacgcgaagggctttccattccttatcttactgagagcttttaatttttgtttacgcttttaaacatgaaaagggttttagtcaaccaagaatt

SEQ ID NO: 35233 - DNA, 1924 bp, Homo sapiens
gtaggttttataatggtgatgttatccataggagcaattggggacttctgactgcatgactcctgagccctaatttcttatcttgtggctaatttgttagttctacaaaagcagtctgatctccaagcaaggagggggtttgttttgggaaagggctgttaccatctttgtttcaaagttaaactgtaaactaaatgtctcccatagttagcttggcctatgctcaggaatgaataatggcagcttggagattagaagaaagatggagtaattacattttttttttcacatttttttcactgtcacaatttttttaaaggtgatttcagaggtaacatcacaggacatgggagactaaagggaggaaagtatgtcaaacaaaggctgtcctgttctgcagacgaaacctcacagaaagcaactctcagagtcagtagcctatgatgaaagtttctctgtcagacattcagcagtgcctgactctcagtctctctctcctgcaagttaatctttcctagagtgggcaagggaggcctccgagaaagcctagtttccatcttctgtttacttccttttattttctccacagataaaaatctccttcacaaaaggcagcttttcagggctgtttctgtctgcaggccctctgaatagccatctcaaaatctgtcaacgaagtgtatattttgcagtaaaatattttttgttttctttagtatgaaacaatttatattattagattacaggagtattaaaaccatccatgatctcacttttaaacaaaccaatctgaaagtctaacattggggcagattctaagcaatgtcttataaagaataattatgtgttaatgagtaaactaagttaattagtctccttaaaccagagggtcagtttactccaggccacatggtcaaaggcaaaagtccaacattacatcaaactcaaatagagattaggaaggaggagaaaagcagctcacttagctaaagaaaaaacaataaattcaattttgtggaaaaggagggcataaatggaggtgctatctaaaatgttatttttctgaaagaaaaaataagaaattaatgctcctatttgcaactgtaacacttattccagtatgttctcttctttcttcatgtttggccagagccagactttgcagacagattacatcacatatgtggatgagctgggctctttcataggggccaagcctaacataccatggctcttcctgacagatccccgcctggccctggaggtgtactttggcccttgcagcccataccagtttcgactgatgggaccagggaagtgggatggggccagaaatgccatcctgacccagtggaaccggacagtgaagccaaccaggacaagagttgtcagtgaagttcagcgaccccatcccttttacaatttgcttaaaatgctttcattcccattactccttctggctgttacacttacattttattaatgagaaagtctttgaggtctcaaaattcagcatagaagtgtaatcacacaatacaacacacacacacacacacatacacacacacaatcacaacatagttcctctctcctttcctgaagatatgaaaatcagtcttggcccatttgaattaaagtataagtaaaatggaaaatactcagcctctctctctctgttgggaatctgttctctaaaaggcttttcacatgctgaattggcaaatttggggatgcttaagataagacaggaagttgaataagcatgagcacagattttcaggctgaacaaagtttaacaaaatgtaaaggcattttattttgtccattatagtatattaaccaatgtatttttcatattaactgaagttattgacattaaatcaacatagagagataagtttataccaatacaacaacgaagata

SEQ ID NO: 35234 - DNA, 1029 bp, Homo sapiens
atttaaagcccttttacaagatttctactaatattccatatacatttttaaattgagacagcttaaaaattaccaacccagcagttggaaaaatatctgaaaatttgagatatataaaagactaaaatacttgcaaatgagaagcatgccattcctctagcattataaactttgcttccacttgacatcgtttcttaatccagcagatatgaaacatttatgtacaattttaaaaattaacagacctccagtgagctacatttaaaaaaatcaatgaaccaataaatcattttattcaaataagatcatgaactgtcttgctcacatgatgtactctgttttaaaaatagcaaatgttaaaaactatcattcagtggaatgctgaccatgtgtcaggcactctgcaaagtgttttgcgtgaaatatcttctctaatacaaagtccacaaagaggcggctacataaaacgttcctgacatatgccaattgcatgatcacttgaattattggtttgtttccttgttcagattatcaaataacaaacagagagaagttctttaaaagaaaagatatatatttggtgatagagcattgtaatgagaatgtacatgccatggtaaactatttgtgtattcagggagttaaaggaagacaaaggtttttaaatggggaaaaaatacaattacataattgttttgaaataattatataaagagcaataacaagggtgatgccagtctgagattggacagttactgagcagatgttcttgtagaagtcatttttgtgtaagattatgatggtctttgtgtaaggtggtggtttttgtagtttttgttatcaggcacacatcatgagaacccgctctttctggcctttcccaattctatttgtcgggtttcttaacattagtgactccatctagattctgacagttttcatgagaacttgcttttcttttctctctcaagtccttattcagtattcaacacccttaacagattagtcccactgctgagtcaggcctct

SEQ ID NO: 35235 - DNA, 610 bp, Homo sapiens
aggaaaaaaagtgtatctttcaagtagatgcaaagcattataatgactgacacttgtatctaactccagtcttacagataactaaggcaaaaagctaaataaacaatatgtaacctctaacatttggtaaaaggaagtatactggtctgttagcagagacaaactttttttagaattgaagtctgaaacaaacaaaagcaattcaatgtcaatagacattaagcaacataatagacaaacatctcctaagggaacatttgttacagctgctccttccctgaactgtgctttggaagataagctctgtcctgagtccaaaccaagcccttccaagagagaacaaaggtcagagatgttgaagattccagcaaatttctcctcttatttctaccaagcctttgtgaacattgctcttcattttggcctgtacttctccctcagggacgtagaacaatggaatgtcagtcagtctctgtagttaaaactttttctttaaaattcaattaaggtacttctccctcagggacgtagaacaatggaatgtcagtcagtctctgtagttaaaactttttctttaaaattcaattaaggtacttctccctcagggacg

SEQ ID NO: 35236 - DNA, 976 bp, Homo sapiens
agactaaaatattgaatattttagtctctacagttgagctgcttctctcaggttcctaatccaaaacaaaaaaagatgcatatccagctttgagaagagaattcacctgtgaaataaaaaatagcaaatttttagaaaaattatgtctttgggggcactgcacttaacaaacttagggagataaaactgtcacaaaaatatattgggggaaaagctaacatcacataatttagtgacaaatgtgtgtgctactgaccagaaatgctataggaattaaaagaacagaggctcattgatgtgaaaggcagataccaattcttggaaatgcttttaaagtttcaataacttacagctactgagcacttactatgtgccaggagctattctgagacgccttacattattaactcacttgattctcacagaacacttcaaggaagctactattgttttctttatatttgtgatgcacagaagggttaatctgtccaagattacactgtcgtaactgatagagccgcgctttatctcaggcagcctggatccagagcctggttgcttaatcaatgcactctgttgcctctcggtgttcttacacatgtgtgttattaacacatggcctggtgccagaagattctctggcccatcccagtggtgactgtgccatgtgccctggaggtgaatcagtatccaattgagaagggagggatggctttgcatgcctacctttctaccacaaaccctccctggcagccaccctctctctctcccactggtgaccatcactggtgacctgtgaaagggacacaccaacagcacagctggggccctggcattgtgccaggggcaggatcacacagggcagtgccgcggtagcacccgtggtgccacaggtgtggtggctcctggtcccaactccaccccaccagctgctgtgtggtgttgtgtcaggtcaccacaccaatcggagcttcag

SEQ ID NO: 35237 - DNA, 1838 bp, Homo sapiens
agtcagatcatatctggcccactttcctcgtgtatgttaccctcctcactcctgtaggcatttgcatgtgtagtcacaagcaaatgtggtttagaaattgttcagtgaaccatgttggaaaatgtccctaaacacaagtcctaaagatggtctgttatattatcttacaagcacacagtggaaggaaaaacagttaagttttctatttctgccacagcttctataattattacctttcttgtgccctaggttaatatctaaaaatagctttatgctttctcaaacacatttcaccagctccctctgctgatccaatctgaaggacaaaacagcttaaattccttgtaagtcctgaactttaaaatcacatttctggggttggagaactccaagcatgaaagaacttgatgaggtaatggtcatctaaataactttctcctttggacagctcctatggtaatccaagcaagagtcagggtgtagaagtttgtttccaaaagtagaactcctgtttcgctgagaaagctgtaatttggggtgatttggcgccctctacagactataatggcaaaagcgacgctatcatgtgcttcccatagctttagggctttgccagaactatgacgttgaggagggtggggtaaaggggcaggaagcgtttatgttctgccaatccaacagctgtattctaactcaccattccgccctcccttaagatcacggaagtatcacgcttgcctcttacacaactttttttccttagtctgtatactttctgctgtcactagcataacagaaaagacgaatggcttttgttttaaactgagggcacttttacaaaagtcatctttccatttatttttctttcagaaaaaagaatttgggttttgagcttttttaaaaaaaaaagacaaacactttccttgactttgagaaataatttaagtcaaagaatctgctctatgctaaccaaggtaagtgtcctggattttttttttaatggggaaatgatccagaaactgctttcacaaaagatgaatgtttttcttggagtgtgttccttaagaatgaatgtgattatcttcttttggggtctcttgactagggctaaagcaagagaattaaggagagagtcaggaagcaaagggaagttgtaaggaaacaaagttatgttgtggacagaaccatccaaaaggaaagtgtcagtgagataaacagaatcatgagactttcagtgactccagtgacctctgatttcatcttatgaatgagatggaaatgccagccattgggaaacaaataccccatagatggcgtgggaaaaaaatactgtaacaaagcaagagcatggtaggatgatgataagaaacataaaatgatcaaatttcaaattcaaagaaatcataattgattacatgatttgcaaatcacccaagtctctccatgtctcataaaggattcctacatttgctggtcagtcaggtatagggtggggttttcccgttgtacaaaggtctagttcaataggtcaggtctcctttctgccaagggactaaatataagcaacctatggctggcacggtggctcacgcctgtaatcccagcactttggaaagccgaggagggcagaccacttgagatcaggagtttgagaccagcctgaccaacatggtgaaaccccgtctctactaaaaatacaaaaattatccaggcgtggtgccgcctgcctgtagtctcagctactcaggaggctgaggcaggagaatcacttgaacccaggaggtggaggttgcagtgagccgaaattgtgccactgcattccagcctggaagacagag

SEQ ID NO: 35238 - DNA, 2305 bp, Homo sapiens
accagcctggccaacatggtgaaacctcatctctactaaaaatacaaaaatcagctgggcgtggtggtgcgtgactgtaatctcagctatttaggaggctgaggcaggagaatcacttgaacccaggagacagaggttgcagtgaggcaagatcacaccactgcactccagcctgggtgacagaaagagactctctcaaaaaaaaaaaaaaaagaagacataatagtcccatattccttagcataacatagaaggcccttcatggtctgagtccctttgcctgggtcagcaggatgcctgttatttcaaaccctcccatccagcactaccaaactatgaactttcataactcctccctttggcatcagctcttgcctctgccaggcacacaaatctataccgtgcctgactgatgagatcctatttatctttcaagagagctcagtgctctcattctgtgcagccttccctaaatccccaaagcagaaatggtcacccctgtgtagcagctgcaccttgtgtatgctctggtgctgctcttttcttactatagtatcattttctttttgtctgtcacctaacaaatggtgagttcctaaaaggaatcatatcatgttcatcggacacactgcctgatatgaagcattgctaaagaagtatttgatgaatcgacagtggccttgccagctggcactctttgttttctctcttctacctacattcttgtcttctgccaacatgataaattacctcagccttgcaaacaaacaagaacagtccgccaacagctaatgttataagtaaaggacaatccaagtggcaattagaagaaatagaactatacagtccagtacttgcacaggagcgaagtacactggttaagagcactaacttgagaatgagaactcaacttgttagctatgaagtcttggccatgtgacttagcctctctaagccttagtgtcctcatccggaaaacagtggtcataatagggcctaccttactgtgaacattaatgagaaaatgcacggtgtttggtccaaagtaagttaactactaatagctgcagaatcggggacattttctattctctgaattaaagaaaggacttgaaactattgccaaatcccattccctgttgtgtaatctggaggcatggcctttgctctccctggattctctggcagcactttccagttaacgatcgtttttgttgttgctgctgctactgataaacggacatgtttaatgacacattggtcttcacagagatgactacagagacttttaatctataatccagtagtatacaaccatgcatcacagactaattagccagatgtaaaataaactagcttcttaccacaactaccctataaacattgcaactattctttccaaaatgaccctagtcttacatgaaaacacctattgtggggaaaccggaaacctagttatgtgaccaaaactaaaaattaaaggaaaaattgcaattcactggtgaaagttggtgaaagcagaggaaattcagtgcccttcactatgctactttgatgttacttgtgttctttttgtccctcttcttcagcccatccatgttagttctcagtaggtttgaataagccatccggaacttattcacttctttggagctcaccacaatgctaaccttctttttcccatcagtagttcttaacagacacctgtctgaagactcaaagcccgcaacagaacctttcactagaatgggtttggttcaacctcagttctcaaggaacaaatggtaccaggaaaagtccgctgtaagtgaacccattttaactgagaatcaaaacatcatagtaaatagtatggaaaaaaattaggtttggtcaaaacttcaacttgagaaataaaaccagaaattataaaaataagtttgctttactgttcatttaactgagttagattataattggaactatgtacaaatgggaactgcctaattgtctgacaacttatattacagcaagataaaacattccccactttatacaacattctttacttcccatatgactttcaaagcaagattacaagattgccctttttaaaaaaattcacagttttcattgattttgccaagtatttacatcattctatttgaatttcctgtcttgtcattatgtttgccaattctctctatgttattcttgtatttcttacatgatttaactctgcaagatctagacttgccaatggcttaacagttctccagtattacttcatcaacttcaacattcttcttagttgcaggtgatatgg

SEQ ID NO: 35239 - DNA, 900 bp, Homo sapiens
gggagctataatttaagatgagatttgagtggggacacagccaaaccatatcaagggcaaaagagtaaaaggaaataaataaaaatagaaaagcactgaatatttttgtattatgatgagttccttttcctacagtattataactttagagattcagataataaatccccagataaagaagtctctttgtgattattttctacatttcttttaggttatgcactcttcaaaggcccgagtagaaagcagcctgagtaaagccagctcaataaagcagttcattgaattaagcttctcccaagtcaacaaggcttctaaaacttttccagctgggcccagtggctcatgcctgtaatcctagctactgcggagactgaggtgggagggtcacttgagtccaggagttccttggctgcaatgtgcaatgatggcatcaccacaccccaacctggcagagatggggcaagcctagtttcaaaaaaaaaaaaagtcttccagatcaattttcagtggattttgggaacagtctaatgcctcctgctatggaacgggtctttcgggccttcagcagttccaatgcctgtacctctggaaacaaataatgagtcatcaattctcctaaatcagtaggaaagaagagaggtcaacagtcaatgtttattgaaagtaatatccttacattccaaaacttctaacctactgggtagagaataagatgaagctattatttttccaaacagggtccaacgtagttgatcctcccacttcctacccccctacacactcaatattgtctgtagttcaagagttggagtggtccacacggtctctgcaactctctgtgaaatgtacctttctctctctgcatcttgtatgttcccagatacacttcttccccac

SEQ ID NO: 35240 - DNA, 1730 bp, Homo sapiens
atccttgaattttaaatatgtcataggtagttcacaaagaggacaaaagataccatttactaaacattcgccatctgttctgacataatattatcatcattgtagtctcccacttccagatacactcatctgcctatgttacacttgcctagtaaaagccagcatgggtgaatcttactattcaacggagctgaacactgtgatggagagatcatataaataaactgaatggcttatctcacatccataattagaaacttaaaaagtgctctcagcagcccatgctactctgttcctcacactagttttactttcactctctgtgataacttttcaatacaccaagacttctcagcttgccccaaattcactgagacatactggcgaactgctggttcaaccatttacacatccacccaccagacataagagtgctcatttcactgaggcttattatcaacttgtaaacgtggtcaattcaagacttcttagaaaggtctcaggtccaagctttgtcctgaaaagataattctgattgcagaaactccctccgtccagcaggaagcgccagcaccctctgtcggggttgggccgccacggaggcttcacgtgatccggccgtctctgcgcaggagtgtggtcttgcggagatttgacctacgtacttagcgtcatgacgtagtacgtaggggctggctagccgccatcttgcttctttttctcgctcgctcgctccccctcggaaagctgcgaaagtgctttggcggtttgtccatccgcagcttcggcttttccagtctggtggcccttccggccacccctttaaccccagctttccctcccccttctttcgatcagagatcggcggagaccctcgaagtgcgcaaacttgacactcaccctgaccggtaaggaaagcgagggtgtgggggccgcgatcaaagagggccccatcgggaacggccagagtgcggcctggggcgtgggagcgcacccagaccctggcgcccggaggctagggggccgcgtggagagggccttgggtccgggcatttcccttctgtttggttaccatcatctctgtgtctggggaagtcggcctccagcttggggagcgggaaaccggagtcagacccgccccatgtggtctgcagcgggagttctggaccggtctgtcttgctcccacctagaccccagtcctggccctgcgaggggattacgcatgttgccgggtaagcgaagggggtttccgtcttcctggactggcggacgtgaagtcttttttttttttttttttttttagtgtcgggtatgcgtttccccaaacaactgaaggactcagccggggctttcactgtctacctcttcctgtgtagtgagggtgggacttgcaatgagcaatgtatgggagggtctggtttaaagacctggttagatgagaggctcttcggggaatcaagaccaaccctacttccgctagggaagtgctgcccaactccggaggaggatttgggtagtcttttcacactctaggccgctccatcctctaacttgcgtggtgaatctcggtagctccctgtctttgagatagcgttgatattggtggtgtcagggtaaaggccccgttttaggactgaagaaaagggcatggggccactatagagacattgatagagtcttccttcctttgcatgagaggagtacctttaatttaaagggatgtatgtgt

SEQ ID NO: 35241 - DNA, 564 bp, Homo sapiens
gaggttaagtaacatgcccaaggtcacacagctaagtggtatcgctgggacttgaacccatgtcttccgaggccatggcagctgcgaactcttccatcctgtgctgaggaggtgtgtcagttataaacgcattgcctctcagagctgaatgcaccctcccatgtatgctgtctgaagaacaagagctttgaagtgagcgcgatgttgaactatctcagtagagggcgctggagggacatcgtgggaggaaaaaggtctgcagttttcctgtcctgcgtccataggtggtatgactgtgaggacatttgttggagtcctaccccagccacggacccagagcgaagttcttctgtgacctcacagccacagcctggccataacctttccacagccctcccaacaaggaacccagagtccctgcacacggacctcagtgctctggaggcctcctgcctgtgcctgccctgactcccaccatgcccttgccacacgttgcaggttgccctcctcacctgcactgggaggcggcctattgcagctgcagaccagctgaggcctgcacac

SEQ ID NO: 35242 - DNA, 2778 bp, Homo sapiens
tccattctctttctgattcgtcttccttgtctgtcatcagccttcttgcttgatgcagtttcacagaaataaagtgacttggatggacacagaccggagatattatttgcaaaacctgtcaagtgtaacgattcacccccaccttccggtcattataaacacagcagggttggcgctctttcccccgggccctttaaatacacaatttcaggcagctccgttcaccccccacacccaatctgtcacaccaggccacgtcccacgatatatctgctcctaacgctggcccttcctgccccattgtaccccctggaattcctcactacatcccactcttaacaaaccttccccatccatggtactgttctcttcccatcaccccagagtacccctcaattccaattcttctctccctcaactgctcctcgtccgcatacccctgtcctcgtcttccttcctcacggcacccccggccccaaccttttcccactccggggtcccttcctagatccccgaggcccgccgaccagcccgactaggacgtcggggggcggcaaggcaggggcgtcttcttcgtttccttcctcctcacaccagcccctcccgctgcgaacaggccagcgccagtacctgaggctcccggggaactcccggcagctctcccgggctggcggtgctgggcgggcgggggaaggagtaggaagccgaggtaagaagctgggagggggagacagttggtgcggacccggcgtcggccgcagcgccgcagcagcgcctccgctcatcgagccgatcggcgctcggcggcctggcgccaggcggagggggcgggtccagggcacggagataatcgaggaagtcgatccgccgagccctattcacctaaaagagcccgaacccacacgcagtttagatgcatctctccaaatttatgctgtgctttaggggaggaacaaccactggttgtccacgttccggtcgtgatccggcgtgcgtggagggcgattaggggaggagtgggaaacttccgagaaccgctcgggactgggcgccgcgccggagtgcgtggctggggtgatgaggcgttagaaagaaggtggtgcttggtggcacatccgtccctctggctgactacgttgagtggcaagtggagagtggctcgcagctcgaggacctgcttcgggttcgtctggggccttttctgaagaaaggagatctgtttgatcccctgtttacagaattagagctagacttggaaagagatgttaaggccaggctcctccctttagataggaggaatatctggttcagagaggagattgacttaaagttaacacggctagtttagatagatacgggacgagggctcggtgttcttttcccggtatcccttagttgtaacctgaaagccttcaggaaatcgccctcgccaggccattccgccactctgcccattccttcctcactccctccccctccgcccaatttggtatcatgtttagatctccacgcccgcagtagctgtctaccagaaacaattcctaattttgtttttccgttctcttatttgttttattatccgttcctcccacgccccagctggattattttactcattgaatcatattcactacacatcttttaaaattaatacagtatctatgggtcctttgttgatacagtattttaactgtctgaaatactgtgccaggcactttctaaagacataaaaataagagggggtgttcaagaacaagagtagacaagaaaacagcaggaggaaagatctgcggacactaaaggaaaggaaagaatagacaccctcttaccaaaaagttgttcttcttttgtttgatgtttatttttatgtaaaaatgtactaacgaatttgaaagatgccatgactaaggcaacgatgctccactctgattcacttggagttgaatcacttggaaagcttttaaaactacgtaggtgcccacgtgctacctagattctgatttaaatgttctgagatttagaaacagccgttgagttgtcagttgaaggttctgaaagcttaatgctaaactcagttgcctgtgtttattcagtccaagttgctgtccaagtcagcaacttggactgaaacggcccacttagaagagaagcctctcatggtttgtatccctgtctaggtgtgatagtgggtctacccccagactccacaggtaaccctgacattattttttcttctacagctgatcttttttttttttttgagatgaagtctcacttcttcccccaggctggagtgcagtgacacaatcatagcgcacagcagctctgaactcctgagctaaagtgatcttcctgcctctgcctcccaagtagctgggattacaggcatgagcagctgtgcccagcacttacagttgattttatgtctgtatatttgcatgttatgggctattttctggctttggtgccttagccaattagagtttagctagttatagcctcatctcttagacaacttaaggtgtggtcagtgagctctaacaggcacgtcattgcatagcttttacagataatccattctttgggtttttttgttttttaaacataattctttagtcctgccagtcattttggaatgatcgcttaggagaggggtaatgcaagccccacccttaatcacctgaacaaagtccctttgactaaccccaatatttgtgaaacttagaaaatgtcattttacagttaacatgaatcaaatataccagtaagcctaaaaga

SEQ ID NO: 35243 - DNA, 1063 bp, Homo sapiens
gattcaaattcatattcttttttcatcattaactgtaactgcatggccatagctaaaccacttaactcatctgagcctgtcctcatttgtaaaacacacacacacacacacacacacacacacacagtctcccatggttattaaaataattaaatgggataacctaagtaaaggccttagtacatgctgaacacttggtacttgcttattgttatttcattgaacatgttatgctcaacaagttatctagctaatatatgcaaagttttgcaaggccaggccaaaggcacaggtcttaaaattataaaagctgaaggagttgcaaccaagaaaggaaataattagggaagagagactggatcagaagccaggcagctaagggtactggcttttcaaattgtgttcttttgttaagactaaaattggaagacaggagaagcagggcttttggaattgtggataccaagcaccactaaatgattaaagcaaagtgcagtgctggctggtggccgtgtgcttgttatcttggaagtgcaacccttgtgtcctgtatctgattcattttcaacaattttttttttttttttgtgggtggggaagaaagaggagggatgacagagaaaggttggaagatacacaggagagatatttgaggggaggagcaaatagactaatattctcagtgctttttaactcattgattgccaggagcctgggtgaggcaaagcattggtttattcagcttttattcagctcagtgccctgttgacaacacaatgtgtctgagtcacagggggtcaagtgactgtagcttctctgatgagtcactgtcttgtttccactaatgtctccgtggctggggccaatttgtttactgagagaaagctacagctgtctgcaggtacagacatttgtactccagaacttaccagcagagccaagcagtgtggatgtgaggagcttttgcactcctggaaggtcctcacgggtaacaggcagtgggagctgcttgatgtgatatgatgatgctctttcctttgatttggtatcaagagaagcaact

SEQ ID NO: 35244 - DNA, 1028 bp, Homo sapiens
aaaaacagaaaattacaattttcagtaacagtgcctgtagaggtctgtataatgaaaatcacgttcctatttagtaggtcccaacaaaaccaattgacttaatggaaacttttgctgtagtagaaattcctgatcatggaggacagatgaccagaggagcttggatttggtttgtgagtgaaggacaaaattgactgagaaagatctgatggtactaactgtttacaagttaaccagctggaaccagttaaaagagtttcctcctgttgctgataagaatcactggatggtgttctgagcccaggacattttgtggtcaatagtcactaatatgaggtatgtgttcaggattccaaatagattgctgagggttgtgtgtggagcttgattagttattacctgaaatgtaaactcccatgagaaagcaagactgggaaatacctcacagtcccaagtccacagcagtggtgggtgcctacagggcaggcaattatgaagtctttctatgctggcagtgagggaggtttcttgattaaatcctaattgtgctttctaggaggaacgctcttgtctgttgtctattattcttcctgtgttcaacttgtgaaagtttcttccttgtccattatcttctttgacatatctgaagaagaaatgggggattgtgaccttcttgagagattcacagctttcacagcctgccttcttcttgtaaaaacttggggtgatgaaagttgttttaagactcagaggctttttcaggccaggccttttgtttctttgtgaatttagttactttaaaaactcagtaagcttctctactatctgcttcttgttaattccatgtacaaataactgtacccaatgatttttcctagacacagatcttaaatctattttatttatttatttttcatgtggccaataccctccacccccttcttctgtctctttcaacttattgtggttaccttgaggctacctgagacagtaggcttgggtggggaagtatgcattctaagtgtaaa

SEQ ID NO: 35245 - DNA, 1790 bp, Homo sapiens
gaagaatctgggtgaaggatgtacaggaattctttgtattaattttcaaccttttaataagacaaattatttcaagatgaaaattattttacaaatcaaagatagtgttaatgatagcttccttagacctctccatcctcccatattctaagaaaggccatttatatgttacctccagttctgtccacagacatcaatgcatggcttcaggaaaagtgggccaagtgcaatgctgaacaggaaggaaacagtttgagtctgaagcacaaggttcctactgtgctgaatcagtgtggtagaggctattaaaatgccatcttttcctacctcccactcctctccttcttctgccttcataccctacatcccagaccgcttttaatcctattgggagggtatacagagagaaataaagaaaaaataataatgaatggctgtgttctttggcacatgaatagcagtttccctttcgggacttcaagaataaaaaatgagaggctttaaatcttgctaacttgtgcaagaatgtgcgcgtgtgtatatgtgtgtgtgcgtaggtaaaaatgtaaatgaccactatggaaagaacaatgctagcttttaaaatctactaaagtaaaagaaataattattcctgaataaggtatgtcaaacaccagtgggaagaaagaagagcgggttattttgtttagagctggatgaattaggaaaatccctttttacagctaactcagagatgagctgttgttgccaagatgtggtttatcaaacatctaggctatctcacaggatgtgagttggtttagctttgtaaaatagctctatttttattttagccaaatctctacaagactctcagtcagctccctcccccaccagaatgaaacagcaacaacagcagtgaaacctgactgaaacagcagagtaaatgttggccagaagcctgctgtgatccagcctggcttttagaaggagtctctctcagtttgattcattgcttctcacaagccagctccagactgcttttcttgagataaaataagttgtagaagtataaagggaatgttgccactggtaattctttttacttaagataataaaaagcacataaaatttccatgctcatatttgactcctttccgggtctcccttcctgattctaacacactgtggaaatggtgcaaggaaaaaaaagccacagacagagtagtcggtatgatttcagaccacatgactcattacttgtgcttctttctggagcagtctgttttctgtgagctggcttcactctggttaatcacttagcatggtgagatttcacctggttgcccctctggtggctcagacggggcctggggcatcactgaatttatactgaaaatcagatgggcatctgaacaactcccacaaaacacacacacacacacacacacacacacacacacacatttaatcagcatcaagtagtgcagtttcctttctaagtgatgggagctgctggctgttgtttttggcttgaggccgcatagaccagccagccgttgtgtaagcatggtctgtctgaattgctttggggctgtcttcttagaaatcttcttgctgttcattattttgccagcaagccataactattactttttttttagattcctcaatctatgttttctctactgtaagatagtaaaatgtagagaatcagggagccctataaatcttgaagattttttttgtcttaatttctttaatttgagattggcatttaaaaccattgtagaacttgtgaacttgct

SEQ ID NO: 35246 - DNA, 627 bp, Homo sapiens
taaccaaactgttcttctcatgttgttttaaaagcttctggtgtatatgcctttttattttttactcatcatacagtctattcagaaaaataaaaaaaaaaaaaccttaagtagctcttggcagaaggtcaaaaccagcatttcagggaaggtatttaaaagtcttttaagtgtgggctatttgtataagcaatatctgcacgtttcttatgactgggaaggactattttcacagtctttcatggaaatatttctagacaattttctgcggctcttttccctgagctcatttatttgcttttgcttcagaacacagcattttaatgagcagttttatgagcctaacctgcgttctgcaagctccacatgactggattcctgttgcacataacctttgccctattttccattaaaacacaagactttcctataatcaactgtatactatgaccttggaggaaaaaaatgcaacagatagtttagtctactatttagtctactttagcacactaaaattgatttttttaaaaaaattagttgtttccttataatttttaaaagtgtacatattagtattttcatcacaaatttattttgtaagatgcctaattcaatattaccatatcc

SEQ ID NO: 35247 - DNA, 3340 bp, Homo sapiens
aagtgctgggattacaggcatgagccactgcacctggccttttttgtgagattttaacagaaaagaaaaaagctataaggaagacctcctcagagatctggccagaggaatgtcaccataagaccaaatttcagcgttgacatagagccaaaagaatgagggtaattcatcattcttgttaataattgagtcttttatatataaattacacccatgttccagatacagctttccaatctcctttacctgatttggccaaaacatgctgctttgaagttatttttcagaatgcttaagaaaatataacctgaaattatagtcttgattaggtaaatttgcttatatgttgaatactaggatggtgagcttaagaatttgttagcaactcagtattccaatttagtactgcaactttcatatgggagtggcaattgtatgaggtacctttgtagctctacatgtaaaaagcccaaatatttgcagcacttgcctttaagcatttcggcactgtgtaagtcatataaaaattatgcaaaagaaagagcaaaaaccccaactgcccatatccttaaaagaactaattttgacccagtaaatggtatcatcaacaacaatgctttttcagcaatgacaggaagggtagatacagtaaagtgaagatgaaaagaaaaagctgtctgaggatataaatgtcaccctgatgtttcaagcaaacattctagctgtcagtggaatatattccaagacataaagtttctgatcctgtttctggatcagaacaccaaactagctcaaacaggaaagtgttttggcatatgctaacagaatgtcgcttcagcactgtggacttgctgttcagtttaatggcccacctccccaccctgctgaggtcattaaagtgttctaaagccccttcagaactcgaaaatagtttctgttttctgggcaggtgataaatctcattgagctcgacagaaatttaattacactttcttcatgaaaacaccagggatacccattacctggatctctaaagctaaagccttgcagaccccctagcccctgccccggccctgaagttgaaaggttaggtaccaataacaagttctccatcatttaaatggatgggaggcctctttagtgtagtcagcttaaactggactgaaggaaaattgattttggactttggggaagctaagatcattttttaccactgcccagaaatacaccagtcagtttggctccactaacatctcatagaaaatgaaaaagaagtttttctgtttttgtttttgttttttttttatagacttcattgctccactcacaagcaagaataagatgtgtaacaagaataagatggaagtgagcgttgttgaacacctggataagaagtcaaagagagtagggtcttgagataatctcaccattctacagcttcctataatgttgagttcattaatggtttggttagaaaggggaaattaaagtgtagacttctgccaaaaaccagagggaaagctttatttggcctgctgttttcctacttacaaagctgttcattgcaatgtagggtttactgtattttctctagctgcaaatcatctccctgctgaacacaagaaaggctgatgtcaaatgaagcacaacttggaccctcatttcattatccataggtctgatgaaatgcaagccagcctagggaaatggagaaagatccagcagaccagatttcatttaccttgggcccacttcagaacaaatcagaaatacagttatacctagctcttagacagagggaaatcctagaaaatcctggggttgccatggaccagaccttgcctcctagtttccctaggcctgaatccaggctattacacaccaggactactcacctggagcaaattcttatttacaaatcctttttttctgagatcaacctctggcattctctgcattgtgattacattgctcatttgatctcttgacaccttctaatttacctcacttaaaaaaaatttaacctgccattggctacatcaactccctctccccctatggagatttcacaacattcattgaaatctttggaaataactgagtttcacaaaatcagggttgaaaatcaaatatacaagttataaaggtatttggctcggggactagtcccagttctcctgaataagagtgcatggatttatcattccatggtgcaaaataagaagctttttgagtgagctcaaatggctcatacctagaacattgctagtagccaggaaaagtcctgggaactgctaacttagctatgtgatgtcccttcatttcctttgcatgtctgcatgtttttgtgtgtgatttgaatttgacttttgtgagctatttttgcatgctattatttgggtttattttataatttaaacattgttttcttcctctgcatctgtgtctttctttttgttattttgttttgttttgttttgtttttactaggcgaccccctcctgcagttccaggacgaccatcctaacccccatcattcatctccttttgtttccaacaacatgtctatccatggtatttaaaagcttttcatttgcactatatgtcgtatgtacataaaaacttttatttttcatccatgtgtataataaaaacaaagtttattctatataaaaatgaagtgtgttctgtttctttttttaaagaagacctaaatttaaaaaagaatttgtttcaactaaaacaaggtaaggtgaatatattatgtgttcctctaagaagcttaattcaaaagttcttaaagcattgtgatttaagacggtctttggtagagactaataatctaccttcaagtgaaatttctgtccaatagaagaataaaaagaaaaagaaaatttatggatgtctagaaaaaacacagaagactaaataattccaatccacctccaggaatcccatttttacttattattgcaccaaaatattttttcctattattgtttttctaaacactcttaagggagataaaatgtaagatcatagaagaaactgtagagcaaaaacacataaacctcataaattctatatggcaaatgtaagggcgaaaaaccacatcattcagaataaaagtacaaggcaaggaaatgttgccaccttgagaagaaagactcttcatgatgtcagtaaagcactagaaaaatggagtccatataagtttgaaggaatagagaactttttattcctctatcctcaaatggtaattctaacactaaaattttaatctataattttttaacaagcatcccaaagatgtatccaaataaaatgtttattatttagg

SEQ ID NO: 35248 - DNA, 1880 bp, Homo sapiens
aagttagtattagtcctgctttggtaaaaaagctgagattcaagatgcttaagtaactttgccctaaggtaacagagcagagccaggattcaaaccaaagtcttatcccaaagcctgtgtctcacattgtatctccctctaaagcagttcttaactcagtggttcacatatcccttaggtatatcacattgcatgcttatatctggatttgtgtaaatttatagggataatatccatagtttttattggttctcaaaggcatgttatttgtattttttaagttaccaatccaaagacaatagtaagctgcaccatacagaaaggtatgagctctatagtttaaccaaaatcaaagcctcaaagaaactagactcttcttccattagctgagcttagcatcctttaaagagctatcaatctactcaaaacaaggaaactcttgagaggatcgaagaagataatcattcctttttcacaatgagaaaactaagagtcagaaacaccacagccatccggcaaatttgagaaaaaaaaaattcatattgcccgactttatttcttccatgatagaccacaacaaatattgcttggcaagccagacaccgttaccccctctgcagcagggatcccagcccgggaatcttaaggccgccgccggggttggagggtctgcgacgcccaaaagggcagcgcccgcccgcagagtggggctgggaggggacggggtagggtagggtgaccccagggtgcgccttcactcttctggcaccccatttggctttttgggtgggcctcccacttccgccgccgcccctcactcagccttgggtctgcgggaggcagcagaggaaaaggagccccggaaacactgaccgttacacggaacccacctacccgagagttcctagggttgcgcagctgggggacggcggcacccagcctttttcccgcttcggggcgccggggctgcgactgtggccaagcacttccgggtccgccgcaatctccttagcgagggcacccttccccggctggaaccatcgcgacgtgactgctgccccctcctggctgctcgaaggacctccggtctcctctcctggagactggcccaaacccgaatgctctgagcctaggaaggcaaatccccagcaatcccctattgaaagatgggatgtgccatctgaaggactgggtaaggcaagagaggacaaggaaagaggctgggccagtaggtgagagataatggccgcttttgttgcgctcctttattaagtcaggccctcagctgggacttcccgtgcatccatgcgttcattccacagatactgattgaatgcctgcatgtaacaagccatgcttggggtgctcatgatacagccgtgaatgaaacacacaaaaattgctgctctcatgaaactctcttttttggtgcattgacctttacactgattatatcatctcccccctcaaagaggacaaatctaaggctcagataagttgtatttgtccaaagacaggcacctgggaagtagatgaacagagatcaatatccagttgtctatagcttcaaagcttggtttttttcctctttacctcctaaaagaagtgaggacaagattgctaattaaactgagttcatggaaatattaaaggatatataaacagaaggaagtaataaagaaacaaagggatgtagtaaaacacaggatacagtggaaataaaagtcagaaaacatgacccatttactagctcagtgactcaaggcaaatcacactacctgagctttgatttcttcatcagtaaaatggagatgacattatttgcacttggctactttataggatggttaaagagttaaatataaaaatggtttgtaaag

SEQ ID NO: 35249 - DNA, 3846 bp, Homo sapiens
ctgtaaaaggaactggtgttcttgcaacatcactgcttcaactgctaactagaaagaaaaaatgttccaaaggaaaagaatgggtgaagggagaagacattctgtgggaggaaacaggtggattgtttcagggtgcaaggacacaaactccaagaagtcagcccaggtacgaaaggggacaggtgcaggttaaacatcaaaaacttgagtgcagaccctttcaaagaggaaacctgggattcatttcgctcattacacatctactgttgtgaacaatctttatcctgccttgtttgtacagtgtctgacaatccaaaattggttagtgcaaaacaaaagggacagaaaagccaaagtgacataggagggcaaatccatcttttgggagctccccaatggcctgagtgctccagaactggagtggaagatagctccctgtggtgtcccttgtattctctcagaaacaaccaagggcctggctcttcaaacatgggactgcggttctaacgttctcttgttttaattacttagatatcctcatacctctgcgacttttctgacttcatccaagaagaatatgaatttgccaattttgtttcaagttccagatgttttatctaaggtactaaaaaatttttgttgaaatgaaaccaacagcagttctagaatgacatagaatatgaatacatgtcccatctccttagcacagccctgtgcttggtacaccatcaatgttcaataaatatttgttaaatgaaatgaatggccccacccccctcactatgtctcaagtgccttagggtcccagtccactagaactaagaatacaggcataaggttagaatcaacaaaacaggaaactaaaaattagtatggaggaatctgccccaagacttccagggaatgcctatcagcctgtgactggaaccaatctggagtctctactgcctcccccaaaggattgcttatgtctcccacctacaactccctacacctgtggaattttacattaaaaactcctcatttcccctccaccatgaccggctgccaggtgaccctcggtgtcactgtggagcaagcacacaggctacagtgcttgggtagtcagaacctccctgaggtggagaaagagagaaaatatatggtgagataagcaattttttcacctgaaaaattgcacattcctcacagggctgtcataggcagtgcctgaagcagcgtcctaaggcactcgacacggtgccccacccagagcaagagctcagtgaatgtgagccacaattattaggagccctggtgtcagtcaatatatgtttacggaggcctttgtatttgctttaatacatcagagatgagtgagtcagccgcagctacacagatgagtgagcagacaggacagggacacaactgagaatgcgtctcagaaacagggcacagcacttgtgagagaaggtgggagcaaaggttacccccaggttgggcaagcagagtggaagtgagggaatgattcaagaggaagtggcatctgcactggacctagaagatactgttttcaagtggagggaagagccaggggtggaggaagaactggaaagagaagagaagattatcagcaaagaggtggagactgagtgtgcaggaggaaatgcctgaagaatatcaaggaattctgagcatacatgaaagggaaacaaggacgcggctgggcccagctaatgcacacagggcccaacagacaagagcagagaggacacattgaaggttttcaacaccggagtttcagggtccaagctttgcttaagagtcatctcttagtccccctaacaccctggacaggcaagtaggtaacatggccaccatgacgtgcactgggtagaggtgggggatgagcggggaggcaggactggcttagcaattgctgcagaaccagcaagaagccttccagtcatcaagtcgctgtgaacttcctatttagacaggtctcacctgccgctgaatgcctcctcatctcaggtttgttctgggtctctgtactgtggcaacctgggcactaggacaccaggccccagcctggctggagtggagaatggggaaggaaagccaatgctaacgaccagtaggagtgagaggccattctccagcagggtatagcggtttttgtggctgcaatattcatagttagccactagatgacagttaagagcaacagcttccagctgcgcagcccaaagggctcctgggaggccagtttcccggctgacccgtgagaagtcccaaataggttgctcttattgggagagaacacaggcccctcagcctcaccctcactctcatcctgttaggggctgaccctccactgatttgcacatgagaaagagtcacccctgcagattgaaacacaagtagggaacccgggatccttgctctgttggggcaccaggccagtacctccagtcatattctttcccgtcacacagacgtcctcaaatttgaatctggctcccagagtctactgcgtgtatgaaggcctgcacgtatgtgccatgaggtaaacgtggattcagctggcagctgctcccttctggaaagaaactgttgtgtttcaagggagtagaatgtactgtggacaggatctcttccttcattctctaaatcagggacctgacaagaagctgctggcaatccggaggccaactggagaccccggaccctgtgcagaggtgcaaagctcctgccacctggctgcgttcctcttcaccgtcacaggtcaaagggcagaactttaaacacccacttactcctcccctgccccggagcagccccgtgcctgaggcaggtgcacgtgtgcctggagcagtatttcctagtgactagacaaaggggagacaggctcagagacacaataacaggaagagggagacagaaagcaagatagaaacacacacacagagatgagggacaaaaaacacaagacaaaaggagaggcaggtctgtcaaagaagaaagatttttagtgaagacaaatgaagcctaaacatttcctcgtttaaacatctactgtggagaagcttcttcattttctcctgccatttgcaggcatccactcacgactcctcaagatgctgagaaacagaaaggtgcatcatgatagttggctaactgggccaaaaggtgactgactcagtgatccaaggcaaaggaacagcaggtgtgtgggggtgacccggaaaactgcagctggagactctgaaatctctttgcccacttgctggtactgggtgtaaattaactagagctcctcagttactaatagattataaaatgccactccaccctctcaattcctgcccccactctctctctactcactttgatctgggtttgttcttccagtctaatgagtcagagtgaagataagaacactatttattttgcttttagcagacctgtggcaaaaagccctggctaaaaagactgtgcagtagcagaggcatagctggggaagatgtataggatgtttactttctattttctcaccactaagaactctctttttattatttctctcacattgactaaattttcaaagctcataactaccaaggaaactacctcatatactcctaagtcattttcatatttatattgcttatgttgatctagtgcatataattacaaatacaatttttaaagagaatattaaatgctattgacctaaaatagtgatggtaataaaaatcaaatttaataagtctgaatgtagggatatggatattattttttatacattttgggtttttttaagtatattcagctttatttttttaaatggctgatattttcaga

SEQ ID NO: 35250 - DNA, 1866 bp, Homo sapiens
cagcctcctgagtagctgggattacaggcgcatgccaccacgcctggctaatttttgtatttttagtagagagggggtttcaccatgttggtcaggctggtctcgaactcctgacctcatgatccgcctgccttggcctcctaaagtgctgggattacaagtatgagccaccatgcctggcctttatatggattctaagagtttactcttcccctgaggaaacataatcctttttatccaaaaactttctagccgactgaagttcaatagatgtggtattggacaaatctcttaacctttctgggtcacagctttctcctgggtaaattgaaagatttgaaccaagtgtcctatcaggtctctctcagttaagttacaagtgggaaggagaaaagaaacagaggtgttgaaggaaaggacagaggcaaatgtgtcagtactcctcacagggtgcttgtgaagcctgttttaatcacaagctggtgcttacatttttgttttttatgtgaacaggtgtgtaagagagagaaagaaagggagcgaaagagagaaagaaaggagagtagagggagagggagatggagagaaatatatttctctgtttctttaccaagggttcaagaaggccatggccttgggccatgagtcagcccttagacaccgcagcagatattgtcctagggtatgaggatgtttccaattgtcaaatgtgtttttggcttctggggactggctgaaatctgcatcataccttggccaggctacacataggttgctgtcactctcctgtcacaactgccatctgctatccagaggacagctgcttgggaaatgagggccccattaacattccagtgcctctggctctagacctgataaaaccagagcattgtactgtgaatgtggacaattccctctccattcctgttattgctgctgagctggtcgtaaggaaaccgagtgagaagggaatgcaacagaagaaaaagaccaaagacctgggtttcagggctgggaaagaaagcaagacagaatggaggaaatgaggcctgcaggacatggcgtctcaaatgtttgcgtcgcctttaaagtagcctgtcacagctgccttccacgactcttcaatgccctcatcccttctccagatagaaatggagcagctcttcttggaggccaggcttcagctgatagcaagtctgaggtagagtacagcacagatcaaagattgctttttacctttaaatgtaaagtgtaaagggacaggattagagcatccgcctctgtctttttgaacacaaagaccattatcggtaggggaagggagacttggagagtttatatgattgacaaaagtcacccaagttgtttgtgagccaggactggaacagagctttttgggcgtctagccagtgttcttccccagtgcattacatagaatgaatttgttgtactacaacactaatgttctgtaacgtttccctgaagaccgtgttacaatagtgatcttcatttatatatgtatttttcgttttatatatttaggttgattgtgtctatatttagacctcataatttaaattgcttacaatgactcattcatttgcccaatgtttgttgaatacttgctgtgtgccaggttctatcataggttctaggaatacaaagatgtgtaaaacatgattcttgctcttaaatataataactctcagcccggtggaggaaataaacacatttaaaatcaagaatagtgcaaatacaaagaaagctagaccaagtttatgatgcaatcaaagaggcaggcacccaactgaggttaggagggtgagaaatggtagcagcccaggagaaaggttttctgaggatgta

SEQ ID NO: 35251 - DNA, 3861 bp, Homo sapiens
aattgactaatgtgttttcttgtttcttccaatcagaatgagtcttcatcaacccaaattccagactacacctgagcctttccatgatgacatcccaacaggtttgctttcttttagagtacttatagtgtgaaacacactagaaaaaaatgccatagaatgacagtctaatccctaaaataatttctaaatttcctgagcaaatcctcactttctatccctttctctttcacgtattgtcttttgacctgctggaattggttcacagcccttctttcactccagcaccacctgtgccctcctcaggcctcacttgcccttatacatgtcatgttccttcccaggatctgtccacaacatatggctgaagactttccatggagatggggtacaaacaaaataaaagttcccctattggcagtcctgatggtatcaatcaaaatgggaagggaactgcatctctataccctcagagcggcctcaccaaggccctgaacctttcactccaccagctccctaaaatacctgccttctcccagcagctgcctgtgctattcttatcttcacttgctgttgatagaaacaaggaaagcagctctatttcaggcttcagcattgacctaagtctcagctttagttaaggcaacactgggctggtgaagatggagtgagccattatttggggtaatataattcaagggcttactgcagcacaggctgtcactttagtgactttgtccattttctcatttgctcccatattgactgaagccacttgaatttttctctcatttgatacatacagtaaagaaaatcaggataactttcctcactctatacatatggaaaaatcttttatcttaagaggttgcaggggaactagagccagaactgaaaagatttctagaaaggaaatttgaggattgaagggatgtcttgaggggatgccaaaagggaggaccagaactcaggttacagctgaggtttggggatatccactcgagtggagtgaaagtcttccagtcctaatgaatcgcttcttatgtataccaaaatattggcctagttcatggctctcatttagccaaagtggaaccaagagcctggagctaagagtacctacccaacgaaagctacccaatctgctgttccctggtctatgatcacctcattcttttgaagccaagagaacatgggtgataggcatgtgcagttgatttcatagttatctgtgccagccacacactcattctgcgtttcctttggacctggacttttttcagacctgcattgcaaaggaatgaatcacatacacacacacacacacacacacacacacacacacacacacacaatcacacacaatcattgtgtgcctttccctcagcaagaatatattttttggtcctagagaacaatgtaacaagatgcctttcatcaatgtattatctctgggagtatacttcaattagcaatttaagagctagattttgtgtgcacaggaacagcatgttatgttcttggatggccctgattcttgtccatagagttcatcctagaacagtaatcttagaggtgggactacagggggaatagttgtaaaactggctaggagctgaagcttggtagatctactgtttattatagccatggcccttctgagctgactctgctcttgtatgtgctcttagaggtcatgaaaacggcactaggctagaagcgatgagacctcggtaggaatcctagtcttgctatataggcttggcctctgtgttcccacctgtaaaaccagagtagcatgttgtcccactgaaagctagaccttcagcacaagtggtcttcacctttgactgacccaggaaaactgctgacactgccccatccccactggattatagagcttagacatgtccatactgtggtacttgctgcttattgctgaagccaccttccacctgtgctgtgttccctgtggattgctacaaatgccaagtgactgactcatcccagtgaacaacattactgccaatgactgtctaactcaactgttggtcacaatgattgctagcatttttttctggattctgcttatccttacatattatcaataattcttaatgacaactaaggaaatagaaagaacttatctttacaagtgatgcagattccttcatgaatctttgacttgatcccagaatcccatgacacccacggactcttaatctcaataaacattagtacagatgctaaccacctcataggggcctaccacctggcatggtggtatgatatggcacaaagagcactgggttaggattaagaatgtctgggttctggttcttagtccattagtgtctgtgaccttggactgctgttccctcttaattacagtgatgagactgaactggatccaaggtttgtgatcctgtaacgtctctagctctcattcagttggactttgttctctggagcttgttccagagaattcagagttccaattctcttagtcactcagcgattcccaatgggaagatgttatttcatgcactggtttacccccattcaagttatatgtcttctggaaaaattgaatattaaccaacttttaataaatcattttgaagaagagatagggtaaggattttaaataaccctaaaataaattatttcacaaaatacagatttcttttgaaacaaaagtactttctgtccctactgtagcctttttataagatcatgtttattccttatttttatttttttaaagaacagaactatatatgtgtccctgaaaagtctcctgagaattgaatcctcttttctctttcactcatattacaacaccagacatgttttatcttcatttttaatttaattggtaatgacgtctaatacttgagttttgtttctgggtactccttttggcctcattgacaagatttgtaaaagtttaaatgttgtgaggggaaaaggcaatttcattaaaagaaattcttaggtgagttttttgttccattttcttaagaaaaaataaaaggtggatttgaaaatcaaattattaggtgaattttaaatctgttttataaggttgaagaagtctttgttggcctgtggttattttgagcttctttaagaatagaatctaagtagtccttatccttctttccttcttgtactgtcatccagaaagcattcactacagactgcccattctgggccccaggacagctgtcttccacggattactgacagaggcctacaaaactctaaaagagagacaacgttcttccttgcccagaaaggaaccaataggcaagacaacgaggcagtgagcggtaggagctcatcacctcccagactcccagagagaaaataacctcgccaagccaatctttgacactggcaccttctcctcacaattttctctcttctcccaaaagatgatttaattttgccttcctaagattgctggtattctagctcttacctctatgttctttctcacgtctcctaaagacaaaattgtttaatttacatgattataaagatctgtttatgaaaatggaacatggtaactgtctctcattttattttcttaaaggttcttctctacgttaaggtggaaaatgtccttctgtttctaagtcacaagttttctgtgaaagttatttcagctctttcttcaggacaggggccagagatggctccatgaaatccctcatgaattcagcttattaagaataaaggaataggctagatgtggtagcttacacctgtaatcccagcactttgggaggccaaggtgggtggacaaagtggtttaatttacatgattataaagatctgttgatgaaaatggaa

SEQ ID NO: 35252 - DNA, 1461 bp, Homo sapiens
acaggggttgcagtgagccaagatcacaccactgcactccagcctgggcaacagagtgagactctatctcaaataaaataaaataaaataaaataaaaatataaaaaagaacaaagatgtggggctgggcacagtggctcaagcctgtagtcccagtgctttgggaggctgaggcaggaggatcacttgaggtcaagagttcaagaccagcctgggcaataaagggagacccctatgtctacaaaagtaaataataataaaaaaaagaataaaggagaaaaagagaagttgccatctagccttatctgtgtttgttaactctggtagatggcagaggatactgtgatgcaatgactggaaaatggcaaggcattcgtcgttgcaaccctgaagcacaggaactgtgccttgccttgcccttctcacgtcacttcctttagtgcctctcatatgtgagaagttcagctaatcctggcttaataaaaaccatacctagtgcatgtattatgtagtttgattactttggttggaagatgtatgcatccagatttgtcccaatctgtgtgtccatctgcagtgtgagggagacaaaagaaaactctaggctggcaaatatgatatttataggcacatatgtttcatgtccagcttattgggggggtatatatataaaaagaacacctctgttatttaagaagcaatggtcttgtcttatcgcaagatcctgactaactggaaactggatcaacatgtgagaaccaacctctgcctgactgtatctgaagaatgctaaaagtatcatcagactttgaacacctactgttgacttttctctaatacctctgtcgagtgactagattaaccagataagtgagtaaaaacatcctgacatccctttccctagagggctggagacacaagggtacatcatggagactgggaattcacatagtctggggacccctgggagtctctgaagcccttgcagagtgtctgtgactttacttgaagaatggacttcaaaaatctcaaacaaatggccttgtccttaaattggcctcacttcctgcacaagaaaaaaaaaaaaagacaaacaaaaacagaaaaacttgcttgattgtcctgaattcctggtaggctatgattcttggtttcagttcagttggagtttaagaactccaaaaacagtgcccttgaattctgatcccatttcagatagttgtcaaaggagagacacatcacaggtaacaatgtttccttcttttgttgttgttgcagattaatacatccagtgaaaagattgggtgtaactgtacccatgcattatagaggatacatgccccatttgcaattatctggagcttttgaggtaatcagaatattatgtgactagtgagatagaatgcttcctaaatatagtcaagatggcttcatccatagtactgggacatttccaaaatc

SEQ ID NO: 35253 - DNA, 1069 bp, Homo sapiens
catcctcacaataaccctacaagataggtatcactatccctataatatggatgaggaaactggatctcacaaagtttaaatgacacactcaggttcacactaagttgttaattgaacttaggtgtttttgaatacatacctggagcacctataacttccctactctgctcctctgattgtgaataatacccactccttggtcaatataatatctaagatattatatctaccaatcactacaaccttgttagagttaaattagaagtagcaattccctcattgaaatcttctatcttctgagggataaatctcgctacaaaccaaacaaaaccaagccttatcttctggggtttccccagagtgggaaatgccacacacttgctgcaggcagaggcctctctcctctcaacctgttagacattcaggtttactggaaatgtgtcatgtctttggaatgggagggtagggaggagccagagagagacacgtcctggcatgaaacttgcccaccaggatagacaaggcttgggaggtgggaggtggtgggtaggaaggcagactaggcccaagagcatgtgaaagtctgaacatgtgaacatatgtagcaccagtcagtcctggggtttttgtcagccattagagaccaaatataggtgtgtgtgtgtgtgtgtgtcagagggtacttggaagtgtcaaaggcacttcttacctgtggtaaagctcagtcacttgacacaaagttcaaggggctagattctgtctggcgaagggagtctggccagagcaaaattaggaagcccagggattctcagtggggccgtatcatgatttatgggggagacagatgcagttagagactgcattcaatattgaaatattttacatacatgtattttaaaacaaaatatatttgtgtttataatacaaaatgatgaaagcaaattggaaaaaaaatcttagccaggaggatgtgcagatgaactctagctaaaaactgttaccttttgggtagtgatttttcaagggagttgtgaaatttctatgttaaacaaaagaggatattggtttc

SEQ ID NO: 35254 - DNA, 3367 bp, Homo sapiens
gcctccgttttctgagatgctaagtcacagatggagaaaacagatttggtacctgggtttttggggtggttattgatttttttcaccaaattccctggaaatataatttaagggccagagaagctaaaaggaaagcgaccaaatgaatcctgcctcctggggagtgttgtctgtgtgttgtgggggtgggcagcagtatggccaaggcaactgtagctttataaactgggtgaggtgaggtgagatagctacaatgtcagagaacaattctgagttttataaagacacaaaagtactaaaattttctcaagatcaaggaaggggaagggttggcccatgaaagttgctaaacaactttctttagcaacttgatattccacgctgcttccgccaggctcagcctgcagctgcaaccttcagagagctgcaaggagtatcattgttattacctaatactgccatttattgagtacagcccctgtgccaggcactattcattgtgcatgtgctcattgttttaattctcttagaacttggagtaggtatcattattttcatccttctattacagatggatttaaggaaattaaagcacataaaacttaagtaggccaggcacggtggctcatgcctgtaatcccagcacattgggaggccgaggcgggcagatcacctgaggtcaggagttcgagaccagcctagccaacatggtgaaaccccatctctactaaaaataaaaaaattagccgggcttggtggcaggtgcctgtaatcccagctactccggaggctgagacaggagaatcacttgaacccaggaggcagatgttacagtgagccgagatcgcgccattgcactccagcctgggtgacagagtgagactctgtctcaaaaaaaaaaaaaaagttaagtaatttgccaaaaaacaaacagctaccaagtggtggagctggttggaacccaggtattgtttgtatagatcagtcctcaccatgtaattctgcctcttcagcagagtttgtgtctactgcaggaggtgaggaagtgagggagagtgggaggagaatggggtgagaaacctaagtccctctgttgatcctggggctagactgactctccagcgctgcctcagccaaacactgccacatcagtcttctggactggagtttgacactttcgccttactcatcagtcaggtgacaatgacacatgcaagcctttgccagggagcatcctgagacaggtatcaaagtctagccctccagcactgtgttatatcaaccctgactgagactagagctcaagcaggcacccagttcttgcagagctgccctggcttcagggagtttggctgaagccccagctgcctctcttctcaatgggaaattgccaccaagcgtattctggctggagggaggggcatttctcttcatgactgccacttcagctgaggaggctgggttgacaggtataaccaggttttccccatctgcctacccttttcctagcaggcagtcagaggcttcttactgagtctttccttctgggtattttacaaagttggggggtggggacctttctggttttctctgggggaagaaaattaaaagccaacaggcctctccctaggaaattgcaggcatatgccaaggttctcagaaaattgccacctcacctctcctgacaaatgacctctcctgacaagtagccaataggctttcaaaacagcagtaccactgactaacagcaaatgttctctttttatggaacacaaggtgttcacaggtgagagcagatctccttccttctgcagacgtggggctatggagaggaagtgaggactctcatactcattttaccaaacaggaaaatggaattaccccttcacagaggggctgattcatttatatgactctgctaatgcctgaaggaactggcagctcgagatgggcacaggacccagacccatgatcactgtgaatgctttctgaacaatggcaataccaaccatggatcaactccatcactgggcactgctcagacgtgtaactcttggcctctgagcaatatgtgctttgtttcctactttgaggccaattttaaacttgaatgtgtgaagcaaaaattattttttccctattggacagtctttaagaactggtaaaaatacaaggggcccttgttacctgaaccaagatctgaggaaatgctccttccccgagaggactctggaacgaactgtcccttttagcggggctgatgcagcccctgtaaagcccttagtaaggacttaaatcattctgatcaattagcttaaaatctaccagttcttaaacactttctcccccacttcctcagggaagccttcctcagtccccagttctaggggaatccttgcttgcctttaatttttgagagctttattgtcacctgggtattaaagagcttctgtttgagaagcaggctgtcacttctgtctaggtcaggcttttcttcacagcacgttgtgagccaaaaatccctgagcctatgctggagggaccccaggtaacccctgacactgctgctgtatttgttcaagcaaatctttactgagagccttttataagtcaaacttgatgtagagctaggagatacactagtgattcaaacaattattcctgccctcacagtgcctacattctaggaaatataaataacataattttaatatggtgtattaggaagtgattattgctatggagaaaagcaaggcagggatgaagtagctaagaagactgatggtggggtctgaggggatccaaatcaggtgtgggtcacggggtaggattatcttttggcctgaattattactgctctcctggcccctagtccctgtgcttttaccaagagtgcctccttttgtttattaaataagagatgggggtctcactatgttgcccaggctggtctcaaactcctggcctccagccatgctcctgccttggcctcccaaaatgctgcctcacagcctgggccactgtgcctggccccaatagtacctcttaatgcctgcctctcttccttcgattcttctattcctctcactttctccaccaccaaaaattgtgccttcaatgccatcccccaaattctcctgatctttaaggaccagctcaagctacagcctttccccaactcctctgaccgctcccttctctgagctccatgaaaagcattaagccacacaagtgatatttgatcttgtcttccattgtttcttctatatgcttcttctatatctttctcaactgattaaaagctgtgacaaatggaggctaagatcccagcatattgctttgaatacaggaggtgtttagtaatcat

SEQ ID NO: 35255 - DNA, 2872 bp, Homo sapiens
cctagatttgagataagcacgtattctaatataacttctttggctgtgatgcactgaggatcagctgagggatacctcagctgtttcctatcctgaataaaagttcctggagtaagaggaaaagagtgtccaacatggtaaagaatgtcaatttatccctaccctttcattgcccctactttcttttaaacttgcatattaatcatttgatactgtttttgggtgagataaatacttgcttcccgcaataggtgacagatgaaaggattttattgtcatatactaagagtggcatcagcagataagtggaactgtacctaattactgccagaaaaggcagttcagggtgaactcctttaaaacaaaaattatcaccctttgtataatttctctaacatcaaattgacttatatccaagaatcacagagcggatcaaatcattcagttctttgggactataattaacatccaattcaacttagaaggttcataaggaaattccgcggctcaaaattaggcgttaggtgggcattttactgagggttttttccctacggccacatgaacaataagtaacccgtcctttaaacatttttcacactaaacattatgccatgttccaaggcacagaccattgcagcctccgtcccctcagcggcgtaaacacttggaatgggcatgctgccccgttacttagtattgagaagtggtcactttttgctcttcttaggtgagtgtaagcgactgccttccccactttaggtgaaccccaggacttggagcgtctgtgggtgctcctctaatggggacaactcctcccttccgactccatcgcagagaacccaaagttcgaaaccaacagaacgaaaagcaacgaagcacacttaaagtgaggaacccggcaagcggcgaaattcttgctgaagagaagaaaaagcgaaaggttttccgctgcaaccaatcagatgagaggattcttggcacgcccctttctatctaccaatcaacatctagctcaatggggcagtccattgccacagggaaagggcttggtgcagcttccctcacaacacacacgtcattctaggccattccacgaactgtgctcaaaagaggaaaacagtgcaacagttccaaagctgatcagtctcgtggtgagcagcgaaactatagacttctctaacaaaaccatggattctaggagggactgggaaagagaaaaacgaattctggaaggcaaactacaactcccaaaggcccttgcgcggactcagcgcgcgagggacgaagggcggtccactgtaaggggaaatgctgaggatcactgggctcctcccggctttctgaacgcaagccagcaagtgggcgggacctggggcgggcggagcggcgaaagcatctgctcctgcgctttgtggtctcctgcctccggcttctccgcctgcgacgtcgaagggggcgtggcctgcgcagaggctggtgggggtgcgggcgccgcgggacttgggtgacgcgtccctttccagctcagcggtgtgtgaggtgtcgcggccccgccggcgattggctgttgagaggcgagtacgcggcggccgttggtcgctggcctcacggagcaaggcccccggcgggcggggaggatatggggcggcagtggcggctgcaggaggcgggcgtggacgagccggtggctgcagcggcggcggtccccggagtcctgtgaagcgcccctgtccgcgcctctgtggggccctcagagagggctgccaggacgcgagccactgaggagccgctcagccagcgccatagcccttaggactatcggtcacattctcgcgctcctgctccggctcctccatcttggcctcggcagtggcggctgccgggaggatgtgccgccttctggcagggggaagaaggaggagaagatgaagaagcaccggcgggccttggccctggtctcctgcctctttctgtgctctctggtctggtgagtagccgcgacgacaagggagttcccgtgaggggagtaaatgggagggagcagcccaggtcacaccccctggtcattttggcttttagggtccgggtttccaaggcccccgtggaagggacaaaccgattacttctcgactctccatctgactggtctggtagtgctctgtgcggagattttcatggtgtattttggaatttacagagactcagtgggagagagagaggtgccaaggtagagggaaccaccaagtgcctttgtactcagttcctctaccccttggagacggtgcagggtttggggtgggtgttcagattgatggtaagtaagttgctccgatttgccgccagtctttgcgttcttagtgtggtaaggggataaagcacgtcggatgtgatgcgttccggacgtgcgattttaaaacgtgagtggtcatgaaggtaagagtaatgtataagcagtagttctcctggacatttctcgcacagcgtttgatcccaagtacactcgggccgctgtttttggaaacttggggggcgtgtgtgtatgtgtgttatgaagcactttttcaattggtttggtggagagggtgtcttagatgtagtgtgtgtagtagtttttggtaatgccccttagtgacgggaaggtaaatgctgtattttcaaggcgggaagagtgctttgtccctaaagcactccttaagttttacggagtttctgttaatcccaggcacttctggagttttttgaggagcagagaaagcttgtaagtcgagggactgctgtcaccgtacttggaaaagccattctttcctcccagggaatttcttcaaagatgtgtgacaattgatgactgaaaagatgcttcttcagtcta

SEQ ID NO: 35256 - DNA, 416 bp, Homo sapiens
gaccagggagaatcgccatgactcttctcacatcaattcatgacgattatctcaagtaggcccttactgcagctggcaattttactacatttttctagtgcatttattgattctcctgaactatttcaaactttctcctcaaaacacacacatttccctgttcctactgtcagctgatgaccttcctatttcactgagaaaatgcagaagtaattaaagatcttctcacaagctcccacctaccaacttctgttcatattatctgtctttgctcatgtagctgtctcctggacgccaatgctctactggtgaactagattgtgtcaacaaaaaagagtccaactatgtaaaatatttgaagagatttattctgagccaaatatgacttaccttggctggtgacacagccctcagga

SEQ ID NO: 35257 - DNA, 3833 bp, Homo sapiens
ctttagtgctcatctaggggcctagaggctctgcagcagtgacctctcctgatggactcctttgtgtgcctctagggagatgcctgagcagcatgtctaaaacaaaccagtttctacttcatcagagtgagcccctggaggggggtcaagacagtctggaaggtcatccagcagacacagtctattccagtgtttgtcacaaaagctattgttcaggtcaactgacttgcccataattccagagctgagcttcttaacatactttaataatcattgttcagagtatcacccggtgtaggtgaagataaagttactgatttgcagacttttggactgactccccagaaccatatgtaatcactgccgcccactcaaagcattatttctctccctcttggcataggctggggtggtatcatttagagtcctgtctttcatcttcctccacttgtgcataggcagggtttcctatcctcacctcctcctctccctccctgtgactctctgtcatgtgatggaaacatgcagaggagattcatcttgttgtgctgctctctggggaggcctattctaaagtacaaacagaagaccaaatagaatgattgaaaaaaatagttgagattattttgaatagtcaataagaaaaccatgttgcaaaacccacatcaaaagcccagctgttggggtatacctttcaaattccactaactacagaggccacatacagggagggggccatggaggaggaggtgtgcttgcaaaaagacagaaaaggtcagggtgataatgaaaaataattgctagaaaaacaagctggaggccgggcgcggtggctcacgcctgtaatcccagcactttgggaggccgaggcgggcggatcacgaggtcaggagatcgagaccatcctggctaacacggtgaaaccccgtctctactaaaaatacaaaaaattagccgggcgtggtagcgggcgcctgtagtcccagctactcggggaggctgaggcaggagaatggcgtgaacccgggaggcggagcttgcagtgagccgagatcgcgccactgcactccagcctgggcgacagagcgagactccgtctcaaaaaaaaaaaaaaaagaaaaacaagctggaagcagtgaggcaaaatatttctatcacaaagactgaagagtttagctgccaagagacataggtgacctcttattgtcatcttactttgtgagcaattattttcagaaagtctttctggtggatatcactggaaaatattttgatgagctttcccccatctgagctttttttttttttttttttaaatcatgaaataaaccctacagatccaccttagaaaagggtgattttgtagcttggctaagtgaaagtgggcaatgggcagtttgagcatggtgggggctgggggacatttgagagccttttcccagactcaatctgagagtggagactgagcagttcaaaatgatatcctggaggtgctttggatgatgcagtgggtttgtttttgatctggctctcatcttcttggcaagtgtgctaccagcaatgtgtttatgaagccacattgtcacaatgtttgctttgactctgttttgcccggcaatgtcagtgactagacacatttttctgtgatgtcaccaagctccaggaatgattgcttctgagcacagagagatcacgtggagacacgtgatcaattcctgacctgggaatcacatggaacaattctatttgtacccatgagcctcaatcattaatctagcagcattttagtcctgtggatgtgtgtgattagttgaagttatttaaaagaggttccatagaaagcctgagggttaagggaaaggactaagcagcagctcccttgctaatgccagcaggaaagacacagtttcctcttttagggatattgatatatgaaggcagtaatttgtggttaatggttaaggttttggggccagaccattctgggtcaaatcttactcttacaaatgctatgaccttgggcaattttcttatccacaaaacagtgataatgctagcaattacatgtggcagttaagatgcctttggttgtgagcaacagaaagtttaacccaaaccagcttaaaggaactatgtttgtgaagtcctgaagtgggcctgacttcaggtgtggtttgattcagatgctcacaatgccctaaggtctcttgtgtcattactctgcaattctcttcactatactttccttctgctattagctatgtgctcaggcagccttgccgcaaggcagcatcaatgattctggaccttatgtcctcacattgcaccatataaaagaggggaatttctcttctggtagttcccatggaagaaggaaaagtcatttctgagaagtcttcagcaaaagtctccttatgtctcaagtcctgcattagttcacaaacacaactctgaacaaccattgggccaaagagttcaaatattagacttaaggctaactcctagttgggagagtggaatcaaattcatatcaaccaccttgcaaaggatataagagaggcaattccccaaaggaaaatatgcatattgttctaggaaaaagagaaaaatgatgctatcaggcatccaacaatagtagggtggttgtgaagcgcttagcaaagtgcctgacccttggaagaactagaaaaagataaccagtgattattatgctggtgtgaatgtggaaccactgtttcagcctagaagtgccacctcaccttttcttctttcatctgtaattcctgcctctcctctttaccacatctggagaactggattctagccttggtgctgtgtctgaattgctgtgtggccttggccaagtcgctcaattcctgtctgtcaaaagagaagtttgaatgaaatatgagctgaggcacgtctccagaaataaagtggcttttttttttcttggctccctggaaagccttacataaagtcggtcatttggggagatgtttgcggtttaacttgaagaaaagactttgaagtcaggcatatctggacttgcttggcatctgctagtgctatgatagtagggaacttaatcactctgagcttcagcctcctttatggtacaaagaaaggagtgataaataatacctttcaagcctgacttaaatgaatatgatagagttcaaatgaggcacaaaaatttatacactggcagaacgaatagaacagtgacttgcatttaaaaaatgtatgttgattatttcatctgctttcgttttcaacatcctatcatttgtctgatgatttcatatttttccccttcagggatattgagatgttggaaagctaaattgggaggatacctttggatgtatcatgatgtgaaatcagagggcacatgtttccctcccctaccaggctgatgatcatcacatatagggctaaatgaaaaataagtaaatattcaaccaatattagtaaatattcaatcgatatccctccttttcttctctctttcttttctggatttttgttttgtttttgtttgttttttttttttaaatccctgcacatacctttggctcactggttctacctagtggcaattgtaggtattacttaagcttgatggtggcatcagtctttaaagaagtgtatgatccttaaagccgaacagagtcctgaagttgagatcctgccctatcccaactgtggagcatcagcagtgaggctcaatgctgggggagcttggaagaaacgtgtcctgataatgagtgcttgaattcttctgccagttggcagcttagtcagcaaaaccaggttttggggactggaat

SEQ ID NO: 35258 - DNA, 1220 bp, Homo sapiens
tattataatgcaagtacggaacaccccccctccccagccccttaactcttgttaactgatattaattcttctgattagtttatgtcacttggaagagtggattgtcccaaggaaagaatggagaacaggctagaccttggtgttgctaaagctagtgctgcactcatggctaggccagtgttctcctgttgagtagaaacaatttcatagaatgccaacatcagaaaaggcactctgtgatcacaatagagaaagaaataaaatccactctataatcctgtctgagcacagatgaaaccaagagcgttgtctaaaagtgaccacaaaaatgaccagtgtgcccctatccttattgatataagagattgctgctgctttaccaaggaatgctttagtcagtctcgttttattcttcacaccttctaggtaagaattattaagatacccagtcatgggatcctaacaatatctaactcagagaaaagatccacttctttaaaccctgtccaaaatcacttaacacgaggtttggcaagagagcacctgacgttcagagagagatgaaaactagggaaagaatgtaccaaaggaaaggaaagagatgatgaagccaaaacctcagggctttacagtggggccttgagtgggctcttgtttcaatgtattcagtaaccagaagccagggaccctgcttgcactgcctgccactgacatttctcctctgatctaagtctctgcttaacaaagaagcctgtggctactcttaaagtctccccatctggaatgggggtgagtttgttcagctcactccttcttctccttcctgagcagctgacttattctgatgtggttttgcggttatacagtaagcagcactgcttatgtggacatggtgtactttcagtttctgaaagtgagtcatgttgactttcctctgaggagtaagagtgacccttgcttaaaaggacaacatgactagaaggaagaaacaccagaggccaccaggaccagaatgtttaccaatgtaggcagtcactagtttttaggagtagtttgtgtcatctttttaaacaaggtaaactaggaagaaacatttggttttgaatctttgagtgtttgccaatgtttgaagtacttatctatttttactcatcatttaaagtgatgtttgtggctaagagctcaagatctacaaacatacttaaataagtttacatttg

SEQ ID NO: 35259 - DNA, 534 bp, Homo sapiens
cttgttgccccatttccctcctggcttcctcagaacctagtagtgcccttttgctggcctagcttagccctgtctcccattggcttcaggccctgggggctccactgtgtcctcctgctaattcactggctccaagatccacctcagccccttcaataaggccactgccactgtggattcagcagctggtggctggatcttgactcatccctgataccccatgggaatcaaaggttactttggaaagctgaacttaagagactccctccacactgagcttcctaactgatgtagtcatatatcaggttggtgtaattattccccagatgcctcaacagggagcagggaataagcagccctcttgccctcagttttactctaatgcattccctcatccatgggccaaggcctggaatgggggcaattggaatacacatggttaagagtcttgctctcctgccttctaattttctgtgttttattaaaaattcatgggggagtggcctttccttttatttccagagtcatgtcttt

SEQ ID NO: 35260 - DNA, 1096 bp, Homo sapiens
agactcccaaggaaaactgacttaaagtccctaatttgaactggaaaaaggaccccattgatgcagttagtttcttcccattgatgcatttagtttcttactcttgagactgaaagttgacctatttttcagttggtaggtaagttgggaaatttttaaagcttatgcaaacttcactcttggcattattggccttgaagaaatgttacgaagacttctctttggaaagtgagtttgctggaagtagcaacacactcctgtgatagagacaagtatagaatattccttccacacctgtattgccttctccagaactgcattttaacaattcaatattttctcattggcaagcactctcttgttggttgtattcatctcagggagttacatttttctcttatgagttcgacattctttcaaccgtgttctgccagtgagtcatagggacccagtgcatttcaggagctatagaccagaagttgagcatattgttccaaatacttggatctgcattttaatattgtgactaagtgggctcagggcacatttcagcagaaggcacttttgcattttattgtgggcaacttcctaccacctccacccagaacaatgaatggagttgaggttttcccatttattcatatctggtatctctgtgccaaagtgacatccacacaatgttttctcatatttaaacaacactggtcacttaattacagtttaaagttaattcaagagaagggctatatactagtagaaaaataagttttatctggatattataattatgaggcaattagtaatttcttggtggctttttgggatcagtctcactacttcttagtctcaccttaatcagtctcattagttaattcagaaaataatcaaaccttaacatatgttttcacttttacttcttagctgtgtttttggagctaggcaacatggtacactcaaagaatgtagaagaattaaataccataaggtacccggttgcatgatctcattacaccctgttctttgtctttatagcaatggcacagttggatattgtgtttcttggtttatttactttaaatatctctctcccactaaa

SEQ ID NO: 35261 - DNA, 2269 bp, Homo sapiens
gataccagagcaggggctctcaagctttagcatgtattagaatgacctgaaaaacttattaaaacacagattgctagactccatcccagagttttgtgaggtggggcctaagaatctgcatttctacatattccaaggtgctgatgttgtcacaggtctgagaactatgctttgaaaatcactgatctacagaaatggagtgacagtgagaaatgggcagtcatgatcaaagtacactcctgcttgctatacttgtacaatgcttactaaatataaaaccaagttaacttgaacatcaaaggcatcttaaatggggcacatgccaaaaggaggaattacagctgaaaagttggaatatagggaaagtcaattccaccttctgcttgaagatggtatcaggtctaggaacgtggggttctgggataatcccatggaatcaaatcttatgtgatgttctgcttcattttgattgcaatcactagctttctttaccctgaggctagttcttcagttcccagtatggcacacagtgggctgagtggaagggacaaaggtgaacttctcagggttactgttggtattcatcaccagcctaagaacagaaaaacacagccaggaagagaaactcaggtgaaactggacagccagagcagaagtggctcctagatagtggctctagaaagtaaggtatttttaaatgtttggggggatttatatattaaaaaaatagaatttaagaagtcattaattaggttttggtcttgatgtaggttgcttaagaagaaaaaatcagtttcatttagaggcctgttttggagattggttcttaccttgttggaatagagatagcagacttgggccgggcgtggtggctcacccctgtaatcccagcactttgggaggctgaggcaggcaggtagctaggtcaggagctcgagaccatccaggccaacacggtgaaaccccgtctctactaaaaaaaatacaaaaaaattagctgggtgtggtggcggtcgcctgtagtcccagctactctactcaggagaatggcgtgaacccgggaggcggagcttgcagtcagccaatatcgcgccactgcattccagcctgggcaacagagcgagactctatctcaaaaaaaaaaaaaaaaaagagagagagatagcagtcttggcctatggactggattcttgtttcgcttgtgatatcactttttccagtcactgatttggaatatttgcgttttttaacttctctttgtcagatctcaggctgcctgggaggttgagggtaggggtagaagagggattacaaaaacctggcagcctccatggactcacactatgggtacacattagaaatacaccagggaatggaagatgagtcacagccatgctgagtcatgctggccagataactatcagaaggatttcctgtttgcctgcgagggacacagatgataaattatttttcctcttatttaacccatttgtgttaataataacgtcatagatggtgtatcccttggtccattatcagaactctcttagtttagtcttccaaatatagaaggaacaatgggacacagggtcctgaagtgagtctgtgccttattcggtaaatttgatgcaagcatctttgcctttaagtgcagagaatgtcagtcttctcacacggaatggggaaggctgctttgtgtacttcccctgacactacagcatccagatggccagtcatctgggaagaggagagcagagttacaaaggagacagagtcaatgataagttcagaggcctaggaaagtttatttaaccataattgtcatcactgagtgaacaggcaaagaacccgcattaagtcttgctcaatttctagaagcagattcccaaacgtggatgtgcctatgcatccatctcctgcgatgctcgtgatcaaggtaaattccttgcttctatgcatagtcctggaagctgattttttaaaagactcccttcctcagtaattttgatccactttggaaaacattgccttggatgacatcctcttctgggcctagtcattgaacatgttgaaaattgtaatgtctgcaacatggaaatgtacagctaaaatttacactagaaatgacttgtatgtatggtagaggataaaagtggggatgagaagaaaagagaagaggagcacattaggatcaacaattttaaggtactgaagaatgtgagcattctgtaagccacaaattaccatgctatgaagcttcaaattgcac

SEQ ID NO: 35262 - DNA, 576 bp, Homo sapiens
aacctgaggagagagttgcaggaatgcctgatttatagccaattcgttagaagtacaggtgacaacatgggacttgcaattgatatgtaaagtaggggcagtcttatggggctgagtccttaccttgtgagatctgcactaattctgggtagttaatgtcagaactgacttaaattataggacagtcagtaggcattcacagagaattagagaattgcctaatatgtaggggaaaacccacacatatctgaggtcagaagtgaaatgtgtgtgcaaaagaaaaacaggtttttcttttaatgtctcacatggctggcaagttgatgctggctgttggctgggagctcagctgggctgtaggctggacatctttgtttctttccacttaggctgatctacatgttgcgtaattgacacaaataatttagctgggttcaaaagtcagaatctcaagagataaaatgtagaagcagatggtttcatgacgcctagatctagaaacagctacagcatcacatcactgaattcagtcccagaagtcagattcaagggaagggacacagcccccacctctca

SEQ ID NO: 35263 - DNA, 1525 bp, Homo sapiens
ttttcttttcttttttttttcttttttttgcacataagcactcgtttctgctgggtgcatagccaggagtacagttgtagagccacagggtcatatttagctttagaagatattgtcaaacagtttcccaaagtggtgtgaccaccaaaaccaccctcctcttgtttaccccctacctcactggccattctttctcaatttttttttgccaatccttcgtaatagcccagtgttttaacaaagaagtaccctattcaaatccacatctccttttggcctcatcctccttttccctttccctaccttatttttctttatatcaattataaccatttataataatgtataattcgccaaggtatttactgtctttaaccctgtatattttaaggggtataagcttcatgagaacagaacttgtgctacttttattccctgatacattccctgtacccagaacagtctctggcacatagcaagcactcaataaatatttgatgaataattgagtgattaactgaatggaggaaatgttagggaaaaatggtaagaggcagtggagagatatattctcccccaaaatctttaatgaatcgctagtatggatgtagccctgtttgaacctggacattctgaactttatatgaattgcatcatcaaagtttaagttccaaaggcaggtgtccttgagttcctgactgggacagagatgagtggagaggaatcaaatcctgaaaaacatctggctttgttttttgtggcaagtgtcaaggtccctcaaaaaaagtgcccaaaataactttataatcactttaaactgaaacgtaaactaaagaattgtgcagtttggcagccactgacgtcacatcatttcatccagttctaaccagaagcttcccaggaacacaatagctgttgaatcattagccagggtgtgtaactggagccagctaccaatctggcctaaaccctgagttatacaataaaagtagtttgtaagctagactgaaatctctgtggccagaacaaacagttaaactgaaaattatcacaaggaaaggccaaagtcaacaagtttggtagtgactcaaaaaaaaaaaaaaaaaaaaaaaaaaaaaaagcaaggagctcttggctttggcccagggcagaccaaggaaacagaggataggtgagagatgcaggctcacatcaggtcaaggacaaggtggagggcacccagaatgtttgatggcattcagtattcattttgcattctgtgttcttggaaagccagggtgcagcctgggcctcccaaaggtattagcagtgtcaggcacctgatggcctaatgccacttacagaagcagatttctaaaatctcactggagatctaaatcaggaagaccaagaacagaatgaagtgatggggaaggctttgttgttagcgctggagactattttcaaaataagctgagtttatccaagattcttggccattgagcaactttttcaaaggtaatcgaggttggttgtcccaaccctt

SEQ ID NO: 35264 - DNA, 786 bp, Homo sapiens
tacacaaaaatgatttttcaacacaacaaatgtttttgtggctctgtacttagatgctgcaatgcagggataaagaataaacttactctagaaaaagactgatgccttgatcccataacctttgcacttgcatcagatctggaattcatatacacaagcacagaacttaaaattggaagttaaattatgtccttcctgtttttatgatctgccccttttcctgtctgctttccaaatttttgagggaatttccctggcttgctaccttaggtaaacatttattcacatgagaaactgttttaaataaaatccagttcctccttccgcctttaaccactgttaggccctggaatatccttattaattatttaaccttatgacagtatcttaagaaagatgacatacttatttcaagaagactatattctagggcctcttttcatgaaataggatttagaaatgaggaaacttcaagttaagacaggtaacagtaggcaagactttctgaaattctagagcaatgagtcacagttggcacgattttggtgtaagttatcaggattacatgttatatctcaggatttgacaagaggtaaatgagcaccaattcaagcttcgggtttatggtccgtccctggctcagatacttgagcatgaagtttctgggttttttttgtttgtttgtttttcaattaaatctgacaagcaaatccatgtcaaacatttactatctgcccactactgtgctaggagatttgggggatattttaaaaagtaagagctgcc

SEQ ID NO: 35265 - DNA, 1754 bp, Homo sapiens
cttgagctgctttcttttcactatttgaacatgcaattcacagtaataatattggtttcccttttggcatatttactaattaaatatttccatcttcctatcttagaacttccatttctactgtaatcaccaggttgctcattttgtttgtttttgtaaagcaccataaatctttccttttaggaaaaggcaggatgtaacttacaaattatgtaaatgaaagtacaaggttctgtgggccatcataactctgtcatcactcctggaaatggtcttgcaaagcacatgtctgtcaagtcagcagttctgttttgacgcagaaggacatttatttcatctggacagccttctactttctctaactacaaacttccaaattttgtgggtgggtcagaaatatgctgtgtgaagtaaatgtgctggcccagatctggaggatcgatttcctcccttgaagagaacaagccattttattccttgcttaaagtggccaagagaaagacccttctacagggaccaaaaaaaaaaatcaactactctttacaatcaggcaggtcgagtgaaccagaactcagatttcctgctctgcagctgtgtctccattcattgagcaaatgcgggagcttcttcctcttaccactgggcaagaatgcaattttttttcctaacagaaagaaaatcccctctgacagttccacccactagagattactctggtgctggcccaagctatttgcatcatagctgcaccctccaggccccagttgcatcacagagaagcggaagccccggagggatactatctctgccagtttctctaggttgcaattaattttaaaagtgaaaccaaccatatgcttcctttacttagcacattcctgggacactgcagctacttgctggataagccaagcaaaggaagcaaaaaagccttgggctcagaaggcgtagacagcttcctccttttggcattcagggagcccagttccactctcaaacctttgttaatctgcctttaattccccgaactgcctgttctctagtggtccgatgagctcccagctccttaatacccaaataaggagatcagggctggttcctgcttcagcagagactgagaggcctagagtaaatggactcggaattaagtactcaggtgacctccggactttgaacctgacatgtccctgctggggaagggttgtcaaggcactgaaagactacactcattctgagtctataaactgagcatctgtgactacgggcaatgtttagaattgtcagaggctggctcttggcctctctctccaccacttccttctcagaaactcagagcaccctaagaacttttgctgcttcttggtccccaggattcctacgccctcactcatttccctgcctcccccagatatcattccgttaagcaattccttgttaacaaacaattgctggctttgcatttctctttcctccaaaatcgccgaggcctctacttactgctaaaaaagaggactctgtataatttttaaatgaagagtgttgtttttacctaaatcaatctggcctggtatatgacaacaacaacaaaagaactcaaggatagagccaaaaaactcgccaaccaagcaagtaattatgctgaacccccttgggcactctctaattagatgttctgggccctcccgattcttagttctttaatacctgtttttctccttctcttattcggaccttgtgtcttccatttagttttt

SEQ ID NO: 35266 - DNA, 1587 bp, Homo sapiens
tcgctaaaaaatcaactcataaaaggcagattaataggagaaaaagcatacaaatttatttgatcatagctttgcatgacgcaggagccttcagaatgaagtcccaacttcctaatgcagaagcttatataccatcttgaggttacagaaagaatagaggcatggatcctggcaaactaggtatgggacagggagaagaggaattctgttgaagaacaataagtaattactaggcagaattcagtggacttgcagaacatacaatggtctaggacaaagtctattaggcctgcagagcaggcaatggtttgtgacaaaagtctgtacaggttttttaacagacgttagtcttccttcctgcgatatgcattgaggactgaactttgaccttttgtcttttgcccaaattcctatctaagggaccttcggaatcacaccctagaaaccatagattctggtttgctattaacctggtataatgtggattcctttccaacccgactttagtatagcatcacacgacagagagcagaccctctgtatcttaactcaagcatttctttctaccgacttcaagtgtttatacaacagtttaactctctcagttgtcatcttgagaatccctaaaacccatctatgatttgtaagccccagtttcaagacgtctgcctgttcaggccggaccaatgtcctgcctgttcaggccaaattttgtatgtattgatttattattttacttgcaatttctgtctctctgaaatgtgtaaaaccaaacagtagcccaaccacctcgggtgcgctttctcaggccctcttgagattgtgcaactatgggccgtggtcattcatattggcttataattaacctctgtaaatatacattggcagaatttgtgtttctcatcatcggggttcagttaatgaaaactcatggaagagaccaaaggtttttgttttcttctcttgtaggtccagactttaggtagataaggaaatttagagagcaacttcatcctatgctttgggagaaatgggggaaggtgggggcctcagagagactatgaggctcaaagtccagttcaaagcagcatattttggagtatctgtttccaggctctaacactactaaagatgtaatttccagcaaatttctccttgaagttgtgcaaaatatgcaagtgaacattgactggtgcctaaataaaggaggctttgtacatatcggtattttaaatcttccccacaacacacacacacacacatccaccataaccaccccacacttctctctttggagttccttcttatgtaaagtgggagaaagattttcttttcctaagcaaagtttgaaaaggacaacccagcatattctcagggagagttttatggaaattgagggtctggaacttgttttccctaaaactacttgtggccacatacaccttaattttggtgcacctgcagggtaagtagtgccccagtttaaagaccctggctattaatatcctatgacgctgatctagagcccagttcctttcctctaccctcaccctctctttctatggctttggttttattgaactagtg

SEQ ID NO: 35267 - DNA, 2089 bp, Homo sapiens
ttttttaaaaagttttgtgccatttgtttgtcttatctactaaaaaagaaagtagaaaaaaatgtctgctgggcacggtggctcatgcctgtaatcccagcactttgggaggctgaggcaggcagatcagctgaggtcaggagttcgagatcagcctggccaacatggtgaaaccccatctctgcttaaaaaaaaaaaaaaaaaattatccaggcatggtggcacatgcctgtaatcccagcttcttgggaggttgaggcaggagaatcactgaaacctgggagggggccaagatcgccccactacgctccatcctgagggacatagggagactccatctcaaaaaaataaaagcctattatgcctgccaagaacaacggctcttcccacaagcttattttggcatgacgtcctaatcaaaaatgtgaagacggatttgtttttatgccctgggtaggggaattcctgtttcccactctcctggcacactggtagcttcagtcaagcatattccattggcacctgcccacacagacgaggaattccctacttctattacaagtataatcacaagccttaccagctaaaaccaacaggcagcataggaagaatggagagtcattctgagccctgccagggactgggctgcaggaacaatatgagttcaatgtgctgagcacatggagagaggcactgacttgggtagaagcaggagtctttagctctcccccttctctgtactcttcgtggtgtgatagctaattagtgcccttcgtgcttaagggcaatgctctggaagaaaacctgtcagaaggcaaatgacccaatgaccatagtttcctgggtaaataaatgtttccactgctctctgggctaagtgccagcatgaattgccacgtgctaaagttagaaagaagccctctgtggagtagcacaaacagcacaggcctcagcgtgcagtgacagagtgctaatgccaggcaggcaggcactgtgccaacttaagcaagtttcataatctccttagatggcagtttctcatctttaaaagtcactagaagatcaggggcattcctttcagcactagctttccatgatttagattttagaagttgtgactttaagtttaatttaataaaagagaaaaaaacataaagcttcctcattcccaaatttactttcactccctgatctaaaagcccttgtgatttgattattttgactgactttgcaaagatctccaaaaatatcctgcaacttaaggaatgttccaactttttgaggtgccctgatgaagtaagggtggcagtgaccaaacagacattctctgggacgatgatgctgacaggcagtgagtgagtaaagcacatgtgacttcctccgtgttggagtctagacttccagtagatcaacctggaggaagctgacctactggaactccagactcaggtatcctgttccttctcctgaaggtcacataggggtagaagtttgcatatcctcagaagtctcttactaacatcaagtttaggcaatgttgtgaagtagaaaaagatggtccttcttcttatttgttggccttccaaccatcttccccctcatcctccatacctgatgacctcatgctgactaccccagtgcccagagacacccccacagtgcccaagtcaaagctctgaagagcctggctccaacctcattgtcaagctttattgccacatatatcctttctgtgtctaatgatccagccaactatttgttctgatctccttgcacttgggtaggcagcctggtaggatggcacaaagagcatagactttggagtcagatttagttcaaactgtgacttctctggttctttgaatttggaaaagttatagcatttcttcgctttagcctttatacatgtgaaaataagacataatactgtgagcggaactttccagaagatgaacaccaagtttagataggataacttaaagcatccagcagtttgccagcacatggtacgtggtaagcattttaaaaatgtaggccagatgcagtggctgacgcttgtaatcccagcactttgggaggccgaggcagg

SEQ ID NO: 35268 - DNA, 1081 bp, Homo sapiens
aaacagaaaagaaaaagtaaccagaattcttgtagcatctgttaggtgctaaataagtagaaagagttctagtttaaaatgtgtgacattcacttgtgaagacagagaagctgagaggggaccccgtcctttgttagatgctgctctgctcattctccatggctcttggaaacaagagcccaaagagaaactggtcctcaagagacagatccaagactgagcacaggctacgccacaacctccaccagctgtgggaaaagaccatgtggggtgtgaatggcagcacccagcactgtgcctgccgcgtggtggcgctttataaatgtttgagaagggagagaggaagttgatttagtgggtttagtttttaattgggtctgaataaaaggtgagcttttgcaatatcctctaatccccctcatatatccttgttgcagaaggaaaagttgagtgagaatgtaattgccaagaccccttaaagtgacattggtcatagcaaatgtagcagcttcctgccttactaagaacttttaggacgtgctgggctgacgctgtcagctgctgctttgtaaaaataagccctataattagattgctactccttatgaagcccactcaagtgctatcctttatttttaacctttatcacagtcctcaagacagagtgtgtagggcctcgcccacagctgctgagtcaaaccccagcaggctccacccttcctgctcccagctgcattccgctaaaaaaaggcctgccagcagcctacgcaatggaacgcggggtctaagcacacagacggttgcagggaatctaatatccaggcagcactgagaaagaacagctgcgccaaatttgaatcttctttatttactcagccaggcagctaacacacacaaataacattgtttcatcttgaatgcacagaattcacaactgccttcttagctcactcctgttgctcaacaatccttttttacacttgcatgtttaatgtaaataactttcacagagtcttccactttctctgtatcgatattacgaacctgttggcatagttagttgagacaataaacatttaat

SEQ ID NO: 35269 - DNA, 558 bp, Homo sapiens
tcttttctttttttacccccttgaaaaccctgtaattgcctcacctggagctgatgcctcacaaaagagaggatgcccactctcctcaaaatctaccccaaacacttcttattgccactagacccataactagagtccaatttcaacatgttccagcagcctggaagtggcagcaggtctctgagtataactgtggcactgagcccaggttcccagatttgtctcgttccacttgctctgcagagtatgagccaatataaactaaaagtgatgtctttactaaacacctgttacgaaacagcctgaggtgtagatatctctcatctctggccttgttttcagcatttttcctccttggatcaacagtttctgataccaggttaggttacaaggctggaataaaaaaacaaaccccagcttggaaaggaaggtgaataaggtagtcactcttacttgtttgttctcacagaatttgtccacctgactattgaaatacccagtctagcttcttagtttttattcatggctgttggtatttattaagtaagcattaacaga

SEQ ID NO: 35270 - DNA, 1053 bp, Homo sapiens
tgtaacaggtcacaaatattcattaataaaatatagtcaaacctttaggagttcacaatctagtgagagagacaggcatcatggtgcactgttgtttttccaaatgcccattgctaatctgttcattttattcttctgtcaaagcagtaaagacagaagagaagatgtgagtcatcccagagtcacagccctctggaaatgcctgaaatccattctttcctgtccctcagattactgtaaggacttcaaggttctctccgacccttatagctgtatgaaaacactttttctgataggagagcctccaccctctctctaaggaaagtaaatcctttcttagtcaagctctcccttttccacactccggtctttccctggaatgtctcctctgtccttcctcccctcctcctttcccattatacatctcactaaccctcaggaaaatagctttaaaattttccctctggaatggggcccagtccacagagcacctacctttggtataagtcagatgttaaactcaattacctacgaaggccaggcagaacagcgttcttctgactttgtttgcatattaagttcatggaacattctctactttcacaaagaaacatgatcatttttttcttgaaatatacagcccttagttaagctttcatttgcacagttttgacagataagaatgcaagaactatttctttttcctcccaattctactctaatgttagtaactggcagaggaccttctgagtaacagagaacattgccctctaaaaggctactcagcagccactgtttgccagatggaacatgggcctggtgttgctgtgttgctagatcttctgacctttcaggagacaaaaatccagatatttttatgaaaaatcatgttttcaaaatgctgatgtggacgaaagaaagagagatcagactgttactgttgtctatgcagaaagaagaagacataagaaactccattttgttctgaactaagaaaaattcttctgcctttagatgatgttaatctgtaaccctagccccaaccctgtgctg

SEQ ID NO: 35271 - DNA, 3817 bp, Homo sapiens
tgatcagtaaatactgagggaactcagagaccagtgccgggtcctccgtatgctaagcgccgtcccccgggcccactgttctttctctatacttcatctctgtgtcttatttctttcctcagtctctcatcccacctgacgagaaacacccacaggcgtggaggggctggcccccttcagtggacagctaattcaagacaatttaaaatgctccaaagtctaaagcaaacaagttcacagagtgcagaagcattgccagtgtacagcttctggcactgtaaattctaatgagtattttattatatttgcttaatttacaacagacaataatataattatgcctttgacagacatcaataatctgtttctgtattcattctccatatttatagagtattgtgttttctagctgatttccacaacatattgttaacagtgccttaggccaaactactcttctttcccaactattctctttcttccctacaaagggagttaaaacaaggagctgttaaaacttggagccaaattagagattaaattacattagctttaaacggttttgtgaagtggctagaaatttttaccagtaatcttactgcaagtcctgggtcactgaagaactcggtaaatatgattagcatgcacgcaccaacacatcactgtgatgaaaacgcaaatcacagtatgtgagtcactactctcaacattgccatgcccctgccttaaacctgccagccccatccagaggatttttctcatctctgaactccaatcatttacaccttcccccatcagaatttaccctacattttattataattgcatataaatatgccttccctgtaacagcagggactgtgtttctccactgtatggcctggcacagtgtccagcacacagcaggcaaagcaagagttactgcatgagccagtgtcatcatccaaacgatagctaccatttccagagcacctaccgtgagctgactagtttacctacattatcctggtggctttcccagaccagaccacccaaaccaaagcagccccccagtcaccctctaggcacataaccctattttagttctctgaatacgactgattgctgtctaacatattttggtttgtgtgcttattgtctgtcaccggtttcccttcacaagaaggaaagctccaagaggacaggcatcttatctaccttgtacttggctcatagcaaataaatgaatctaagccgcccacctccctgggtgacagagttgacctgcacacagtaggtctcaaagagtatgttttaaattttatatttagatttcaagataattgtgttgaatattttatggttcataacaaacagaaaggggagggcagaataaaaataaataaaagtttagttacattaccctagcactgacattggtacgggaatttttgctgcaataagaaagccacttcctctgacataaggtcacccatacttctgggtcttgccacatcctcttagacagttcatcgtagctgggctggctggggcggtcaggactccagacgctcacactaaaagaggggtggtagtcgagcagtcactccactcctctgtagggagctggccgcgagtgggtgcgcagcagggtgcgcgcggacccgtgcagcgcccagggcggctgtgcgaagccgccgcagcctgcgcgcccaggcgattctccaccttggggctcgccttcctgccgcgttcctcttccttccatccctaaagcgcgtacgccctgcagagtcaaacctggcgcatcctcaagcttccagggggcaacgtgaccgagccccgcatcacgtgtgcagagacggcctatagtgtctgaaggatgccacctagtcgcaggcccggcggcgccaccaacagcgaccgcggtagtccagctcgcgccgcgtcccggccccagcccggcccggcccagccccgccccgcgcccagccccgccccgccccgcgcccagcccagcccccgcggcccggcccccagcggccggcctcccgcggccccgcccccgccgccccagtccccgcccctcgcgccttcgtttattcctccgcgcgctgggacaggctgcttcttcgccagaaccaaccggttgcttgctgtcccagcggcgccccctcatcaccgtcgccatgcccggaggtctgcttctcggggacgtggctcccaactttgaggccaataccaccgtcggccgcatccgtttccacgactttctgggagactcgtaagtggccaccgcgtagccctgtcctggcctcggttgcgccggactcggaggtgccttccctgtttcttctccctgccgtcctcccggccgctcagccccctgcgccgccctcgccttcccccgcactggttccggcgcgcgccaggccgtgtggcctctgctcagcgtcggctgcgctgctgggagctggcacccgttcggcctgccctgcgcgggccactcgatccctcctggcctccccgcctccggcgtggctgggcaaggccacgccaaggtggggggtggggaggataaaattgtgttctgcgggttctggaaactcaccgcccgcgggagggtttgttgtccatttaactcgtcttagtaaactgtgcaggtagcgtggtcaggccgagggcgcaggggcggggcggcattgacgatcacttccccggactagtgcccagggtcgcaccgccctcccaccctccgttctggaatttgctccctggggaggatgggtgtctaaagccaaagtcggaggacacagctgctggctataggttacaggaaggccaacgtatcatctgagggtgcagtggtatttgcaggcttctgggcacaaaatgtgaaatttaaaaccactagctgccaagtaggtggccgaaagactttttgtccagagccgcctccaatggccaagatatgatttgataacagctttaggaagagccaagaacactctgcgtaggtgtgccttcagagattccagaacttgcaacacttggagggaaggactttctgacgctgttccgctggagtggcctattcttgctagtgatggccgttccaggctccaggacacgtgtactccccaactttgagactctcttgttttccagtggcttgcccctcactgtcccctccgctttctaccttgcttctagcacatgagcttgctgatgatagccaaattgatgacctgtgatctgacttggcagttttaccattatggataggagtagtaaatcggtgttgcccttttttttttttaacagctcctgaatcagcaaactggaagttgcttagttttcatcagaagcattccaggcatgtctagttatattatggttctggagtactagtggtcccactacactgtggggctccaaggcttgacaacagttcttccccagattatatcctttttatatacagtatccagggagacaggcttatgaaattaatcagtgattggacagggctgtgcagagaaccagggacagattcttacacatcatatgcctatccaaccctttataacctcttaagtcccttttccagccactgaatagggaaaagttaagctttgtgaaagataggactaggccagaaaaaggttgagaaatggaatattcaaaccttgaatgcagaaaaatactttagaaatacagcttatggccattcttatacttaggatctaggtagtaatatttctccagcaatccttgggatttttagagttgtgttccttcccatttctacctgcagccctcatcccccatccccatg

SEQ ID NO: 35272 - DNA, 1360 bp, Homo sapiens
ctttctccctataagtttcccttttcccttccccctctcaaatgtccctgtttttcttccctcagaggttcgtagtaggctccctaaagtccaatacaagggctgacaaactcatatgagaataggcagatcacgtaaacagttgaagtgggcggggtaaaggcgagagtgagcagtgtggactgtggcaagctgcagagcatctgctccctctatagaagccaaatgatactcagccctatctattgccacatacaggaatgagggctgagtgctggcagaccttattttttcatgaaaacttcaaaatctgcatttttaaaatgcaaaacatttgtttctacttggcaactaattttaaaattttaaaagaaaacaagtgactcttaaacaaattaagagtcaaagatccagtccacgtgcctaccatttgtgacttttgtctgaaacccatgaggaatacaaagtgatgtgtttccctctatctaaaaatgattacagagaaactcatcaagaaaaggggcctgtgggcacaagaacactagggacctgtgccctgctccctgacagtgcttaagatctctgactcaatagcccttcttagggtgccccaagggggctgacgctagaccctgagttcccagccttgccatagactcctgtgccccaagagtgatttgaaagcagcagagcggcagaccttcagagactgtgagctggggaaatggtcatctcagtgctagccaacttggaaaggtgacccaggagcagagggggctccctaaatcacagtgctgcatatgaccctagaagagggtgagccacaggaacctctgaggttcaaattgctgccaagggaaaagcttaattacttattgaatatctgtctctcctccctatgaaggcaaacaccttatctggctcactcaccaattggcacttggcacagtacccagcacacagcggggctgcattttataaaaagcaagcaattgagaaacagtgagatataagactgagaaaacgtcactcttcgcacacaatttgaaatcgtgcaaatcctccccccaaagcaacaatccattaagaattgcataatagctaaactgatggatcacatgaattgtaaacactgggatggtgcaagttagagttacaaagctagagtgtgtcctcaagctggggcagctgggagaattttgtcattgggcttgggagggcagggatgctgagcacaagatggaagatcttgtgtgtgttttttctagagcaagctcttcctatcaagtcttctctgtataatgcttagcaccatgatgcatgcagttggatgctaataaatgtaactatagctactcag

SEQ ID NO: 35273 - DNA, 877 bp, Homo sapiens
agtaagcttatgttccacttgacaggtgaataggaataacacaaagccaaaacaaagcaagctagagtctgagctatacttcaaggctcagagtcatagactttagaactgggagggagttattatgggttgaattgtgcacacacacacacacacacacaccacctcccacccaattcttatgctgaagtcctaactcccagtatcctggaatgtgaccttattgaaatgggtcattgcagatgcaattagttaagatgaagtcatactggaataggttgggcctctaatttgaacaactagtgtccttataaaaaggggaaacttggacgcagacttgcacacagggagaacgccacgtgaatataaaggcagccatttataagccaaggagggaggcctggcccagattctccctcacagcccctcagtaggagccaatcctcccaacaccttgatttctaatttctagcctccagaactgtgaaacgatgcatttctggtttttttacgccacccagtttgtggtactttgttacagccgtgcttgcaaactaacccaggaatttagagatcagcccaacagtaggcatctcctgcacagggccctgacagggctgtcagctcagtctaaacatctccacccccattcagggcacagctacatgagccagtccctgaatctcagtcactgacaggtgaatcatacatttatttgctgagggcaccagcacaactgggaaccaaaaacatttaaaaattagcaaatgtatctagtatttcacaaccagaaaatctaaaaaaaaatcagctgttttggtttgattttaaaatgcatatacattttgagttctgtgatttagagggaaaaaaatct

SEQ ID NO: 35274 - DNA, 1069 bp, Homo sapiens
ggaggccaaggcgggtggatcacttgaagtaaggagttcgagaccagcctggccaacatgatgaaaccccgtctctactgaaaatacaaaaattagctgggcatggtggcacaggcctgtaatcccagctacttgggaggctgaggcaggaggatcacttgaacccgggaggcggaggttgcagtgagccgagatcacaccactgcactccagcctgggcggcagagtgagactctatctcaaaaaaataaataaaaagaataaaataaaaattaaaaaatgaaagtagggacttcatctgttttgtttactgccatatcccaaaacctagaacagtctctggcatgtagaggatattcaatagatatttgttgaaagaattcaaagtcctgtggcaaccgtcagctgacagagcatgaacttgaatacacctcagttctcactgttccctattacactatgcccaattggctttacttttacactatctgcccggtctgtgcagtaacttaaatttgagacccttgctctaaaaaatgtctctcccagagtgtacatcaagaagtccagaactctacaacataaaatagaatgggattggtaatagtcagacacatatagctactcataagcggataagccattgtgaaaaactatctttgccctttaggctcaaaaagagatctagtcttcctctaggctttcctgggcctccattttggctttccctgaattggccagtatgtgatatgcttttctgttaatctttcattagggagtggaaaaaaatggataattaccatcaaacctgagccagaatagaaaacggaatctttaccttgaagaagtcaatgagaacatctttaccttccagccaaatgatgttgtgaaggtatatgtcaggagttgggggtgggattgcctttggaaagttatttagtgcttttaattttttaagaagtacctaaaaacaaataatcaaaataatggggatcagatcctgtaacagaaaatggacactagggaaaaactaaggaaatctaaataaactactgttaggcaagtttaa

SEQ ID NO: 35275 - DNA, 683 bp, Homo sapiens
gtttctccatgttggctaggctggtcttgaactcctgacctcaggtgatctactcacttctgcctcccaaagtgctgggattacaggcataagccaccacacctagcctggctttccttttaaattcagagaaaaggaagtatggtagaggacatttcacctagttttagaaaagctattggctcatttcttccctctgggtcaattctgctgctttgcccatgctcagacgtcaatctcaatgagtctagtacagtcagtagcttgcataactaccttgcctaatagttatcagaaaagatcagtatgtactccactgtgcaccaaggagaattctcatagcgcctcatttggcagtgagccaagtgagcagctagttgggaagccagcctatcaggagcacaaaaagaagtggaaaaatgagaaaatacgatattgattagttcatatttctaacaaataactccttagataactgaagaaatcactgcactccagggctaaccaatctctgttcaatcaatcatacaacaggtatttgttggatgcccactatgtcccaggcacttttcctcttaaagcttaccctccagctttgagtcactggggagtttgcacttggctacaccaacagtcctggaatcacacaactgacagttctttagggttgtcaggtacagatg

SEQ ID NO: 35276 - DNA, 1841 bp, Homo sapiens
ggcagactaacacagccttagagcctggataaaatcctggtgtcctgaaagtttgaccgtgggaaatctggaggataaggtctatctctggtctgtctatctaacttctgcaccttgcacatagtagaggcctgacagatacatgccaacccatgtgtgcatgcaataattcaatccacaattaggaacattgtgccaaaaggagacccaccaactaaaaagaaatacaaattcttagctttctgtgactaccctttactgcctttgctggcgaaaacaaagaagaaaagaggaggcttcagtattcaaatactgccagttccgcagtgaattctaaaaatggttactcttgggatacaaggaacccccacgaggataaacaacctctgaggttacctgaatgccccagcaaagggcacgactacttccggagccgcaccggaaccccttggcggattatgtgggttcctgcgggaacgatttaagaataggactacttcctgcttctggatatgggccggtgaagggaaaggaaatagctctacgagcggcatcctgcctgcgttagcggcggtggaggaggaggcagagaggagtggagggcggagtagacggaggaggctgctgcagagaagaaagtgtcagagccggtaagtgagccagtcaccttagagcaggggacagcggacagcgccccagggctcgcttcgcagatatgtggtcccaagttgctgagctgccccatggggtcaggtcggtcgcctgtcagtcggcgccgagaagagactgttggggcgctggggccgggcctcgcggagcgccagagtgcgctctcgctggctgacagcctatctcgggagccagaggaggccccgggctttgtcctgcctggtggtgctggggtttcgcatcctggacagcttccccagacagtgtttggaattcagggaaggaagaaagtacgtgcgcccccatttaaccctcgggacctggcgaaatcctgctacgtgggtagtgaacattgtatcggggactgaaggaaatgcttgtaaagagtgttagtctggagccatactttccctgccctgttcaagctccctggactgtcggaagcggagttgtttgtaaaggcaaatgcagacgcctcctcctcctgtcacttcgggacaagttaacaatcttcagattcgttattaaagcctcgtgtaccctatgtgatctatcaggttagtactgctgtgggtatctggtgcttgttctgtaaatatacttgatgtcgagatcacagttaaatatctccaagcactttttgaagagaaacaagactgacctaacagtcgggactatttagcatactttccctcacctttactttaatcgttttagcatgcagagtaaggatggtaatcttaaatgtactagattaagttattgtgcatctgcagaaggcctgtggtataataggatatgaaactcttgataactgacgaaatgagtgaaatgattatataaagattgttactgtaaagatcagaaatagcttttattaagttcctgcttttctgttgtcttaggttcggctttagagtgtggtgaagggtacttttcatggtgcatggaaggaaagccaatgcgcaggtaggcatttaggaagaaaacctttggtttcactgattaaaattcagcatgtaataatttaaatttttaaaaaagagtttcaatcttactaaattctgcttggaactaatgagtcttgttctacaataaatcaaaagtaatattaagaattaatagctttttaatagaataaaatacagaagttgtttctgaaaagtgctgtg

SEQ ID NO: 35277 - DNA, 1011 bp, Homo sapiens
ttctgggctagagtcaagaggaggaaaagaagaagagagaactgaacttccagtgtttcattccattaggtttttatgtgtggtgcttactggtgtagaagtggcaataaaaaggtagatttccaagattttaatgcaggcttgaatttaaagagtcaattctctgctaatattttttttttccttgagataattaaataatgctgttgactctgtcaatgaacattttttccttccatcacatatgtctggttggggaatagaatcagccttgctttctaaattgtggacagagttgaagatctgccactttctaaaacagctgtagaaagattttcactaaaactaggtgaagcagtttccagaggttttttgacgaaagaaactcttaactactttttcaaagggggggaaaaaagcaacctattttactaggctgtctttaaagtatatacaaaatgtaataaattacattcccaatttgacagattgtaagatttaggttcaaatctgaaatcatctgggattgttaaccatttttccccagcatgtcccaaatataaaagtgaaagagaaaatccatactcagaactttgtaaactacactgacctttgaacctcccttggtgattaaagacatttagaatgatccctgattctagaatggtggtaggacatgtagattcacttgcatttcttctataaactaaagcctgttcttttaacaggagaggctggaggggattttagatgtttctattttattttattgtatcttttttatattaatcattcttcatttttcagtttaccatagactagagttaaactagatttttgtattctatatttaaaacacagacaggccgggcgcagtggctcacgcctgtaatcccagcactttgggaggccgaggtgggtgtatcacctgaggtcaggagttcgagaccagcctcaacatggagaaactgcatctgtactaaaaatacaaaaattagctggacatggtgg

SEQ ID NO: 35278 - DNA, 1815 bp, Homo sapiens
tgaccacacaacagggcaaatacaaagttaaagcaggtccgggaccaatacaaagcatctttaccaataaaatgccgtgatgacgctgtcacccattccggattcacgaatcattcttcaaaagtccggctccaaaactatgtggagactgaaatcccctgaagaaaaaaaaaaaaaaccgccaaaatgacagctaagacagaggccagactaacccctggccctcccaaattccctctcgctccacaagtgggttcacaagagacacaaacgcacccaggaagacctccgctccctcagacgcggggcgggccctgcgacttcactctgggagggacatttccgctcacccagctctgcgaccctcgctcctgcggagtcagcttctgctcgcggagggggaagggcaaaaggacagtgcgtcccaacccgtccctctccagctgagcctgtcagagaccagcccagctctgaaatcaagccgttgagaaaagggaattcggccctccgccgcctcttcagtttaaaatcgtttcccgactcgctctgcggccccacgcaggaagcctccttggcgcctcgccgattccgtatcagtgaagcaactaaaattgccattttaactgagggcaaggccgagccacttaaccactatcgtcaacctttccaatcgtgctcggttgctcctcagttttcctaccggtgcgaagctttctctcaaatttccgcccgtagtaggcatggcggcggcacctcaccactgattcgttgaattccttcccggtaatcttgggcactagcgggcggagttgaagggcgcttggaccccagcggcgatctgtgtttgggttcgcgctctgggagaattttggctttgctcgccttcctctttcagaagactcgaaatcggccagcaggtctgcgagatttgaaacgcgactgttactccttgttttccggttctggccgcgggagcctctcgagaagcgtggaaagaggagaagggcgtataccttgtgaccgcctctggttgtcttgggctcgcgcctggcgccgctacgtggagtcgctctctcgtcgtcacttttggctgccgacttgttgagtagaagtgcagactgatgctttaagactcagggagaggtctttcccttatctccaccccagcaagcaccccagagaccttggagatttgtcttgtttctagacacgtgtactccaatgttgtgcggaggaggccttaaatattcgagaagagagtgggaactcctggaattttaagggatttctgtgtatttccaaaactgacttttaactaccggcagcgtgggatttcgtgattgtttttcgccatcgtgtggctccaacatgtacttcccttcttggttaagtcagctgtacaggggtttatccagacccatcagaaggaccacccaaccgatctggggttctctctacagaagtctgttgcagagttcacagaggagaattccaggtgaaaatagcgaagagatctatcctatgaacagtacttcagcctgttatctacggccggagagcttttattccatttttcattttttcccccattattattattattattattattattattattatttgagacggagtctcgctctgctgcccaggctagagtgaagtggcgcgatctccgctcactgcaagctccgcctcccgggttcacgccattctcctgcctcagcctcccgagtagctgggactacaggcgcccgcgaccacgcccggctaatttttctgtatttttggtagagccggggtttcactgtgtta

SEQ ID NO: 35279 - DNA, 2784 bp, Homo sapiens
cttgctctttaggacctgggaagaaacaacttcatgtgaacttaggtgtactctctatgttccccaactcaccattttgggtgcctcagttaagataatggtggttaagatcctcatcattctagcactcaagagtagcaaataaactgtcatcattgtggcacatccaatggctttaaacctttttgagagggaattttcaacttacttcagtagctattctcatccttccttggggacacaactagaaaacaaaaagatgcaagcaaaacagtgagaatgaacctcacagcagtcacgttaaatataaatgctgttaacattaaagcctcagaatagaatttcagaaatcccttctgtccactactcttaaagcatcacaggctgagaccacctcttagatttcattcttcccaccatactttccccaattcttacctgtccataaggtgctatccagagccacactgcatctgcacccagcaccatacctaaagagatcaggtacagattttaattcattgttccacggttcttttttttaaagagtgttctttaaaaaaacggttcgtctttttaaaccaatgatgcaggtaacataccattcattatctagcgacaggtaaaggatacacttaatgttacaaagaagcactgcacccgcagttaagaaccaccgatggcggccgggcgcggtggctcacggcttgtaatcccagtatgttgggggaccacggctggtggatcacctgaggtcaggagttcaagaccagtctcgccaacatggtgaaaccccgtctctactaaaaatataaaagcctagcatggtggcgcgcgcctgtagtcccagttacttgggaggctgaggcagaactgcttaactcgggacgcggaggttgccattaaccgatgtcgagccactgcattccagcctgggtgacagaacgaggctcggtctcaaaaaagaaaaaagaaacactaatggaaatattggtgacactgcggaatgcaggcacttaagcacgtggactaccaccgacagcctttcatgagagcggacggctgatggaggctcgggtcacggcccttaacaatagcttactcgggtgactcggcatgtgccaccatcagagcggttggcattcatcattactctcagatgtccctaccaacacaggcttcatcagaggcagggcacgagagccgaggcttctccgcagttctactctaacatagtcgcagcttaggtcacgcatgcaccatatgtgcaatcccccaccatcctcaacttgtaggccctgcaaaggcgcgcgactggcttagaagtcccagtcaattcagggtgaccttagcagacaaaggctggagcgccccaaaacccgcaacattcgcaaagataaaacatacctcacaggagtcgactcctacctcgaaaagacagtatggtgcctgggctcctgtatataagagttcttttgatgacgtcacgacgcacgctcccggcagcgtccgcttcggctcctccccctaacctccctcaatcttcctctcatccagtatcaccttcttcccaccccttaagtccgccccttttccccgcccttcctcgccattgtgggcagagacatgaccgtccacgtgatgccgtgctcccgccctcctcccgactgaggaggaagagcagagaggggagggggcgcgaggcaaggaaagctctggggatgggggaagggggggcggtgtaaggctgagtgatttccttccggcacgtcgcccgctccgtgggagggggtgggggatttcacttccgggacggtgttccggcccattccggcccatttccacccccggaggtaggtgctgctccttgactggactcgggccccacaccccagtgccacttccctgcaccggggtcacctcgcccgccctccgccgcagcgcgctcctggggcgctcagctactttccttcaccccgcctccaggcaccgggcgaccttccacccccttggcccccggccgggctgatctgccggacccgccccctcgcggggcccctccctcaggaccccgggaagggcggccccctcccccaccgcagccgggacacacccagatacgcacacccacctcctggcagctccccgcccgccgccgcctggagccggtccctgggcgccgcccccttcctagttctcacctgagcgctggctcccccgcccgacgccttgtccccatcttctccgaagttcctcagtgacattttgccctttagccagttcccctctccccaggcttcctaacgcagaagaaagctgctcaagtgctggagtggccaaccccatgccgttcccaattctcccttttacagctctcacccctccagtgccgacggtagcgaaagactttcctccaggggcttcctcactggggaattgccggaaagagcaaacaaaaaaggcgctggtgtaggctccaaaataaacacatctgaattcatgatggcatcgacagaggctcttattggattaaaagtttcaaaacaaacaataacgctttggaaaaaggtcagattggctaaagttgattgttgaaaacagtgtatacacttccctatttaataagtgtgttgttaatgcggggcagtactgtgagcttggcagagtaagttcctgaagtttcaggtgtggtgtaactatgtaatatatagataagtgaacgcacattgggcttaagtaaatgtcttcctgttcggatttatacaaactattttcagtagttga

SEQ ID NO: 35280 - DNA, 803 bp, Homo sapiens
aacatatagatgaaagaattactgaaaagaagttgagagaagatacaagccttcccccattttaaggtgctcaaaagaggaaaccaggatttaaaaagtagatagccaagattccttggctaattttttaaaaaatgattttcaaagggaattataacacagtgatgttcaaagggaatcgtaatgcataatgagcgcccctagtggcctgcagtgttggttgaggaatcattggacttgggcctatggaagccccaaaggtgctcctaacaaggtggctgggcagaagacctttggtcgtacctccatcagttgctggagggtgtcattacaggcacccagcttggtcatagcaaaagccgtggagatactcaggggtgacaggaaaatgttatcattgtcattcttggaatctgccaggtgctgatagaaagtggtagcaaagcgggaattggccttggacagttcccagacacgccggttggtggcctccgggatcttctgttctgagccctcatcctcagttgccttcttctccggggagcggtaaatgcacatgggattcatgggaatgtcccgcggcttggctgtgcagatgtccacagggctcccgtgacaggtcacgcagtcccagaagccaatgagcagcaaggacaaaagataaaccttcctgcaaggagacaaaatgccaagttaagctaggctgcaacccctagccccactgcccaccacagggttgccccagtaaagcagaggattccagcccacctggtgtggccaagagaaaggctaaatcctttgaa

SEQ ID NO: 35281 - DNA, 1800 bp, Homo sapiens
agtccagttctgcagccctttcaagaacagaggtgcaaagccggagagaagcagcggcaccaagggagatgtggaaggcaggctgaagaagcagagagagagaggagaggaccctgccattcatcttcccatctccactgccttcggttgcccactctgtccttcaactacatttggaaatgcaatttgaggctgagaggaccctgggagggctatgaagcacaaattaaaaccaagacagttgtgccaccaccccgtttctagcctcctgtgacaactcagatgaagaagggagtgtgtgtggcattgagggagggacaactctcattgtgagaaaaggaagcagttttggccctttagtcaaaggtcactgggatttgggtgggggtggagtggggtggatctgagtggaagaaagagcaaaaagggagtgaggaggtcctcatgggtagcatttgctctcttcccggatggatggcaggccctggggattccccttggagcgtcccctggatcccgtgagtgctgacttcctgcacagcatctttacaccagggatgacatcccccttgtttcttaggctagggacccaaggggtagcttaggaaaggccttaccccaagaggtggggtgggagggagagcacttgaaatgacgtcttccaaacaggtctttgactgtaactaccagggagagggcctggtcttctcaaaggtgttggaggtcattcctgtgagtcctttggaggtcacaaaacccagtaggggcaggcaaggggaaagctcacccctcttacctttttccagaggttacagttcctatcacattggaatacatggccgctaatcttccacagggctgggcaagtggagatagtgtgatctgaggcaatccgcctgaaaactggttctttcctctaaatctcgcagaggttccagaggacagggtggggcagagagctggtcaggagggggaactgaggtcaaaggctgatgaccagttcccagggttaagcaaagtgtagagcccagtgttgtttaattagtagagaagttttaaagttcaatcaggcccagggaaagcctgagccacctctcttgcccacactccctcactcttctcctcagctttatagaaaaggaaaaggagagtatgttcataccctcaaacttggttaggaaactaaccaaggaaacaaacttggttcatacccaccctctctcatagttttctttatggagagagggagagagagagagaaatatctaattagagaaggcaaagagggacaagctgctaccttcaggcatctgagtgccaaggtgtccctggcacagacaaggaaaacacaatggttacacctgtggcccacagagagacccattccccagcagccctgaagtggtgggacagggagagaagagcagggcctcggggtgcatgccaagcgcgtttctaaggggtgtgagcagctgggaaatacttagcaaaactctactgggggatcaggagacagaatgcggggcaggtgaaaaacccacgtacaactgctgaaataaaaacaaactaaattatatttatgtgtatcgttatttttattagttattggggagattgggtaaattcaaactagtggagataaagggcaggtttgtttacatttccctcttctgaaatagccaaaagcaccatcacaaggactgcagccaccaagttcacagggcgcatgtgcctcctgctgtgtgatcaaggactccttgtagttgttgttgcagtcataggcattttcgagagctcttc

SEQ ID NO: 35282 - DNA, 2182 bp, Homo sapiens
gaaatttctaatatttctagaactggaaatattagaaagagatagacatcttaagaacttttatcacaaaaaaatcagtttttgaaaaggactccctacttctgtgtggcactgtttttctcaattctgagtgaaaagattggaaggcttgtgctttgctgtgttaggagtaggttcaaggaaccatgaagaggagagaacatagcagttgattaccctctctttttttagtacttccttcaagatcagtgataaaattcctctttccctagccctgcttccagttcagtagtaacttccatgagcaggtaattcagcaggtccatgtccattgcctcataccctgggctgttctgttctttcctttggactcaagaataagaccttggcagggaagagataggacccagcttctgctgtggttactgaataactcaaagcttaacccttccatggaaatttggcaaaacatttagcacaaaaagcagtctccaactcccttgggttcccagtttactaggtgaacatgacattttaattaaggtgaaattaaacttaccaaaataaatcctacattatcatttagcagcatttagctgaggctctcaaggcatctcactggaatttgcccaaatcctcctgttagaaagttcagttttggcttcagggaaaccaaatcaaaacagcaaatatttattgaacatgtcctgttgaatgtaccaagtacttgataaacattcatgtttgaaaaaatccaggtccagagtagttctgctaacttaataacaggaaatatagcactttaaattcctcccaaatagaaagtttagattatcaagtaaggtgaaaaatgcttactcatccagaagaattgacaccttgtatgaacagaaacattggacaaggctattctttggaggctgagcaagagagagttgtgtggggtcaaagcttgttgcttttatattagtttgggaagttgtaggtggtgaaagagaaacagcaaagggaggctgggtgcggtggctcacgcctgtaatcccagcgctttgggtggccgaggcagtcggatcacttgagctcaggagttcgagaccagcctggccaacatggccaaacaccgtcactgtgaacaaaaaagtagccaggcgggtggcgcatgcctgtagtcccagctacttcaggaggctgaggtaggaggattacttgagcctgggaggttgaggctgcaggaaattaagtatgggttaaggagatgcatcactggtgccaggctgacaataggtagacttgtggacttaatttaggtatcaccttgactggataaagggatacctagaaacctgataaagcattattttggatgtgtctgggagggtgtttcccaaggacatttgtgtgtgagtctgagtggactaggtggagaaatctctgagagccgtgacagacttttcttctgctgccttggacattagaacttcaagctcagtggggcacggtggctcacacctgtaatcccagcactttgggaggccgaggggggcggatcacagtatcaagagatttagactatcctggccaacatgctgaaaccccatctctgctaaaaaaaaaaaaaaatacaaaaattagctgggcgtggtggtgtgcgcctctcgtcccagctactcagaaggctgaagcaggagaattgcttgaccccaggagtccgaggttgcagtgagccgagatcgcaccactgcagtccagcctggtgacagaccgagattccgtctcaaaaaaaaaaaaaaaaaaaaaaaaaagaacttcaagctcacaggcctttggactccaggacttaaaccagagactcgccaggtcttgaggctgtcacttccctggttctcaatgtaaaaatgtttaaacttcttcaataaatgaaggggtttttttgtatgtctgtatttatgaaaggtaaaatttctcaagatctcaggttttgggacgactgtatatgcagtggtgacccattgtgtgtgtgtgtgtgtttgaagcagggtctcactctgtcatccagactggagtgcagtggcaaaatcatggctcactgtagcctcaacctcctgggcttaagcaatcctcctgtgtcagcctccccagtagctgggactataggcacaaatcatcatgaccagctaatttt

SEQ ID NO: 35283 - DNA, 2216 bp, Homo sapiens
gagatgaaccacctgtctcctttcgaagtgcttcctgaggtccactttatgctagttaatgttgcttcttatactgcatgttagtaattcaaaacgcctagctggaataaaagtcctctttaaacattacagtttgtctccgcgttgccagtgtttgtttccagtttcataggctattctggtatgtcaagagttgtgttattactgttccaaaagagcccttgtttcaatccactctcacctgggatgcgggcataactgatgtttatagaactgatacttagagatgtttagagaggcgcatcccttaccactccatcctttaccgataaccacattttatatgtttttgttgcatttaagttttttgttttttttttttaaagacacctgcacacacacaattttcccatcgccagcagggagaagactaccaggctagatctccagggacttcagggaaacagacaccgtgaaatccacttggccaaagaaggggagcgcttcaggggctgggggaggaagcagccctgaggtgctgggaggccgaggcggcgcctgtttacagacgccttcgccctcccccacccccacagactaggggtccaaaaagcagttcccgtgcgcattccccgcctggcccaggccctgggagtaccacaggagccaggtagccctttcgccccctccctctcgtccgagcctcccttcgtcctcctctcggcctacctaccccgacaggccctacaggcggcatgcagaggcctgaggcctaaaggacgccggccactgacaagccccagaacagccggcgggggccctgaggagcctggggccggccgggctgccgctgccgcggaggagcagagggcgggcgaggacaaacccttcccgaccacagctgcctattgttcccgactgaggccccggccgcggcagccccgctccccaagtcgccgcccgccgctcgctcaccgcgctggtccgagcagcagctcctctcagctccgagtccccgcggccgtcgccaccgccgcggcagccgccgccgccgccgaggccaccgttgactctgattctgtcccaggccgccgggccacggctgccgccgccaccgccagcaccgcctccggcctcccacctgctgctgctgaggctgctcctgcagcaggggccatcttgttgctcggcctcctcttcctcctcctcgtcctccgccgcccagtcgctcgttgtcctcgtccccttcctcttcctcaggctccggcccgccccggagactggggcggagacgagggcgaggatcctccctcaggaggcggggcgggcggaggggaggggcgggcgcgggagcaaagctctgagtcaccggccaccaacgcccggagggagaccggcgacgctctccgccgcgaccgaaagtctcacacgccctgagcagatgaaccggtccctcggtccggtctgccctcccgcaccggcgcctttgggctcagcgggccagtggccagatggcgagagtaaattgggggaatttctttcgtttccatcgaaccccacactacgtctactctttcggctttctcagccgttgtcccccaactcttgtttctttttcacgtcttgtcccccaccccatttttcttcttccatattatccaggttctggatctcatcagctttgtcctcgtcacccctctgggagttcagcctcctaaggctgtgaaacagcccaaaaggcccggacacgctactccaaaacgtctctcctgggctgtgtgaacaataagagctatttggggacgacaggaaaagatatggcccatagaagggctcctgaaatctaaccttgcgactctttaaaagtttcttgtcccttgtggaaaaggtgccgttttggttttggggaatgggaggtcccttcagacaattcattttagccaaaccctcgcttttgagaaggggaagaaatgggattattgtaacaccatacagtactaatttcaaaataaatcatctagaatagaggagagagagagtccccaaataaacaaccatttaatacctctactcggcgctatcaccttttttgcttcaggatttgaccaagagagcagagattatgtttttctgtcctttcttcactgtttacatcacagtaccccaagagaagcacttctgcctttaacttgatacattggaatcgctatcacaga

SEQ ID NO: 35284 - DNA, 1889 bp, Homo sapiens
caatcttcgtagcgaaaaagcgttggtttattctacctctacctagtttgtacctcaacatcttttaccccaaaggataaaaaggtgcaaatgagggcacattttcttcatataatacgtaatggtgcttacttattgctttcctgttcattccccgcaggtgatttccctcttcagtctcccccgagtctcacagaaggaactaacaagggagcgcttcacaagcacacagacaccttcaaacaggcgcagaagagtacttggtgaaaaagtattctttcaggtgactttccttaagattactgagcattaagaatgaaaatatgtaaaccaggtttacgagcaagaaaataatctctccacattcagagttaatcttccgaactcagcaactgccagtagaacgcaccccggtcagggcgggctcgcgggcgcggtcccacccccaggcccctccgccgcggaggttctccagcgccgcccgtactcccgcctttcgcgcgtccctgctctaacagctctggttctgtcaggacctcactcctccgctcccggcgcaaccgcggccacgcagcgacgtgcacgcgcgtgtgcgccgccgccgcccggcagagtgggcgcctccgacatcaggagcgcgcacgccgcgcagaggggcctggacgagcgcgcttccgacccgccgccaccgcctcctcccctccttctcggcccgccccctccctcgcctcttcctgccaggcggcccttctcccctcccctctcagttccctccgccctcctcgggctccagcggtggcggagcgaacgggaccggcccggcttcagagcgcgaggtggagggtggaacgcgggcgcctgaaggagttgttgtctcggcagcgcccgcggagacgtgaagaggtgaggcgaggacggcctcctagggacacgagggcggcccggcggcccggatccgcgggccgaggctgcctgggtgtgttggcgtcgggctgagcctggggagggtcgagatggggccccagccgaggactgggatgcgggaggaccgcggtaaggagggtagggggcgggttcaggactgtcggccgcctcccggacaccgcagttctcccaggtggccgctcctcgcggatagggcgggcggggtcggcgcccttacctgggggtggggtagtggctttggcggccgcctcctccagctgtgccctcctgacattgctgcctcggcggctgccgcccgctgctacgctgtggctgctgctggattcgcagtcccagccgccctgcgtccggtgggcgagtggttagggtattttcttacccacacgcaggcttctgtactcgaccatttctctccctcgcccttcctcttcctccgccgagcactttgctcggctcctgctgttgatgcttgtggttttgcagtttgggatgggatgcgttccgggcagatccctacctgtagggaatgccccgcttcaaagttgacctcctgagccatgacaaacacctccccccaacccccacccaccttgtgagtgctcagtgtcctgataactgagtcaaagtttctgagactgggctagtactttgcactggtcgccaacggtacagggctgggcagtgcgtcagcatgtggaaaggggccaccggctagcgggaggtggccgggtgcatgggagctgaactgacgggtttcagatactaggcagtgtgtccaggtccttggatctctcagatagggttatattagaatatgtaccaaaacttgggtggtcacttgcaaaattggtttcatgcaagtaaactgaaatgccagccttattacactaatggtaaggagaacttttgcttgcctgacagatttcagcgcagtttggaaaatg

SEQ ID NO: 35285 - DNA, 600 bp, Homo sapiens
gccaaaatactgaagttagatgccacatcaaaaggaaatagtaattataaggagactggagattatgcaatttctttatctcaattttgggagaaatatgacataaagcatgcagttgaagacatcatttcagggagcaacaatgaatattatgtctgtagtatagcaaacttttacttcgctatagaagtaactttgaaggatatgaataggacacttatggagatgtagaataaatagctgtctgtgggagtgttgacactgttgctattcagtggactctagatatgcagccagatgaactttgtgaagatgaacttatcagtgtaaataaggaaagtggttgtgatgaaaagcatgaatgttccaggggaaatgactctggcaaatttttcacattaaaggaactcttggagatacttcacaacattgaacatgcaaaggataaagtttggaagttaatccaaacttagaaaggaatatgacagtttgccaagatagaaaaaatactttgtattgtaaattatatgagaaggcagcaagcactgttcaatatattcttgataagtttttttaaataattaaaatactttaattttt

SEQ ID NO: 35286 - DNA, 1198 bp, Homo sapiens
cacattgtgcgcatgtaccctgaaacttaaagtataataataataaaattaaaaataaatatatttaaaacaaacaaacaaaagaattgcagtgagtttgagtgacacaaaaataaaattcccatgataattcaataccatgaattatctttattgagtgaaataaattctgagggtatagtaattattttatggtccttttgtattagatttgtgtttgcttaataatttagcactttgaattttctctttgaatttttattcttccagaaatctttgcggggttggagttttcatattgtgacttttgggctaacatctctctagctcttcttattagttaattttcagcagattttttttttctatattgcccagtccagtctcaaagtcctgggtttatgcaatcctctctccacagcctcccaagtgactcactgggattacaggtgtatgccaccatgcccagccttggaagactttttataaattagggtacatcttttttttttatttttcacataattttgtttttgttatcagcaaggttgaatcaaaagtaacttcctttcctggtggtctaattgctaggataaagagagggaaaaaaataacttcatcattactgaattatcaaaatgaggtcttttaatttatctattactattataaggctagttagaaaatttaagtcattttctaagagatagaaattttgttagcttgatttttctgactttttgtcattccttctcttatgtatggtgccatctgctgtttgtgggaagtattttatattttgaagcactacacataatagaaatacagtgtctaaaagaaaaatgtcaaaatacatgaaatgaaaaaagcagtagtgtggcccgtttgaaactttgtggcctgtggcttgtttctttttatgtaaaaattatttttatatctgattatttttagtacttacatgaatcacaagattttggtactcatcgtgttctgtcttaattttgtttttgctcagaatagaagtaatcggtaaacatttgttagttgactcatttggtttgttttttgtgactcctcaggcacctttcttgtaagcttctgcttacagtctatgcaaccttaggcaaataatttcagcccttagcacctctgtttccttctccataagaagaagataataatatcaatttcttaa

SEQ ID NO: 35287 - DNA, 772 bp, Homo sapiens
actctttccagaaagttgtagtattaaggtgagagagcactcttaaaatatttggaaccaatttactgatgttaattcttatacctctacaatataccagggtatctttttacctaaccataacgtaaatataaattgttttcctaaacaaacagagatcctggtcttagggactttacattcttgcagaaggaaacagacaataagcaacataataaatacattatttatttaacatgttagaaagtgataaatagctgtgaaaaaaaagagagtaggggaagataaagggaggttggattagtgggggagcaaaggttatgattgttattagatagtcaatgtggacctcactgagtcaatgaaggagatgagagattagtcatggagatgtcctggggaaaagctttctaggcagagtcaatagccagttcaaaggtccagagactgcctcatgcctgggtgggcttgagaaacaggaaggccagtgcagctggagtgaagtgaatgaaatgggagtagtaggaatgctcacaaagagccagaaaatgtaggccattgtaagcatttaggctttactttgagtgaagcagggagctcttgcagggtttttagtggagcaatgatatgatctgtctgaggtttttaaaggatcacaatggctattttgttaaaaacaaccataggaaggtaagagaagtagggacatcaaacaggagattttggagtaatcctcttgagagatgatgatagactgaaccagggtgttaac

SEQ ID NO: 35288 - DNA, 729 bp, Homo sapiens
atcattttagagggtctgtgaaatcactgtggaatacgatgaaacgtaatagaaagtatcagcagacactgtgggagatcggtcagagcggtggggaaaaactatagggaaaggacgcaaaccttctgaaaggtcagaaggttctgcagagccccaggggagaatagctgaaggcagctgttctgtaaccctgaggcattgggcaaggagtaggtacaaggcagtgtaggggaatttatcttaaacaaacttgtttacttatgttgaccaggaactgacctttgatcatccgtggggacggtccccctgaaaggggaacaataaatgttaattacctaagaggtttttaaatttctttctccagaaagaaaaatttcaagcgtctgaatcccattcagtattctctaaaataaaatcaagtttgtcctgaaagatggtttaaaaactgaaaatctattttctttgattacctcataaataacaagagtttcatatcagctctcctgtctcttcctcctccactcttttcccctctttcacattgtgccaatcacacaggtggatgctcagtatcaccccacagcacaagataaataagcttggaaggtttcctagcaacatattgttctgggaacctgctctgtttccctgaacaagatgaagccaaatatcctagaatctcagccagatgggaaaggattagcttattgagagtgttattgccttttt

SEQ ID NO: 35289 - DNA, 1597 bp, Homo sapiens
acataccttgagactccaaaaagctgcacacttttatttatttattggcaaagagaaaacatttatttaactcagatgattttcttgctttaattaggaacttgaacatcagagaggagcccttatgaatgaaatccaagctgcgaaaaactcttggtttagcaaaaccctgaactctatcaaaacggccacgggcacccagccattgcagccagcaccggtcacccagccacccaaggagagcacatagttccagccttacccaagcacaagagcacaatgttcaaaccaatggaaatctgggaggattcttcctggtgtccctttgaaggaaagtcaaggaggccagaaaacaagccagaatttttcagtagctctcactctttcttgtatgacacttttcaaagggatgctatttaaactgacctgttctatgttgaatacctattttccagcttctggaaggccatgttcagatccatcatagtattacacattattttgtttgcctgatgtttagttggaaataagtaattcagaactaaatgcttttttatttagaattattcataattatttttatcttacataaaaatggagacatctgttattccaaggttgaagtgataagaagatctttgtcacaggaaaaaaaaaattgaaacctaaacatcttaagttttcaggatttattcagataaagcacactgtggggccaggcatgaccactctcaggtttcctcctgagcctgattcccagggaagtgttaatcctgtccaaaggaaagaaccaatcagcgatcattggtttactttcattttctgttcggtacatctggaaatgaagtgccaggaatagacgggctgttcagattatacgctaggtaaaaggaactgaaattttaataagtgtaggtcaggatcatttgggctgtggtattctaacagatccttttaagaatgccacataggacttgtgagttcctaagtacaccaaagtatggacacagatgtgacttctggcaattataaagttaaaggtggatattgcaccttacagacttagggagcctttaccagagacgcctaaaaagccccaggttcagccattgtgctgaatagagtggaatatagaaccagggacagagtatttcatttaacgttgatatatacttgctaaggaaacactaacaatactgtaactttgttaaaggacatagtattgaaatgggaaatagaggtcaggctcacatcatcttagtttaatgctgggcaactttttctgatttctgtagttccctgaaaatgtgtccttcgtacccataaagagatacaaatgcatttgtaacatttttgattgaatataaaacctttacagaaatacttatctcatggaaaggtaaagctattgtttaaaaattagtggaaatattttttcaattatatttaacatgcctataaaaatagtccttgcaggaaattatttgataagagcaaaactatttttattttataaactattttggaggcctctgatcctttcaaaccaaccaaactactattagatatgtacaataacatttgttgatattaatca

SEQ ID NO: 35290 - DNA, 2809 bp, Homo sapiens
cctgagatagaagactcaggtatgagtccttagcctgagcaattaagagaacgaggtaactgttcactgcattaggtccatgggatatttgtttttatttaattatgtacttaataattccaggctattggttggacacttaaaaaaatttatacgataaaatacacagctcttaggagttcatcccatgaactttgacaattctatgtatcggtgtaatatttccattacctgggcaaattccccttcgccgggccttaagcataatctacagaaaaaactacgtacataaatatacgtttacaactcaatgagatttctaaagtgaacccacctatctataatcagtgtccaaatcaagaaacattacctgaacctcaaaagccccctggtggctctttcatgtcattgtcctccccactatgctcattaacaccatgggctagtttttaaatggaaccacgcaatatgaactcttccatgtctggcttctttccctcaacttcatttttttgtgtgaaattcacgcatgttgcgtttcggtaatttatttttgtactgtacttccgattctttactacagataatggtcagcctccattccgctaacagctttttttcctctccgagttgctgattctaattgctgccttggacgatctataaagctgagtgcgcgctatgtgacctctcaggggtcgctgccttggacgatctgtaaagctgagtgcgcgctatgtgacctctcaggggttgtttccaaccgtgttgttgacatcttgagcctgccaaggactagaataatctgaaaactaggcttctctgggggtctcactgagtgacagggttagaaccagaagagaacatcgtctccagaagacatttcaccattttctttgatggtaaacaggctcacttataccgaatccaaacccaggcgagaactacggactcttgaaatggtcggtgaaaggggcgaaagcaccaggaaatcgtgcttcaacagtccatgactgaaaggagggcctgaaactgtggccataggcgggcccttttgttagggccttgacctgggcttccgctacagggcccggtcacgaggccaacgtagctccacctctacggcggccagtgatgacgccaccacgtcggaactgttagaccgcggtgacgtctccaccgcgccaaactcactgaaaatcaaaccgctaccattaggagccctccacgcttaacatatccgttctttctcgtttgaaagtaaccaggctgctcctccccatttttcgccttcttctcgcggaggctgagagactaaccttacacaacatggcggcctggtgtgtctggtgtcctagagcggacgaaagcaggtgactctctagtcaacttccgacttggactccgaagatcggtacgttatttccggggctgggttaacgcagcggttccgagctgcgactgcgcagcgtggcccagcgcggtcaaattataatacataaaagttgtcagggcggagagcaagacattactcttctcggattgccggttcgctcgcgagacttgagcgttgctaggagattcggcaggcgggcggagccagactcggcggggcggggaggggtggggctaggctcggcgaggcgaggaagggtgggtggagccaggcttggcgggctgtgcgtgctcgcggtgggcggtggcggcggctgcctcgcgaaggttcgagatccgtcgcgtgcgggaggcgggccgcgatcttgcgcagggtcggtgtgggcgcaggctgcagcgccgcgactcgtgcgggtaggcgtctgcgctcggtttgagggctcggcgcggggtttcctgttcctccttctgcgcggctgcagctcgggacttcggcctgacccagcccccatggcttcagaagaggtaagtggtccggccccatattccttatgccccccggctggagctgcagcgccagcctcccgccctaccgccgtttccgtgggctgagccgccctgcggccacccggtcccgcgccagtcagtgcgccgccttcccgggggacacctcactcgccccttgctgcgccgtcggctccccagcgcttccactcgacctcgcaccccactcgcctgctgggctcgagcgggggtgtgcggcgattatccgtgcaggcggtgcggggagtgggtctgggagagcggccctttgcgcgtgttcctcaggccctttctgccctggtttcccagccagtggacaggaagcttcattcaagcaaagctgggtgcaaacatgagtgtcgttcttggtagagggcggttggaaggtgagttctcagtgctagcacttgaattctcctagtcaggttttctctacacacgaggagctgtgttactctgggcaagttgtttagcttctctgtgtcgcagtagcatccatttcatagggttgttaaaaaatatgatttctaggtgtttaagtcagtgattggcaaacagcaatctgctgtatgtgatttttaaaataaataacttggaaagttagttgtaattaatagtaagaaagcgaatggcctgtgttaaagctctgtaaactctgaacgttggagaattaaattttgtggagacttagtttgctcagttagaaaatgggaatgatagtacttgtattgctcatttcctggcgtaagtgggaggtgaagacgggacagttattcacagttaagtgttgggtgtgtattaactagatttgctttatgaaaacaagtactggggagtcccaagcttttgttttgttttgtttttgtttttt

SEQ ID NO: 35291 - DNA, 1749 bp, Homo sapiens
taactggttgtgatcaattagttgtaaacaccactgcactcgaaccagcctccattgcctcttgcctacataaaggtacagctctagcaattcttccctcttctacatcatcaatttttactacaggatctttccctttcatacacaaacatgctgttttccctgccatgttaaaagaaaacaacccccctccccgcccccgttattgacccattttttttgctctcctttacagcaaagctcctttaaaggcttatctatactccactttatttcctcctattctcttgaacgctttcgtccccataacaccatcagaacagctgtgattaaggtcccaacaaccttcacactgctaaactcttcaattctcagcacttctttttaattgatttatcaactttgagcagagttgcccactcctcacactttgaaattctgtcatcctttgcttcccggccatcccactctcctagttttccatctccctagctgacaactcctttcagtctcccttgcacggttctcatctcttaacgttacaagtctctgagagctcaatcctcggaactcgtctcctatctgcttactcccttacaaatcggagtcaatctcacatcttccaataccagttagtcatatgcttacgaaaaccaaattgacatctgcagctcggacctcccctgaaccaagcccaagcgcggaagagggcggaaggagaacccctggactggtcctcaccgagcactacaggtggcagagccgtgggggacccgtgggttatgagattcagcggtgaggggtagcggtgtggataaaagtagaggcctgacctgcttgaacgtccgcagcagcgagcccagcatgaaggccgccatgttgtccgctacaaactacaaaccgctgaaactttattgacactgccgaatagcgcaggacacgaggggcggggcctgggccgcctggggcggagctgggaggtgggtgggaatgtggcctacaggaaagcggggttagttttgggatcggagctctcgcgatatttcacggaacttgggcaaatgacaaatctgaaggcgccgcgttgatgctgatggcgcagccagacccgccccgtgtgttgcagcccgtgtaatacccttctctccctacccacagttggggtcatcttctataagcgggtcatgaaataggcgagctagctctgtgcactcttttcttcctttctggaaaactagttctgaaagcatcttttttgttgctgttgtaggttatgatttaattctaccttattggtgtgaccaggaacagggcaagagtccacctctacaatcccataggaagaacagtcaggagaattatatacatctacagcgggcacaggacttaggccagatcttcctggaaagtggtcagaaagacttagacttaagccacgggagttaggccaagctgatcgtttgccctttcaaagatggcaaaatactgttggatgaagaggtagcccaggatccagaactcttatgggtggtggagatgttcataccctggaagctgctagtgcagccctgctggctttttactgattttatgaaggatattaaaaaaaggctgggcatggtggctcacacctgtaattccagcactttgggaggctgaggcaggtggatcacttgaggtcaggagttcaagaccagcctgaccaatatgggtgaaacccagtctctactgaaaatacaaaaatcagcc

SEQ ID NO: 35292 - DNA, 1399 bp, Homo sapiens
tcaaggtgcatataggaaggggtcattcctggtccccatcaatatccttggcttattcttggggacaggcacaggccgaaccctgaccaaagcagcaagaaattaagaattcagggatgcttgcttcgttcatatttagtaccaagccattcactcttcccttcgtcttcatttctctggcttctgtgtatgccatcaagtaaactgtccttttggtgtctaatctttacctaatacaggaatgatcatttccttaacttctctgttttctgagaggactaattaattattccttttcattattttataactggcaagttacaaaactaacttgactgcagcttctggtgccacacagtaagaatgtttacttggtgtgtgcttgttcttagctggcctcagctgagtcaccagcaaccttgggcctgaacacctgccccaatgcactcccctggtgcttcatcatgggccttccacgtgagagctggatatggctcaaaagaaccagatttcttgggctatgagagggaactacaaagaggaagaaagcgataataaaggaaaagaacctgtggaaggagagcgaaaggcacggggacacatgcaccacacacacacacacacacacacacacacacacacacacacacacgcatttcaaccgtggctctgaaatggtgtgatggatagtgggtgaaacctctgttctcattacacatctgccttcattaaaggctaccagcggaatagcaatcctattggtttaccggtttggccttagagtgtggatggccttagcacttccggaagcagccacaggtcccatgcctgtgagccttccctggagctatgtgctgtgcaccacgctgaacacgagatggcagtattactacatctgcgttccaacacacagccatcctcggttcccacacacagggcctgatgcaaactgaacacacacacaccacacacacaccacacacacacacaccacacacacaccacacacacacacacacacacagctgtcccccaaataaaataatgacacttcgcctatcgtcaagtgggacctgtgtttgagactgagtttgccgcctccgtgggagtcaaaggcaggacaggctatgtgatttgtagggcccagtgcaaaaggaaaatgtagggcctcttgttcaaaaagcagggaaaaaagtgctgctaaaggtagtaaaatatgaagcctcttcctttctttcctggactctggacttgttatgggatttttaaattttctattaatgttctaagtaaagaaaaacaaaatcattaaatgtacttttaaatcattagcatcaattttaccactcatcgtcatattggggaatgccagttcaccgtgcaaatgtaagagcattta

SEQ ID NO: 35293 - DNA, 701 bp, Homo sapiens
ctctgggggcacaaacatgaaggaagtgattcacgcctgtatggcattcacaatcctctgggtagagaagacaagttaaaaagataaaggacagtgagttatgttctagagcaaacaaatgtccctggagctatgggaaactgaagaaaggggacctaccacagactaggacaggataggggtcatgcaggctgtgggaggaggtgacacctgaacaaagcctggaaggacgggtgggagttagcagtggaggcagcatatgcagaggctaagttgtgagaatatgacaggttaggtcatctcaaggggttttaatggagggccggtctgtgtgtttggtgcactagtgaaggataagccagctcagaatcctgggtgctaaatcatttgtcctcatgtcagatgtctgtggtgcatgctgaactttgctccctagggtgagtcactgcatgtggctgtgcattccaccatgctggcctgtcccccttggcaagtggtcctgtgcaggtatgaaatgcaggtgctgtcacaaaaagtacagccttttttgaggaggtagtttctaaaagaggataataaagtcatgctaaccatacacacaattgcttggatttttgactccctaaggatgtacattttgaggagaaagtggtatttcatgcctcaaatgccattaataataacaacttatatttaagcat

SEQ ID NO: 35294 - DNA, 1761 bp, Homo sapiens
tttccttcccttcctcgtataacgcaatcggtggcacaatcccgctaagtagcatggcatgctggctgccggtgttctgttaaattagggtgagtgcttgtctgtgcttcagtttccctttcggttaggcaggactggtcttcccactagctatcatctatagtttacttaactctattatcatatgatgaatcccgtaaagctcttcagaatgttagggaaacaggtcctattatgtcccccactctaccttcatgggtgggatggggggtctgggggtgggaccactgagagtcaaagaagttaggaagtaatctgtgtcacagcaagctccctggaaactctcagaatagcaaacaggtttcctctccgcccctggctccacgccatattttcgttttggctagttccttagctccagagaaaatctggcttcacctagaatggtttagaaacacctaagcccgcgatgctttccggagggtctcaggccttagctttctcagtaaaaaacagaatttccatgtgtccccttcaaagcgctcctaccggcagctggagtaaggtaactccaccgccgacctccgaggagttcatgtggactcagcccaggcgcagagaggaagactcctgagagtcctcgcgaaggagggaaacacaccagaactaaagttgtgaaggcgcaagaggctacttaggaataattccttgtatctctggggcaggtctcatccttctaaagacaggagtgactgggcgtcttcttccaaacagagggcgcttaaaaatgtatttttaaaaaacataacagaaagtcctgaaactcacctttcggtccgcggaagggcttcctgcaggcccagggaatctcctggttgctgccccgtctgacagcgccccgggccctggagggaggtgtgggttcctttttggttgcctctgcactcccaccccgagccaggtctggcgtgtagggccccggcgccggccaaggtcgtgggagccgcccgccccgccccgccccgccccgctccacccccgcgcgtacctgccgctgccgccgagggcagcgccctctgtgttccctgccttcctacgggccgacgcctggcatagttgaggtttcgctccaactctgtcctgcccctgatgtcacaggcacaacttcctgaatctggctcgccgttccgcccgctccaggggctcggcccaggctttccaccctgggccagcccacctcgggtgcctctggccttgggcgcacacgccccagacgcgccctccctccccgtcttcccgccggtggctccccactccccgccccccgccattacgtgtccttgccccctcagtcccggaacacgcctccttcaggacacagcggctgcggagccagccccggtgtctctcacagacgcaccagtgttccaggaatgggacacagaactccgggcaaacccggcttcagggaaaacagctgcctaaatagagggccttcctggaaggggtgggaggcgttggagagggataccatgcggcaggttgggtgaaggctccgatgtcttatcgggacaaatgagcatgacagtcccctctagccaacgccggttgctccaaggggtgcaggtgacatctcagaagagtctttgtctctgctgcctggaggcgctaaggaaaactgcgccccaggagctgtctgtcacaagcaaatgacggaggggaaagctgacttcaaaaagttctcaggggttcttccctctc

SEQ ID NO: 35295 - DNA, 859 bp, Homo sapiens
agagttcactgccctggaaggccatgccccggtgctgctgagctgggaagttctctgcccagggcaaccctgtggtcctcctggaggggcactcagtgcagctgtgctccttgcacctgttgcctgctggctggaacacttaaagggctcttttccccatccagatcctgaaaccactgttgagggatccccagccaacaccacaacaccagggtgctcttcacattccagggtgtgtttcacattcatttcattcatccagaagtagggaatccaaggtgagagtcactgaaattgtactttctgcctgaccccatgaaaaaaagaggctctgtgaacgtttaccaatatctcccagcaaaggaaaccatgctgaatgcagaacctatcttagaagtttttatcatctaaggccccatctgcaacactgagctgcatttccgggcaggaaatgaaaccacagagtacaagtgaggtattgattttcaagttaccactttggggcagcagtcagtattttggcagctgtacatccagcacacgtttgcccaaggtcgggggcaaaggcacggaccatctaggctcatggggcacttcagctgaactatacagtttgggccaaaaatccactcacatagagttgggtttctgttgcccaagacaattgattcttaatacagacggaggcttgagataactagatataaaggaaaagaggaaagaatggcaaactgtcaaaaagggagctgactttcaaggttatctggttcatttcttccttttgcagaagagggattagaagcccagataaattatgtgaccttgggaaaggtcacacagccactttgtggtaggtgtg

SEQ ID NO: 35296 - DNA, 651 bp, Homo sapiens
ccctacctagcccctcctctgctcctttgtggggtgctacagaggctggccaggggcacagggacaggatctctagtttgttagacagttaataaggtatatcccagaaaacaagagggctgctccatcctcacatacacccagaagctaaagccatgtgtgagggtcaccctgcaaggagctggcccaacaggtctgacttagaggccagctctgacttagaagctttcattgcacctgggcatatctggaaggttttcgactttgagcagctggagcagctccatctcgagtgtgttcaccaacatgtgtgcaaacaaaaggtctctaatttttctctttaaactttgccccagggcagtgaatgacctctagtagtttggaaattctccagttgggatttgtcctggttttaacatttgcctgcaacatcagccagataattccaatattcggcaagagtgagttttcttatcatgactccatatctacatttgtagaacacattttatcaagtgcttggcaggagatacgaagtagcaaggaggtaattatcttgtattgcactgatttgagaatttttaataaaaactcccccaaatccagttgcaccaagacagatggaattggtagtgtgtgcttcagatggaa

SEQ ID NO: 35297 - DNA, 2470 bp, Homo sapiens
catcatctaccatacttcaaataaattttgaccaactccacccctctgcatccgaggaagcttagtcctctccatttgcaaatttcattcatctcaacaaggactcctgattgactgagtgttcaattcatcagagaggcaaaaattttaagactcaacctctctgccaactttgttatccaaaaccatttatttgaccttccacctcttccctcgtcattcgttaaactcccttcacttcctcctcagcaacacttacctacctctttattatccccaccctgcctcgctactccaacattccttcaccccaccaaccaggagctcgaatgcctgcaaacgctcgattccctctgcagacaccaccacagcaccagtatcccaagctctccaacaagccacccccacaccagaccccccgcccccaagcctaagcggcagaaactcataatttagggacaaggagggagtgctcttcaaacccaccatacgaagtcgttgcttttgtcctcgtaggagttgatgagcccgttgcagaggggggcgaggagaggtcgcttcctgctgccgctgcctaggctggagctgctgcctcctacgccggcgctgggcctggccgcgcagctgtgccgggacaggcccgtggacaccgccccgccgccgctacccgatacggcgggcgccaccaacacaggccgcaccgggcccccgaggccgcccgagccggcggcctgggccaccccgccggacaccagcgctgccgccgaaaccgccacggaaggcggcgacggggaagaggataaagacgaggaggcggaagtcaccgaggaggccgccgaggacccggggcttgtcccagcggagcccgacccggcctggcggctaccagacatcgtgactccctcccctccagccgggcgctcggaggagagggaccgcgacctcgaccctccgccgcctcccctcccctcagcctcagtgcatcctgaggacgcccgccgagccggaggtggggctgaggaacaataaagttgcgtttttttttaaggcagccacacaacagcgtcccacgggagggggcggaggaaactaaaaaagcggagtagaaggcactaccgctgtcgaggccgccgccgccaccgcggtccctgtagcagccaaccccggcgcgccgtggccggccgtgcgcgcgcgcgcgagcggcggaagaggcgggcgtggcgggggatacaactggggacgcagcggggctgcgctcagacgctcagggcgcgccctcggggtcggggctccctggcgaagggagtctgtctgtcccaagccgctttcgttccagaaaacgtgccagagggcaggccgtcttaatacagtgaaagaattgaggagactggaatgaatggtataggtggtggggtggtttgaaagacgggaacgtagcgggcggaaactctcgaaaagcgactgcgcaggcgcgcgccgggcgcggacgctcacgggtcacccagggtatccgccccaagcggagaatatcggcgcaagcgcggagtagccgtgtcacgcatgcgtgcgaacgcaccacattccggaacgggaagaaggagctgtctctctcttctgaggggtaggcaggtgcttccgaatcgcggaatgtaggtgctcataagctggagacccacggaaagaacctagaagctccgagcggttgcagacagcactgcattgagccaacgactcctgctctactgatggtgattccacagctttgtgaggaataagttaagatgaagtcagtgaagttttctgcgaattgcaaacattgtagcaagtgttaccaattttattagttcgaccacgacttcactcctatattttgaaaagctgtttgccaaattgaacataacaataatgggaaaacagattttgctcaatcagacccagctcagtcggaacctaggtttattgtggatctgatataattctagcacaaaacaaggaaacctagcatttaataccaccagaaaatatacaatttctggtaggcttttttagaatattgaaaattgattataggcgggcgcggtggctcatgcctgtcatcgcagcaccttgggaggcctagggggtcggatcacctgagcctggaggtgaggatcaggctgaacctgaggttagagaccagcctgggcaagatagcgaaaccccgtctctacaaaaagtacaaaaaattagctgggcatggtggcagcaggcctgtagtcccagctactcgggaggctgacatgggaggattgcttgagctggggaggttgaggctgtagggagcggagatccctacactccagcctgtgagacagagaccctgtctcaaaaaaaaaaatttttttcatttgccgcattctaaggggtgggagttagaaacaactgtgtgattttatccttttcaattctatcattctatgattcttatata

SEQ ID NO: 35298 - DNA, 2019 bp, Homo sapiens
acgtctgcctctgcagtctttcccttcaccacatggatttgacttaagtcaaaacctcagtggagcaatctcttgggctttcaatcattttgactcaacccttgtttcactgcagcctaggctcatcactgacaataacattttgacaaattatacgacttaaaaaacgaggtgtagacttatttatccatagcattcttcatgggatgaatctgtttcaaggaaattttgactttgaatcaaattttaggcatgcctaggactaaaaggaggctcagcagaaatgcgatgacaaagcccatggattacagaaagcctctccggcttgtgcatatctctggtagagtttgcccattccagactggccttgctgttcaggcattttcctccattccatcaagattattcttattcagtgtttacatctctatcgagctcctagtgtatattaagcattgaggaagagatcacagtgaatacgttggcctctggagtccaaataccttgctgctaatcttgctttgttagttgtatattaatgggcaagatattcacaatattcactagactagttttaacatcagtaaaactgggagaattaaaatatatacctcctaagagtaatgagagtgccaataaaacactgagtgcaatatttggcacttggaaagtcttcaataactgttagcaaatatcatcattatcactggtggagagggacttgcaaatgttaatagagcaggacacaaaataaagagtcattatttctgaccaggctaacgggaatggcttcccataaagagagacacttgaactgcactggaggatgagtgggagtttgatagccaggaactgtaaaagggcattctggttggatgggtcagcaatacagtccccatatgatctcatccaggaggattgtgatcacccagactttttaaaaataaagagcctgaagctcacaatgggagcaaccacagtggaaggacaattaagctgcagcctgttcacgggcttcctgccaaacctaaacagatttctcagaccagtgactcatcaacaagacaaactacatgtacctgttgcatcaatccggtgctttctgtttatttttatcttgtccctgtgacccctctttgctccattgttaatacccactgcactgggcgaggctggctttgagatgcagtaagcttcattttggctttttttttcacttgtgcattttccagccaaaagagagtgagttccttaccactccatcttcctttcttctttctagagaaatgttcactatgccatgaagtagctgtcacttatgcactccattccttggtgtggaagacatttccctcttgctgggataaataagtggaattgatatttactgagtcttgcactaggcacttgaagactctcatttagtccccacaacagttctcggaaggaggtattactagcccattttatggatgagactaaaagtggtggagtaaacttggccaaagtcaactagcctaaatgtgagatagtttgcttggtgactttctctagtggctcttgttctcatcacaggacaacatgttctcaagacacccacaattgggaagagcaactgtgtaggggaagtagagcccccaaaccatttcctccttcttttaattcagatctcccccaagctcaagtccatggttgttgagtgtctcaccacaaatgctgctaagattcccttttctgtcctcggagtcaaatgaagagagtttaattctttttttttttttttgtgacaggccttcatatacctgaagaaagtttaatttgaatacctcattctcatcatttaccatcctccccactcccccatcccctgccttaatatttcctttttaaggcaaaacagtttccatttagaagcaaagaaaggtaagtgactgctaagatttgaatgtttgtgcccctccaaaatccatgttgaaacttaactcccaatgcaatactattcaaaggtggggcctttag

SEQ ID NO: 35299 - DNA, 1960 bp, Homo sapiens
tcttggaagcaaagagcaagcccttaccatacaccaaaactataagaaagtccagaactacgagaaataagtttctgttgttttcaaattatccagtctgtagtaatttgttggaccagtgggaatgcactaagacagtggccatgtgtctatctctggaaatctgattggttctcaaagatcctatgtaggtgaatcacattcatttgtgtggatagtttttctcagctatggtcactgccattttcagctttatttctcttaaaaatgtctgttatctggttctccaagtttctgttctgtgatttccagcatgaatgaaacttaggaaaactcttaaaaattagtaaaatttcaatgtgaccaatttaacctacaattcctatctgttctattcctaccatatttatagagactcttccttgaccttccgcaaaaaccaggaaaaaatttccgttagtaaaatgagctttttcattaaaaagccagcactgcaatggtatttccccctttcttttcctgcctgccttgctttgactggtgggattaattgggtcttgatcaatctgctaaaagacagcaaatcgggaatggcaggtggaaggaggaaagcatgaatattaattagctaagattccaaacagaagccttttaattatattaaaatgcacaggcctgcaggcagtgagatagttcctgctgtaaatctgtcgacaggccattacctcagcaacgtcaatgtcttttaataaatgaatatatacatttcaagtgggggagagaaaaatactttggtgtttataaatattaaaaaggaaactatcaatgtgaggagatacccatgacagctcttctcaggcaggaggtgtttagggaaggcagtgagtcatcccaggctgtgaaaccaaagcctgtggctaatatggggactgatgcaattaaaaacaggtgactgtgaggcagggcaagatagaggctcagcttttctgtaggtcagtgagtcaggcatttaagaaagttgcattgacttttcacctcactttggaatcactcaccaccggaaacaaggcagtcaggcgcctttcattggtactcctcacatgaagacagcatttaaaggtcgaagggtgactggccaccttcgacatggcagaaggaaaccataaaatgagaagagctcagaattccagggcaataaagaaaggaaatttttgaaagcaggtttcagtagttctagagttgccttgaaaatatccatggaagaggacctcaggaagaaccagaaagttaatgagaaggaaaggccagtcatggattactagactcaaagggctcgaatagaacttagtgaccaactgtctaacccccttcattttagagagcttgaaacaggccaaggtgggaggattggtagggaaattctatttatctgcttacctacatatctacctacctacttacctattcgtctgttcatgtactacttctttctataaagcctttgaggcctcccacaggtctctgactcacaatctggagaactttctaggacttcttgccaccctcctaactttaaataagaatacatttgaggaaattaggaatacctcatgctgtgtagaccttatgtaatcatgaaagcatccacgtcccaagccagaatagttcaacccaaatgcgaagagttgataaagtccattctgataaactggaatgtccagaaggacttcagtgcctttatggagttacctgtaattgtggaaagcttgacaggtaaaaaaaaaaaaaaaaacaaacaaacttaccagaagacaccctgaaactttcaggcctttaagtttgacttggtgggtttgaaaggaagctaaacagaaaataatgcctttaagtgcagttaaaaataatactatgcatttgaaatccaatcaagggtccttattttgaaaagttgtttttgttt

SEQ ID NO: 35300 - DNA, 842 bp, Homo sapiens
tgccatgctgggggagatttttccaagtgacaactctgtaagtactgcctgagcctcattctatgtcatggttcctctctctcccttccatctttcagtagaaaaaactcctttcattttctcatatagaacagctatctgcttattatgctcaacgctttacccttcatcctaagcagcttgtctaggtatgttagtccataaagacagttgtcccccaagagacaattacgatgtcagttgttatagtaataaaatcagtcttccactctctgccctactcaaatcactgcagtttcctgcaagggtgcccagtgctgttctctctctctctgagtgttaggcaagaggaaaagcaaacataataaacctgggcttcacctgactcattgccatgcctcttgcttcttgctcttagatgggggagatgatgtcctggtaggtgccctttagggtgttgtttctttctaactcttccactttgtgtagacgaagagggaagagtttctgcaacttccaacacagaggatctgccaccccacatcagccttctctgctagactgggggacatcagaggatccttgtggcctttggcaaacgaggggcatgggtgggcatttctcaggatcaaacacagcaacttcttagcttgacatgaaggatccacttttattgtgctggattcatcaggcaaggtttcccctgatacaccagataaatatgacttcttggtatgcctgtttacatgtgcgcttgcttctctgtgggcagggtgggctgaatctctagcctagctttcaggggcacctcaaccaaaccaaatcaaacagttttgttcttg

SEQ ID NO: 35301 - DNA, 1185 bp, Homo sapiens
aaatagctctgtggtcttggaaaaatcatttaaagtctctggatcttcacttttcaattgataaattacatgagttggaaaaatgacataattctatattaggggcatacatttcatggagttcccttagagatgggggttgaattggtatggaaaatagggtctgaacactggaacccaaatttgataagactaaggaaatttatgcattttttcttttctttttatccctacatttgtacatttctacttcttgcttccaactgggagaatcaattctatgaccacatgaaagtctcattaagcacaatatctcaggccactttggtagttcataaaagacaaccaaagttttagttctgtctacatgaggctaccaggccaaactggaactgaatgttctaatttgtattgaattatttgccaagcaaatatggagctcttttgatgtaaacaggagtgttcacaccaacacagtttctagcagcaggcaggcaagccagatccaacttggattctgcctgtttccagtagctcttcattaatgttgatgtaagtcagtccagcttgctcctgtgggatgttcaaggttcaccatcattggttttcagtgtattgtatcaaagtccaaggctgtgggacacacgacttcctgaacaaggctgggatctgagaaaaggctctgtctgggcgctagggtgtatagaatgcttataccatgacataaagatggccataatcctggaattatattctgagaattaatcaatatttactgagaacctatcctaggtgctgggatagcactgatgactttctggatgtagtatttgtctgtttcaagttttcccatagtgtctagattttcaatcaattttatcaagcaaaccggccactgttccaccttcatgaagaacagtaactgagatggtttcctttctagcatttgtggcaactccttacaaggacatgctgaggtcactgttgaacaagcaactgatatctgactttggttagggggtctagatgtcagtatttctctttacacagatccccaggattctcttcccaactgaagtgggaatggtaaacagatcagttaaaaaatttaaaagacacaaatataaaatgaaacgagtactctttagtattttatagcactcatactgaatgttcactggctct

SEQ ID NO: 35302 - DNA, 997 bp, Homo sapiens
ttctggccgtgggtaacaaatgtgtgccaggggaagtcttacgtgtatacccttcctgggtactcacctttaatcacaacaagggccaaaaggcaacccagcttcctgtccccacatggtgtgggtcaacgcagcatcactctctcacttcagacgcagtaagggtgtgattctggctgcttccaggcatgcctgacactcacacagccacgtcatgtcatgttttttatgtggcctgacctgactttgttctcggctccctagatccacctctgcctctgtgtctgtctccatctctgatgctcagcatcagtataatcactcaattccacacacacctattgcccaccccctgtgggcaccctgcactaggcttccagcccccctgctcactctagatttgcccatggcaatcttgtgggtggttcacagtgaggcacatcaggattgttgaggtttctatttgattcctctctgcagcccctctgcccttcctcagggtcattctttgcttgctttgtaactcaaaactttcccttattcctgtcaaagctttggttttctactcctttcctcctgcctgtgtcctgcaaaacaaattctgaacatggtgtaggtaagcctatgagcctccctcttcaggggtgaactttgcacattgccagaggctttctggaaataacacctcaatccaaaggtgtgagtcaaatgctaagaattttaggcaccttggcagagtgttgaagaaattattttgggagcaagtacatggttctgcttgaaatattccctgtgactctgtccatagattctgccttggcaaaggactaggtcacggtcaccatcaccataagccattttattgaagctgagcccatagtgctggacaactgaaaggtcttcagctactgctgagatactaagataagtgttttgtttcttcagaccactccttctggatctatttgttattcaactgtagtgctatttaaattac

SEQ ID NO: 35303 - DNA, 847 bp, Homo sapiens
ttccttctcttaccatacagcactcgcccctgagctggtcattgtctattcctacgatggctggccttcacctatgcagaatgacaatagaatcatgtccctgggagccacatacaattcagcaattctgctgttccacttggaatgatccgaggtgctgcaagacttggcccctacacttttttcaacagctctcaaagcgtagcttctacctactcaacttaaacccagtttcccaatccttaatctacccaatttagggcattttttattcaacagagacttcaagcaatgcagccatagcaatttacagaggaacattcccctccccagccccagatgcgggggtcttagaggatactttctacacggaacactaggtggcagtgttgcttcattcacaggagagtaggcagccacgtagtggggaatgtctctgatttcttggaggactgtcctgccctggctctgggctgtgtgtatttaattgtcctctcccagaatgttgttcgttggcatcccttggggtcagctttatgcaagtgttttttgcggggcttatgtgaaagggcaaaagtgacatttttggggttgtgactaacttgcactttagcaactagtaaagaaaagaaaatcaactaaagtttcccctctccctcccccactccaaactcccacattcttccaaaatagaaagttgaattccagaatgaattgccagaatacatttatttagagttgaggacaacacggagctcacaggctttgggtgctgaacgtctctctggccctcagaaggcgagacgtggtacctgggtccctgcaaggtagatcttctgaagtggcc

SEQ ID NO: 35304 - DNA, 773 bp, Homo sapiens
cccagccttgagaggcattcatgaggtgatagtggctcattgtagttagagccagacttgcaggctgtgttaagcatgggtatcatctgggctgggagaagggtgggagctcacgctttgccaaccacatggcacagtcagcaacagtgctctccagctgaccaaacgtgctgtcacctcaggctggtcccatgaagaaaattatagaatcctggtcgtgatcacaagacagtggggatatttgctttttgttgacgcaagaaccgaaactaaacagaaaaatgtgtctggctttgaattgggtccttctggcaagcaatggagaaacactgggaagcgggaaggagcagctagccaggagttggtgtcaggggtgacaggtgccttcagcggtcattgtacctgtggctttggtgccactgtgatttcctggcaggatggctggctcagccatagaaactcccctttctatctttgacctttgataatccagtagctagaatgttggctgcacgtttttcaaacaagccataagcttctaggtctccaggtcctgccttgttacattccccccaccctagacaccttcttctcccacctccccctgtactgctgggaagtcctgatcatttttcaaaggccaatcctgtattacctattctgtggaacttctcctacatgctctcctccctggccgaggatggcagttcctcctccagctcctgttataccatcacacaggagcatgcattatacaatatggctttattgtt

SEQ ID NO: 35305 - DNA, 548 bp, Homo sapiens
aaaataggattgtgaatagagcagaaggctgcactgcaaaagaccctcaaactgccaacagaaatctgaaatcctgaacaatgaacaccaggcaggtttggaagaaaatgctacttcaaagattcctagtaagacctttttacccatctggagagaccacacacacacacacacacacactcacgcttatgcacataactgatgagaatgttcccaggccttggtaaccttccaacaaccattgttgccaactgctgtgccctttggtcccaaaccacctgcctggtgcaacacaagccagaaattccagctgagcatcccaggaccatcaaagtttacactagccaggtgacttccaagcctgagggaacagccagctcaaacgtttcactcgggatcacaccaaaaagcagctgcctgaataacaggaccataaccagctccactaagatttcccctctggataagaagggtcactggtgcagccaggatatgcgccgtgaggcaggaagaaatattcaggtaaaagaagcagagaatgtgatagt

SEQ ID NO: 35306 - DNA, 576 bp, Homo sapiens
gaatacaatgcgtgggcttgatgattcagtccaaatgataatgctctcagcccagactctcagtgatgctgagaggccaaggagtctctggctttcatggcctctatactcatgacaaagttcctacatccagacaaagcaatgaagctttgcatcttgcttttgcttttcctaattctctctggtcttccctttcttaaaagcaccactgagtgcctcctttcccaacttgataatggataggggcagtgttcccttccaggaatcagctatgatgcaattactattacaagcaaaaagagagaaaatggaaccaaagttgacctctctgcccaggtgacctacataagcaaatgaggtggacaatgatccatcgtaaggctgactttcccagagacttgccacccagcccttccacatcagattcaatcaactcttctgatcattttagaacccaccagcctgaactggactccaagctgctgaagctgggggatcatcccgctccggggcatctctgatgtactgactgagctcatagctgctggagctgagaccagactcacgctgctggag

SEQ ID NO: 35307 - DNA, 2892 bp, Homo sapiens
acaaaccatatggtcacggatacagagaaatctgagaaacaatctcagatacatgaagcaaataacagactagacaattatattaatattgcttaaaaaattaaaaagtacatgtggaacaacgacagatgagggaggcaagggagacagataacaataataggtacagctaaaaatgctatcaaggaatcccagttgatgtttcttcacatattcccccagcaagtgtttatttaacacttacagcggaggccctgtggtatcataaacagagtgggtcttgcagagagctagatcagagttcaaatcctaactctgccacttaactagctagttcattttttcaagcctcaatttccttacccatgaaatggagactgtaaggactaccttgcaaggttattgacagagttaaagataacctatgcgaagtgcgtaacatgttacctaacatgttaaaatgctcaataaatagcagtgttatcaaggataaagattagggtagtatgagtggctgaagatgtttattaaacaaaaagaaatttagactgaccttttcaagaagcaccttttctgaatccttacattaaccccctcaaagaactagaacctatataatatggtcatacctgctcctcctccagaggagccaacaagaggcaaatttgggattgttttcataagaaaatagaaggccatatctcaggattcttcccggttggagattttaaatgctgaaagtctccctagcatcaaactaattttcccccacgtaatcctgaaaaagggaaattgctccaaggactgattaccttccaggttcctctgcccattgcacggggtagcgggggacaggggttgcacccacaaaaggaaagcacgcctcagatcttactcttgctcagggattccttgtgtcaggagcatccacaggctaggtcggcctcgatttttttcttccttaggaactgttttaggttgcaagattctgatcaaatcagttaacttgtttccactactgaaggtcccagcctcatataaaaattcatatcagaacaaaaggtcaaaagagtgggtgttgaaattgagacgtcactctgctcaaacaccagggagccgaggtcgacagctatgagccaagagctatgagacggcagaacacacaagaagaacaaggtgcggagggggcctcccacctcaaggtcactcacaactcaggggaacctctggcttccttcccatatcatctcactcccttgaaaaagccaggtgcaatgacagcctttgccagcaaatcccaggaaaggccaaatgtcccagacacagggaagggcacatgagccttttctgaaggctggtggaactcaaaaccatttggaccaagtaagcagaatgagaagaaacctgctttctccttgtccccagatagtctcattaggcagccctttcccaactgcaaaggtgcaacacccaatctttccactgaaatcacatcattttgctgccaagagacatcaactccagcaaatcagtcctcagattaaggacaccaaataaataacaccttcgattctcaaaatgaaggaattacatctatgatgacaaatcagactcacacattcatgtagatgacctttcctagccccagtaaaggcaatcttgcctttcctaatctgacggcacagcacgtccagctcaaagaggggaaagaagggagcgagtgttcccacacacctgctctgatggcttcccaccttccttcagcgctgctccagggacctggcccaagagtgcctcctctcctcttggagactgtcaaagtccaggtgccacatctaccaagactccccaggccctcagatctacatcatgtcagttacctttgcaactgcccaacctccatggagctgattcattagggcaaagtacagcccagataccgcagcccaggacccgcctgacttgacgaatttgctcagaaccctgtcagagactggcgcttctgtttgcctgagcatgggctgagccaggttcactcacatgagaaatcatccaaattcccacagcaatcacggaagagagacatcaggaagaggaagtccagaagccccaaggcagcctggtctggcgagaaaagcaccacctttggggtgttaactcggggctctaccactagctggttctgttacttaacctctccgagtttcagtttctttttctttaaaatgggaatggcaatgcttagcttatgagggtcattacggggctgaaatgttggtaaagcagcacatgatatataggtaagtatgccctgcagatcaatattatcttttccttcccaaagagacaagttaattccactggttgaggcacatggggaaggggacacgctcactggtgggagcaaacacctggtttgcccagtgtgggtttttcttatgtatatttctcaccattgggttctggttatgtaataaattctgtcatctagctggaaggcagatttatatccccagtactgaactgaaggcactaaaaagttttccattataacaagaaagtagtttctcgcacttgaaatatacatttcttctgcattattaaggtaaacgcagaaaagcacatgactacttctgaattaatattttaaaattctgaatttgctcttttaaaaaatcccaaatggtttattctttctctcaacaaatgcttactgtgttcctattaagggccaggatttgacacacataaatataaaagacacaaattagtctctcatgtctgtccttactagtccagggaaaaccacccctcttgggtctcatggtcatatagggtcatgtacctaagctacaagattttctctcagcccctcagctgactctagaaccc

SEQ ID NO: 35308 - DNA, 540 bp, Homo sapiens
cgtagaaacagaaagtgaatggtggttaccaagggctagggaaagggaggaaaggagagtcgctgtttaatggctatagagtttcaggtttacaagatgaaaaagttcttgagatctgtcacataacaatgtgaatataattaacactactgaactgtacacttgaaaatggttaagatggtaaactttatgttatctgttttttaccacaataaaaaaagtaaaatgaaaaaaagagcaatgtacattcattcacagagacagaaagtaggacagaggttaccaggggttggggaaggggaaagaggcagttaatatttaacaagcacagagtttttgttggggatgattatgcaacattatgactgtatttaatgccagtgaattgcacacttacaaatcattaaaatgataaatattaggttatagtatattttaccaacattaaaaaaaccaacatgtattaaatccacagctgggcagtcctcttgaccttgcagactggcaggagtgaaccatcatttattactttgggcttct

SEQ ID NO: 35309 - DNA, 860 bp, Homo sapiens
agaaacaaaactggggcaatatccagcaaggaaagggaatgaatggctaggaccaatgataattctggtgaaaattcatttgttcatttcttcatttttagagtatttattgagcacctactaagagccacgtacaatgctaagctgggggatataatgttgatcaagacaggcatagactttgccctcatggggctcacaatccagtgatcccaatacacagtgagatggacacatataactgaaacatcaccgatggcaggcagacaccaacagagcactgcctgagcccaggggcatgattctgaaaactccctgtatctttttttcctgaagcagtcacttggtctccctatactcaccaggtgtgaagggaagatggggcctttcctgatattgatcacggcagatcaaaatatcaccaaagttaactccacagaaatggacatcaactctgacctacaaaagaaatagagcagcaaagcagaacagtacacatccacggagacaatgtttattcaatcataccaaaatagttactgaatgacaacaacatgccaggtactaaagtaacagctggcacacactcatgggcaaggcctctgccttcatgaagctaaagtataggagggaaaacagatattaaccagataataatgaagatacatatattaagttataactccagtaccaagcattaatgataaaaaatatatggtgctatgaaagcacataatggaaggatttgaccacttagggaagtcaggaaaagcattcctaagtaagcaacactttgaactaacaactgagagttaactattcaaaataggaggcaaaagccttggcacagacaaaagcaa

SEQ ID NO: 35310 - DNA, 1647 bp, Homo sapiens
tttcagggaggcagaggccgaataattcgattccggcactgaggtggaaggaagcaaaggatgaggtccatgtacctgtgttaaaccaataacttgcacatacaaagtcgtgtgcaaatcagaattctctgtttctaaggcaacagctctgagcattgagaaagaggcctataggcgtgttttgggggaacaatcttcctttagcactttagaccttggaaagggcttcagccccctagctatcccaggacgaagttgccctccactctctcggtcgccccctcgcttcagaactgggaacttgattcaagaaggaagcctgcggggagtgtgtggtggcggggagaaggggagggtagaaggggataagccagccccctacctcgtgaggcccgacggggcgggggccacctcttcaatggtcaggggcttcttcagctctgcgcaaatcgcagcgcggtagtgccggccgctgccctgtccggctctcctgcaacacaaaacaagggaagggtcagtcgggcagccccgccgggagcaccctgggactgccttgcggggctcagggaggagtcggggttgcacctgcagacccacgcccgagggaggcactgcctgcagagcacggccgccaaggccaagcccagcgaggggcgagggggagtggccagagcgcggcaggaagagccggacagcgccgcccagccccgggagagcggaagggcggcccgcgaggcctcctggcgacgcgccctggcagccacgacccaaccccggcggggcagctccggtccagtgcgcccggcttctacggccgccgagaccaaacgaccgcgcgagctccctgttgggcctctctggaggtggagccggctggaagaaaaaaagaataaaggaaaacaccaggaaacggaattcgattacccgagattaaccttctttggcatttttataacaaatttgggagactttttttttttgtagtttcaacttttattttagattcaggggctacatgtgcagatgtgacctgggtatattgtgtgatgctaaggttcagggtacgaatcatctcgtcacttcggtgctgaacatagtacctaatagtttttcaacccttgcccccctcaaaattgggaaactttttaaaccacacttggcgacatttaaatagtggttcttggctgggtggttaacgcctgtaatcccagcacttttggaggccaaggcgggtggtggccagtgtctgtggtctcagctactcaggaggctgaggcgggagggtcgcttgagtgcaggagttggaggctgcggtgaactatgatcgcaccaccctgagtgacagagtgagaccttctctatcgattagatagatagacagacagacagatgatacatagataaaggttattgggtcctctgccagtgcaaaaaatcctaaatgcacaggtaaaggctttatttatgtatttatttttgagacagtgtccttctctgtcacccaggctggagtgtagtggcactatttcggctcactgcaacctccgccacttagggtcaaaccatcctcccgcctcagcctcccatgtagctggtactatagttgtgcgccaccatatctggctaatttttgtatttttttaaaga

SEQ ID NO: 35311 - DNA, 892 bp, Homo sapiens
tccaggaagatttgggggaatagttaaaaaggggaatgatggtgtctccaacccaagcattacttagaaacattcatctgttggtaaagattactgatcccagtttccagatttaaaaactgagacttgaggctaaccgagttcttcttataccaactaacaatacaatggtaggactgagcttcaaagtgactaatcactttggaggccagcttttctggttcccaggctgtcagcccttgcttgtcaaattggttccaccaaaagttggaatccctcggtgaaaggaaggattgcgtaatgaagcagcattccatggggactttctattctgtctgactcctaaccagatctttctttcatgcgggatcattttctcaaactatttatttctgtgcggtggtggtgggaacattgacgacaaaatggcaccttcttactcaattttgctgctccctgtgtgtctgactcacacctgctgacaggaatgagcctctccgcttcttccttccccggggagctggaggtggattttaacttgcccttgccctccccaccatcctcatgaagactgtcagcttagctctgattttaaaacaacaaaaaagagaaagaaacaaagcaactccacaaacctttattactcagcaggtcactagaggcagagaaagagcagctcaattttccagtctcacatggaggcaccaatgctgcctgtgaaaggccagctttgacttgtaaaacagcagctaaattgtccacagaggctcttatgcaagcagcaacaaggggctcccatttccgtgttcaaccttcaagcagaaaatattttttacactggcaggaacatctatttgaggacatttatttgggcaacatttagaatactggt

SEQ ID NO: 35312 - DNA, 2240 bp, Homo sapiens
cattaaaggaaaaaagccaacacactgcacaaagatcaaagacaaaacagagaaacatgtttggttaatactgggctttgagtatttcatgtgcctgagaggcccgtccgtccatccacaccacacttcttcaccatgctgttgcaaaccaatgacaagttcagcttcagcgcggacagggcgcagggcgcagaccctgtgcatatcccagaatcccggacccactgccactccactctgggaaggaagaaggcgctcccccttgggtgactgtaagataaagcagcttcttcgatctctttgtccaataagaaagaaacgttggcccataaagaaagaaagaaacaaataaataggaaaggtgtgagaaggaagggaagctcctttcttttctgtttaaatttcccgcacccttttacctccccgccttctcaaacggtctttactttgagcagcagagacccggaccgctcaatacccggctatccctgggagggtacttggaaagtaggcgggacaggccggatgaataattcggtgtccgacttttcctgcctgcggcgcagtccctccccggcttcgttactcgagtgcacacgcggccgggctctcggccctcgattgcttcagcctatcaccctgggatgccgcctgccgctgccgccgccgccgccgccgccaccgccaccgccaccgccaccgccaccgccgtggctgccgggtttgtgggatccgccgcggagcaggagccagagctgtggccggagctgtggcctgagagtcagggggcgggcaggctcattccagaagtgggggccgaggacaggcgggctagaacccggggccaccgccccctacccctcctcaggctgagggaacgggcactcggagcttctgaggcggcggcggcgggagccggtcagagggggcggcccctggcggcgacgcccccaagcccagccctgcccggccccgctccatccccagccagagcctggtctgaccgcgagagacgccggcggggctgaagaaggcggctccgaggaggtgggagggcgagcctcccctcccgggttcttctgcgtcctctcccgggagggacccacacacacctgagcccggacccacccttggtcggggccacgctggatcctcctcccggcctgggtcccgcccgccgactgcaggtgggctgcatcgcccgagcctcgggcagtgggcgacggggaaggaggtgagaggtgtccgcgccggctgccgctcgggtccctgccctcgctgcgcgctctcctcctccccttaccgcaggcagggcgcggagccgcgcgccagcccgccccgaagccgccgcctcgtccccctcccgcctcggggcaccatggagctctctccgtcgtccggaggagccgcggaggcgctgtcctggccggagatgttcccggcgctggagtccgactcgccgctgcccccggaggacctggacgcggttgtcccagtcagtggagccgtcgccggtggcatgttggatcggatccttctggagtccgtgtgccagcaacagagctgggtccgggtgtacggtaaggaccacaggccgtcttagaggctggtgtttcctatttttgcttgggctgaaattcattccctaagtcacaggctcattcccagtcctcatccgtgctaggtcagtttcccacatccctttttgttctgggggtgcatttctgacaagtttcttcagactatcacttgggcagggatgtcactcagtatggtctttggacctcttcagacacctgcagtaagtttaatgcgggagttgggctatccaagacgtaattcttaggcgattacttcaagggaacagccaggcaatcaatcttcaagaaggtatgatggaaaaactccatgaaaccaagtgaatggattttcgtctctttttattgttgaatgaggcaagactggaaaccaagatattatgaaaaagcagaggataagctaatgaatgaaaaaaatgcaaactatgtatttggtgggagcaagactaatctataacctctgcctgaacctcactctctctaaaagcaaccacttattccaacgggtgtggattgtttcagattacactattgtttctgaatctcgttgtaaagtgactgggttgccactcagcaggttaaaagtgatgaacacactaaaactttccctttctgcattcctggtaaccacctctttaatta

SEQ ID NO: 35313 - DNA, 1227 bp, Homo sapiens
tggctttgctcataagggttcagtttagatcctgattgtatttttacccctccataaattatcttcaacattgctcgagttccattcacattgtgtcacttgtagcagactttctaaaagtaccccttacctccatccctgagtctaagggattggtaatacttatagatattgattgagagagtgaaaatttagtgaggggaaaacattcaacatagataagataacaaaattcggaagagtagtctgaaaagttaaaatgaaaccttaaagtcaatagtttttgatatttttcaaagcaatcctttaggttttctcattgaagaaactggctcaggaagtttagcttattcccaaaattggagacagactccacagtttgtcaggattggaactcttaacctcagattccttagcctcctgatttagcttctagatcttgctgccttcccttagggagatggcctctcaaagctgaaggtcaggaaaactcgacagtgagaaataccagattgttagtttcacagtcttttaagggaaatgctggaaataccattacctaggtaacagaaaacaaaaatggacaaaacatccataaagtaggaggatgaaaataatttcatagtaatccttaagagatagaccagaggacagatgagattttttttttcatatttttcctaagcttattatgcatactttttttggtgctgtgattggaagtgatgtctgaaggaaatttgaatttcatatatgatgcttagaaccctgaataatacctaataactttgtaccttccacttgaatttctaacctctgattcctgtcattaaaaattaataccctttttctgattatgaatataatttgtgcttaacataaagaattagaattttaggaaaagccaaaattaaaatcatttgtaattctacctcttagagataactatcatttttttttaaatattatattttagagacggggtctcattctgttgccaaggttggagtgcagtggcgcaatcatagctcatgcccaggttggagtgcagtggcgcaatcatagcttacatattatccattgcctgggttcaggggatccttccacctcagcctcccgaataactgggactacaggagtgtgctaccacacctggctgagataattattcttttaatattttattgtgttttattccagtcttttttgtgtacagatttttttgta

SEQ ID NO: 35314 - DNA, 3836 bp, Homo sapiens
ggcagaaatatcctgggagaattattgcccaaacatcagttagaaaaagtatgttaaggaagttctggtcacttgaaatgcttcctttaatcttatttcctctagcaaatatgcagcattttggccaatttctgtggcatatgtatagtaaatgttttacatttcagatcatttttgctttatattttaggggaaattgaattatctgactggtggtagttgctgagaatatattttactaccttattttaagtttctttcactaaattatttcctaggtctttggaatggcatctcttcatatgcaacgtagaatatatgcttactgtattagtccactttgtgttgctgtgaaggaatacctgaggctgggtaatttataaagagaagaagtttaattgtctcagagttcttcaggctgtacaggaaatgtggtgccggcatctgcttctggtgagggcctcaaaaagcttaaaatcatggtgttttattttttgctactgaaattaacttaattatttttcagaagaataacagtatactttcctgtattctgataatcgatgtgatattttaagtagcttacaattacattgacaaggcttctgctttctcacacttagtagctgggactgtcaaacagatgcagaacgaacaggtgaataatttgtttagttagttatttttcatttccttttcaactagattgaaaagtagggatatataatcctacattttagactaattgcgtaagacatcttgaagaattaaagaagatattctagaatagcagagagttcatttttcataaattagatggtgacagtgagagaaattgtattgttgatatagtacatatttttggccaattggcagatacttggacacctacctaaggagcaagggctggtgctaggcattgtagggatacagatagttataataactgatattttataatgtttactatgtgccagacactttctgggtactcagaacttactacttgtataaattttacagcagtcatatgctcttacctctcttgcaaataagaaaactgagacatagggaagataagtatcttggacaaggtcacaaagctggtggtggagtttggatttgaaacctggtgatatggctgtggagcctgtgttattatcttgtaatcagtagcacgaagcagaagacctggttcctgccctcaaatagcctgttgtctagttgcagtgacaagtctcaaacacatgtaaagatatataatgtatattttttaagattgtagacagtaaataaatgctgtaagtagaaatattcatctatttatttgcctaggttgactagcaaggcaatcctgactggcataatcaggattctagactctggccatattgttgtgtaatattgaacatctgggatgggctgtgcactgtgcatttgcaccctccatgagtaagatttaaagaaacaccattcttttagtcattaccttttaaaaaacacttttaaccatgtacaggtagttatattgaatagtttattaaaattgtctcacttatttctgaaatctatttaaataaaaatgtgggaaagctcaagagtgagtacactttacaacctggctgcctttttcagatttctacttgcattactgtttggaagttgttcttcatattccatgggagatgatggggagtggaaagataagaagggagcagtgacattcattcaattcctgtaaatgacttttattaacattgttctgatgcttcaggtttgtgctcagaaacagggtgtgtcattcattacatagcatgctgtcatgtccagtctgctgcctcatgacttctctgagtaaaactgactcagtcagtggtttgaggcttggccttcagcacaagagaagcaaacacccacttatagcagctagattaatactgtctttctttctgaaatacttaaggtaggattgctgtctaattctttgtccttcattttgtagcttatttcgcctcagtcatcttgtgacccacaaactgtaggttgagttgactcaacctgtaatgattaatatttccagaatgtgtggaatgtgtcacagtatagtggcttgaagatagagacttatcaaaggttatacctggtttttaagtagcattccttctaatatttgttattacccagtacttaatgatagtatatttattaagttcagtgttttctcttggcttcgaattattcttgagttttagagaaatacatagcctgttaaaaattaggcagcaggaaaaaaaatattttctattctgaaatagaagcgtttaaaggcacaaggaaatggtaattgcaatcctcttttttcctgtgaaaataacaagaacagcagtaactctttctttgccatttttcatagtaagtaatcataatacatcattcctttgtcattgatagtgttttctctgatttttaaaatttcagggataaattatctggaaagagcctgtcttttttgaaaccctgtatttgagagaattacctgatagaaacaaaactcaaggcttacagaggaaatggagtgaacattacattttataactttgttacttttaggctggagatacattcctctagtggtgatctttaaaagatcacctttaatatctagtatctccatacttattctagaatctagacttttcatacatgtgctcccatagcctatacatttccccctcaatccctgatcaggagaattgtacatcatttcagttgaattttgtcagtgttaatttctttttaaagaatagaagtttactgtaaatgactggtagaaaaagacagagccagataaagagcattgcctctaaatataaaaaattaagaagaggaaatgattgctctgtaactaagttactaaagctatggaaaaccagtggtgaaaaatttctcaattttctgtggaagacatttgattttgtggaacaaaatttgaaagggcccttaaagatactgtagttcaattctttcattttcacctaaggttcatcaacccggttcttctgacttcaatgaagtgttctttctacatcactacccgagtatttatgatctctttggtgtctaaagaatttctttcctttaaaacctcagaattcaaaaaattgattcatagaaaaaaatgcttatgcattttgtgaacaaatgaagtgcctatcaatttttattatttgaagtcagataaataggagttctaactctggtcatgccatttattaactgaataacataatacttaatttctctgtctcagttccctggtttgtgatatgaaggtaataatagaattctacttgttagtttgttatgaggattaaatgagttactcagaatctcacattggtgatgttataatagagagaaggaaatgattttgttgtttttatttgaaacaataatactctgtacatctttttttgttaagtaactttattgaggtgtaatttatgtacataaaattcattcattgtaattgtacaattcactgattattagtaaatttataaagtcgtataaccatcacttcaatccagttttagaacatttccattattcccacaaattcctttgtatctgtttgcagttaattcccactcccagccctaggcaaccactgatctgctttctgattcccctaaatgtgccatttctggacatttcaatacatagaatcataaaatttgtggctctttgtgactgggttctttcaccatggtgttttcagggttcatccatgttgtaacgtgaattagtacttcattcttttttttggctgaata

SEQ ID NO: 35315 - DNA, 1298 bp, Homo sapiens
atgaactggagatataagtagatgtgttaattgtgaatgatgatatgcatggtgagaatatggacagaggatgtcaaggatccagctttcaaagtctcccaacacttagagactagatagaaaatattgaacctctgattgaaccagtcagaagtgtgatcagaggttaggggaaaactagaattttttttttttttttaatatttaaaggtgttcattatggttttaggagtttttgtttttgtttaaaaatgatttcttatttaaataaatcttttattccaacacttaaaaaatctttatttggcccttctagacgtatctttgtctcttaaatgagaagcggttgtgtacatgtcaggtgtgcctttcacttctgatacttagaagaaaggtagttttcactgcaggaagtgtttcattgggaagcatatgtgctccagtgataggaaatgggaagaggatgttttgttattaattatttagctttgtataaacaaggactttgtacttttgaaagatgtcatcttctggttaatataaatgagttctatttttaaagatttttatgagttgatctaagagctatgtagtcacttgttctagtaacagaattctagaactctctttgttaaccgtagcatctatcatgtattctaatacaaaagagcaagtgggatacatataataaaatagaatattcgtatagaaaagttgtgtcataaaataggaagtgacaacagactatgtctaagctgagaaagctcatgttttcccttttcatctctacttgtttccctaataaacacattttaatgagaaactgatatcctattttaaactttttaaaagacttttagcatttacactaatcctagaatatctaagagttagtgccacaactatgctctttaagcctgaatttctcaattatgttctgtggatcatagtttagaaaatgctaatttaagcaggtcatggaatcctgaactggaaattaggatatacttgtgtttttttatttttgctgttaacttctaagggacaggtcccttttgtctggctttgttggattatttataatatgagagacttagtgaagttggtctgtgatgacttgtctagttctctgttctataattatgattctgtagattagtgttaaggcttttatttttgctgtggattttaaatatatatatttttacttaacttttctgctttcaaaaggaatgaaaacacatacttataaaatttgatatatgatagaaattaataatataaaaaatgaaattcta

SEQ ID NO: 35316 - DNA, 3061 bp, Homo sapiens
aaaatttaccactttaaccatttttaggtgtacagttcagtggcataagtagcttcacattgttgttcaaccatcaccatcatccatctccagactattttatcttcacatactgaaactctgtacccattaaacactaactccccattcttgcctcaccctaggccctggtaaccaccattctactttctgtctctatgaattcgattcccaagtacctcatataagtggaatcataatattcttttgtacagtttatttttagtatttttacaaagctgtacaagcacaccacaattttagaacattttcattacaccaaatacctattagcaggcaattcctgtttacccttaaaggtcccatccatcagacctaggcaatcagtaatatactgtctctatagatttgcttatagatgctatataaatggaattttacaatatgtgacattttgtgtctagcttcttttacttagcataatggtttcatggctcctccatgttatagcagcagtactttctttttatcactgactttctattgtatggatatactatatttcatttatacattcatcatttggtggacatttgggttgtttccacatttgtgctattattaattatgctactatgaacattcatgaacaaatttttacgtgaacatatgttttcatttcgcctgggcatttacccttgtattttgcaaacagtgtattctgcctccagaataatgatttggtgttttgtgaccttaagtcacattaaattttccatttgttatctgaacatgtaatggtgctgctactttattattgttttatatccgtgtattcattcagtaaaatatttctgtgtgtatgtgtgtatatacacacacacacacacactttgatcacctcaagtacctattagcaatcactatatatatatgtaaataaaattttagtcttagtcaaataccttctgtagttagtaatttcccacacctctgctcaaaatataaatatagttcaatgtgatctagagttttcaactggtagcttgattacaatgaacagtatgatttgtctgcatttccaggatgattgtcatcctggaatgatttatctgcctcaggcaagtttttatttggtttctcacactcaaggccagtttgtctttgtgaggaagcaaagagaagagtaagatgagtaatgactctggatctatgattatgaaaccgtatccttatgagtacacaggttcttagtgactgagcttgagtcagttaaccacaggtatttttcctgtcattctcatgtggaattttcattgaaatgtcttaaaaaaattttgcctctaatttctggatttaaggatgattacttattcacctttacaaagtagaaaccctattctatctatgtttttagattttgtcaccaaaatgtcaaaatagtttgaatcttaagggatattgattcatataatttagcatagtatataaccataaccttggtcaaactaaagagtattttgaaagctatgtgtgtggtttgttgttctgaagtaaagtggtatctggtggttagaacataagagttactgtcagcatttgtgggttttcttcccagatccaagcttttttaaaaggaaagtcagagtccatgcctgttgtatgtttagtgcaatggtttacatactgtagatatattgtaaatactagtgaagatgttatacaactggcagaataatatgcaataaatcactcacaatatgtgtaaaataatgatagttgtcactggtacttagtgattctattatttaataaatctttctttgagaaaggcatgattactgtttccaagtagtagtgtggtattttaagcaacttataataaacatttttagttcaaagtggttagacattactctctatccaagggacttttgaggacactacctcatggacaccatccatatatcacagtagtacatgccagaatctaagagtaaggaatacgtttaagattgtgtgatgattctaatatgtggacacgttaggcactgatactctagtatttaagttttatttacctctatcctcttgatggcatcctaaaccatggttcttaaagcttgagctggatggaggtgttctgcccctgaaataaggtaataaaggtattttcctagcttattaaaaacagatgaatggtatttttatttaaaatttttattttataaattttttaacattgtggtgccttgctatcccttagcctataataaaacataaaatatttgcctttacacagatttttatacttgattattttgtctttaatataaacttttgtaattactttttgccctgtgatgtaacattagggcattgcttttcaagcacagtgttttatgaacatatgttgtccacagtgaacaaggtcagttgctagtggaaattatggagttgctggcttactaatcctctctagcctattatttcaatttattggactgttagtgataccgcagatattgttattagtccctagatgtagacagtatttctttgaataatgctttcctgttcatagaattctagatgtatcattttgtttagccaaaaggaacttaatactttcctgtaaaccctatcacttcagatgttagtgtttattgtatttctttaccaataaagaacattcatttaaacacaataggtccattttcttatttttatccagtttttttttcttagccttagactttattttaaatacaagaatataaagggatgttttatccaaaagcaaatggcattgaaaaaagaccactttaaattatttaaagcaagtgtcaaattttcatagtaaataatgtatacatgtgttgctggagaggatattgggaatttatcttaaatgaaaatttatgaaaataaactttttagtcttttaaacaaaatttacattataattgtaactatatactagttattaaaataaagttattaagctaattattaacaactttttgtggtatttttccctgaacaaaattgtgtgactgca

SEQ ID NO: 35317 - DNA, 1157 bp, Homo sapiens
agggcagagtttgtgtttatctttgatttccttacaactcctagtagagttctctacaacaaataagcataagttttattaaatacaatgtatcatattatgtcatatgaggtatgatatgatatgtgccacaaggctggacgcagtggctcatgcctgtaatcccagcactttgggaggccgaggtgggcggatcacctgaggtcggaagttcaagaccagcctgaccaacatggaaaaacaccatctctaccaaaaatacaaaattagccaggtgtgtaattccaactgtaatcccagctactcgggaggttgaggcaggagaagagcttgaacctgggaggcggaggttgcggtgagccgagattgcaccattgcactccagcctgggcaacaagagtgaaactccgtctaaaaaaaaaaaaaaaaaaaaaagtgccacaaaaaggtagaattaaattactagatttaattagtagacagtctactaatactgtctcagtcaaatgcttaactgtattttcattagaaatatatgtatgatttttggtcgactcctcggcctggatctcaacctaggcctagcaatcctattacaattctataaacttaagcctggtttgctagctacatttattagcaaatgtggtgactcattctgattgagtcatagaaaatagtacataaagcctttgcctttatgtactaatgactgtgactaatgacagtgactctccctaatgacaccaaaattgtacagttgacccttgaacaacatgggggttagagacaccaccctgctatgcagttgaaaaatttcatataacttttgactcacccaaaacttaactactattagcctactgttgactggaagccttgccaataacatatacagtcaattaacacatcttttgtgtgatatatgtattatatgttgcattcttaaaattgtaaactagagaaaagaaagtgttattgagaaaatcataaggaaaagaaaatatactatttactattcattaggtggaagtgaatcataaagaccttcatcctcatcatcttcacattgagcctttttcccttgcctttagtcaatctctacatacctataataagctggagtgaaaaacagcctagggtattatgtctatgtg

SEQ ID NO: 35318 - DNA, 2439 bp, Homo sapiens
ggccagctttactggcaagcttgtgctttattcgtaggtctcaatgtcacctcctctgggacagaatgatacttaattttgtctcttttcctaaaaatactattcctgtcctgtgtacagagccatggtgggcatctccctgacccaggcccctacttctgtgccatgggaccctgccctcctggacataatcaggagccggttgactggaccggggtggatgccaaacccagctcacccagttggattcctttccctggggatttggaactggaatttggtgagagctcagttggccccagaattgaagatatgtaactgggagctgggttgccatctgccaccgttagctgaagatgcagaaaaagctgatctgttggaaaagaaaaccagttcacagaaagagaagaatgaagtggaggagtggagggaaaggccctgcaatccaaagagggggctgcaagagccactctccgggtcccaggccctcttggtccagttgtagttcccaccttagctctgagggaccccctggcctcttggactatatcacccattcctgtttaggcagagtgggcttctgttatcaccaaacaagccttagctaaggccacacagaagagatcttggagatggtctggtcaatctcttccatttacaggtgaggggtttgaggtccagaggtgtgtggcgaggcgccctccgctgtggccaggccaggactacagcccaggttttctggctcccggcccagcactttgctccctttgccctgtggccctctggggccagcaactcttttagagatagcaggtgagataggaggagctcagaggtcacagccagccggatccagatacaaattggtggatgctgcagacacgttacttagcctctctgagactcagcatattcctccagaatgtaggggtgataacatctagttaataggagtgttgtgagaattaaatgagtatatatggaggaattagattttttaaaaactgttgtgttgacagtaaccatgaggtcagagttgcctttcctggatcaaaggccttccattcacagacccagttttctgacacattgactaacacttatcatgtcgaggcctgcaatgaaatgaattttgatctaccttaaaaaataaacaaatgacttacagttattttgagaggaggtaggaaataaaataataggaaaacgtgagtgggtggggatcaggactggctattctagaggacaggggtgggtcccttgtaacacagcatctcactcctgtcaacctggtggccaatgacaacagagtgaggggcagttggctcaccccagccctcccataggtaacaggtgcggcagccccaggccttgacgcatgtggtcatcagagaaacatgagggtgagtcatctgggagcaattaagaggggaggcccaggaggaggccagactgtgtcatccatcccatcactgccacagcactggcccagtgcccactcacaacattccttctcctgggtcacaggccacaggccagcccagaaggtggctgaggatgggctcaggcatccaacacttctgactggggcccagatccatctctcttaaactcagcagctctgaggatcccccaattccatggcaacgggctgcctacccaccttcccaaggggtgctactctgacttgccacagtctagtctcagcaaactgaagctgtcctttaaaaacataaattagaacatgtcactcttcagctcagaactttccagtgttttcccacttctctcagagcaaaatgcaaagtcaatggttcacaaagccctacaggatccgccctgctgccttccccatccctaaccctgtacagtatttcacttgcactttctagccatgctggtttctttgtttttcttcaaacacaacacataccctcttgcctcagggcctctgcacttgcaaaccctaccccctctcaccaccctgccaccaccatcactagaattctcagccttccagtcggccagctccctcgcctcaaagttaccttctcagtggcccccagtcccagcattccttatctctcttactgtctgctttatttttctctccagcactcttgtcaccaactcacataccatacagtttacttatttgtttattgtctgtctttttctacgagaatctaagctttttgagtgtggagattttgtttctgtcactgccatatcccagggcccagaacagtgccaggcactagcaggggatcgataagcacctgtcgaaaggccacgtggacatcaagagacttaccatctactgggcactgagggttctgggctaagagcttttctaatattatttatttcatttttttttcttttgagacagagtcttgctctgtcccccaggctggagtacagtggcgtgatctccgc

SEQ ID NO: 35319 - DNA, 1096 bp, Homo sapiens
ctgagaagggcttggtgcaggtagtgaggctttaggcttcctcttcagctgcccacgggcctctgtcggagggccagatttcgtgttgatcagggaaggctcagcccctgcctgtgtgtgagagccaggcctgtcatggacagggctgttggagaaaacgctccccgttcacttagggagcagcaggctgcacctctcaaaagcaggcagagagccaatttgacatcagaggtacagcgctgagcccgggcaagaagccatttccccttgacacttctcaggcacttggaccaggaaggctgttaaaacaaaaacaaaacctactctcatttaggttattaatgcctgggagccctgacactcattttattaccaggagccacctttggtcttgacattcactaaggagtgggcctggaataaaaccagaaatccccattctcagtctgccccaagccctccaattccgagggcgctgtatgtataagctcgggcaggcaaaagtcgactgtgagaacacgccagcagagggcgctgtggccccatcagtccctgcccactgaactctccagaaggaaaagcggcaaggatgcaaacaagaaaatcagaccagactgggagtctagaccctgcgtcccacgcggtcccaccatggcttcctctttggaattttcagggggacccaggaagactgacaccgctgatctgtgcctacaggaaagccagtggcccctcacagagggatcagttccaaaaggacaccccaaatccgtattcggaactcacaataaagggacttccattcattcctttatttacttaactagcatttgttgagtacctgcaatgggccaggtacagggctggacgaggtgttttttccataaaatgatgctgtgacaatggttagattccaagtttgctgccccaccccgccccgccaaaaaaaaactgttttatatctttaatggaatgagactattttctgttttagggtcagagaaaaggaataggggaaggacagtgtggagaagagagagaaaggaagggagacaagtaggagcgagaggactggagagaaaaagaagctgggttt

SEQ ID NO: 35320 - DNA, 3981 bp, Homo sapiens
ggttaagccattgctggggcaggagagtgggtaggtttgtagtagttcatgatactatcctgtctacttttgtgtatgttcgagtctccaaagttaataaagctaaaacaaagatatatatagatcaaaaaatatatatgatgtataacaaagtatttctccagagaaacaaatataaacaaaatggaacagattgagaatccataattatgtaagaacaagatctttctcatctcagccagtttttccataactaggttttttggcaatgtgtgtttcacaagctgggactctcaactcctaatccagaaaattaagcagaaacttacagattactaaaacccaaggagaaagagttggatgcagaaaaatttatggaagattctgggtcagaaatgagcaagtgttcacaccagaaggtcctctactgaaggcatgagccaggctgcagacgtgctggtgactgaattggatatgaaaatagcatatctgtctggcatcctccttcctcacagaattggatggcagatccctggttctcaggaccattgaacattaaaaccacctgggggctgggcacagtggcgcacacctgtgatcccagcaccttgggaggccgaggcgggtggatcgcttcaactcaggagtttgagaccagcctgggcaagatggggaaactccatctctacaaaacaaacaaacaaacaaacaaacaaacaaacatcccacctgaggagctctgaaaacatacagatgcccaggcccatcctggaccaattagattgagatctctgcaggagggaggcctggggtttcagtggtttcaaatgctcctcgggtgattctaacctgcagccagagttgagacttgtggtgttaggacaggcaagattgggatttaagctggtgtgcccatatttaaaaacagctgggtgaacgagctgggaaatggtggcagccatggctgccaactcaatgacaaattgagttgataggtgagacactgggtgtcacctttaatctgtttgctgtgagtcacctgaggtcatttggagccactgtgtccaacctgagtcacttctctctgggactctggggtgtggctaagatcctagtaggccgaaggttggctgctttggactgagctgtgggcttctatgctgcaggctttggcaagcgcatatcaagtacaagcgtaaacagctggtcagcagaagacacagtctggataaagctggggagggaagagttgtggagtgcacgaagattggcctcctgcttcatgctgggctgtgagtcaacccaaagtaacactcagcagctgaacaggcagtgccaagcccagattccatctccacagcaatgagattcctcccccagcatccgtgtctagcgctgaatagtgtgactttcatccctgccacagcagaaagtcaaactggctaattggcagggaacagagagatttaaagcaaacgcgtcaggagccactgatccccgacgactgtggggaggggagacacgtagtttctaagcaatcgcgacacgttatgggaaactgtgattcaagtttcccaaattctattctcaggtattagctgtggcacagagcaaggcccccttccctgcaacttccttgccactcaggtcggtgggagggacagctcgaagctaggatgagtgttgcttaaccttttgcctgtccaacaggagccaatcacttccaggacatcttgatccagagggaaggcacctgcccccaacacggggtttgtggctgagctggccttgcgtcatgcccgcctgctccaggtgtgacttgcactttgaccttctctttgcctgagccccaccagtttacctgttctgaccactgaccagctcagcactgctcacagtgccccagcattggggtccctcttgcttggcctctttcagaaacttcccttctcaggcggccttttcaggtgtggcctgggacctctgcctctctgcctctggccccagaggtcccggcctcacttatctgctgccagaaaatgagaaggcaaggctctgtaaccaatcaatcggccagccggccaaggaaatattgaagactcataaagagctttgagagagacgtatttgggaagcgctatctgtaggaggcggagtgctctgggtgtgagggggagatgcaggggctatggactcaggactgattcttgaaggaggtggggctaggatgaggtgagaaggatgagcatattaatttggtggtgagaagaggtgggacagggtggctgagtgtgtggggaccagagaagaggcaggagtgagtgcgtgctgagaacactcgtgggtggggtgatacccccaaatacttaaccatgggccctgacccaccagaatctgtgccaggtaggacccttagctgctaggttgtggggacacctggccagtcctgggaaaggaccaggagaatgatgggcaggtggccactgggtcggaggtgggggcagctcagggcagcagctgtttaccaaccagtatggaagtggttcaatattttattaactataaaggaccctaaagagtgtgcagtaacagaatcctcaccatgcccgtgggatggggcagcgacatggccgcaacaccccaccatgagatgtgagctcagcactcagacactctgaggggatgagctgtgtacttgtctgcaggaggacacagtcatgagtcagaagctgctgttttccttccttggaaaggaaggtacgttccagcatagtgcagggggcccctcaggccaccccaggcttaggggaagctgagctgcctctatccttgcccagccattcccagcttccccctctgcagccctggccccacctgggcgtggctcccacagcggtgtgggatagagaggctctcaggctcccctgtgagtctgactccaattcctgttggtcttgtaaagtcagaagaaatcccagtgatgacaagagtataaaacaagacttgtcaaacttcattttgagccaggaaaatcacaggattgtcatcgggacaggggttgttgttgtgacctctgtagttggtctggctgctgcatagtcgctctcgctgaaagccacaagactttgctggaaggaaagccttcctccctcgatatggagggctccgagcttcacaggcaaccgcaaggatctggcatgtgtcacacagcaatgcttcgacaggccaggaatcccaccttcagggacccccaacagaagaagaatcccaagtgctgacactgtagagcagacgtcagctgcaagctcagcacagccactgcagtgagaggtcttggtggaagcgacagagctgacctggctgactcgtgcaggcaatggacatggggaaatatgtgcagaacttatcagtcggaaggctggagaaccgcatggggaaaatgggcaggtatcaaggcggctggcagcaggagatgcaggcgaggccaagctgtggccaggctgtggtgaggataccgtggccgggactgctgccacaggacacaggatgctactctcacagatggtctcctggcctagctgccatggccaaaaataagttctcttctgttcctgcaccctagccttcaaagccccactgggctgggcaggataggaaggctgtgacctctgcaggggtgggggacaagagggacacctggttccttccattccttccatttccagaggggctgatggattcctgccaagagtcaccggggaatcctcccaaatagaatggatgctggaagctggaccgccaaaacaaacagaacaatagcaacaaatgcccattatatattggggaagcaattgtgtcgatggaaacaatagaacgagctagttttgtctttaaacctaggaaataaggccaggcatggtggctcatgcctgtaatcccagcactatagggggctgaggagggtggatcacttgaggtcag

SEQ ID NO: 35321 - DNA, 3336 bp, Homo sapiens
gacagagagggtggggtgactgcatcagaggtctggtcaggacttgagagatacagtgaaatttgattgtggctggtggatgaagtaaggtttgatagaaatagaatggcccatgcatgtcctctggggacccacggacaccctgaaattgtatgcaaaatgttgcgtgtgtgttcatgtactttttctggaacaaggtgacagcctttattgaatcctcaaacaaaaacaagcactgctctagaataatatttcctaaacacactcatcacccgacaccccaaggcttgacaggatgctctaaagtatccatttctgtcctcatccgttcacatgcagcatttaatcccacttcccagccttctgccctcttctcctgtctcctctccatgcttaacacgccagccccagatgctcctccttgccacccagggcctgagtcatacatccatctgctgagctaaatatctctacttggatgtttaaaaggcacctcagcctgaattcattccaactagaactcttgattcacacccccacggaaaaaccccattcctcccccgggctcatctagctcagttcacggcatttctctttctgtaaagccggggaagtgtgcagtggtgaagtgctgggtccaaattccagcttttccatttgctaatggtgggactttatgcaaactgattcaactctctgggcctcgattgcctcttctgtaaaatgtgggaagaactaattcctaattcataggagtgttatgaaatctagacaggttaaactatgtgaagggtttagaggagcgcctggctaaccgtattagccactgtcattctttttcttccagttgctcaggacaaatcctaagaatgatgcttatttctctctttccctcatgcaccacacccaagctcatcagcaattcctgtccattccaccttcagatacagatcacaaatctgacctcctctccccatctctgttgctaccctactcgcctgggccgcatggtcacttgtggtggtctcctaactgctccccttgtgtctaccatggccatcatccccacaccagctctccaggtggcagccagagtgatcttacaaaaccgtaggtcaggtcattgccccctgtcagactcaagcccatcacagcccttgctatgctgacaggcccatcccaccccagcccgctccccccaccacctgcccccctccgccacctcacctgtgccttctgcacgcctctcccaccactccccctccctccctttactctggccactctgaatgtcactggtcctccttgagccctcctgagccctctgcccagagtaatgccagagtggaggccacagctgaaggcagaggctgttggcctggggtggagaggggagattcctctgggtggaaggtgacattgggcagccttggatgaagtgaatacctggtgtggggaagcaaaaataaatagagaaacaaacggattaattttgcttctttccagggacttgattttctacaagtgctgctccaagaggcttctacacccccgcagggaggcaagcaccgttttgaggtggccgggctggcgaggaggtgcagaccccagccagctggaggggctctgccctgatggcgttcccactcccacctcattcgcagggcgccggggagggctgcaggtgttctattcccacccggcttgcagcgcaaggaggggaatcgcctgacaccttccccttctcctctgccccgcttcctttctctgctcccacaggtggaagtcaccagcggaaacaacccttcactgtatggagggctgggagagaggggccaagagggccccgggagagccactgggcggcaggcaaggggcggggcagtctcccttccggcttccgggaccgaagggtgaagggcaaggggagctcagggaatgaacgagtgctcccgactaatgtttaacccacgactccgagactccgactggtcacagtcctgcagacctccaggtcctgcacaggcgacgcagcgctccactggcccggaatgcgcaccccgggggaaatggaaagtgccattgaaatgtcagatgtcaccgtcttcatcagcactcttggaattttggccaaagtggcttcttcttttgctgagacttgactcactcccggcagagggatgatagcggccttgccccgagcgtttatccggctgcaggcgtcattcttggtcgcctgtgtgtccagagccccagcgcaggaagggagcgcaattcccaccgcgcccgctgggtggcgctagcgccgcaccgtgtcccgggatgaggggaaaccgcgctgcccagtcagtaccccgacgcccccgcgcccccgccgggccccgcgcgctgcagccaccgcctcttctcggcttcctcttgctttacagtaactctcctcctggggaaaaggcttttcacggagcaggctcggagcctacggggctggcctcggactggatgggggtaaggacgggtggcggcgctcgcgccgagcgaacggagggctcaggcggccggtgatcagggacgggctgcggccgccgtctggggtgagaggcccacccagagctctgggccagggctcgcggctctcgtgcagatgctgggccgggaggtgtggggagggggcttcccaggcggggcaaccggaggggaatggggtgtgcaggagggaggggaggcgtggagcgcccggcctgcaggcactgggcggcgctctccagcctcctcttctcccgccgggtgcctggtggcttggcctcccctccagagcttcgcatatcctggcgggagccggcgctctctctccatacttaggacttgacccttattccacacccgggcagggaatcatttgcccaatccgaatttgattttctgcttgtgagaggagaaactggtgacagtgtcgcatggacactgtcggggaagccgagacgtagacctggaagcctgtaccagaggccttgtggacagctttggagcatgcatcttaaggcacaccaccggtttctgctgctttggcacagccacgcagcacctaggatgcttctctgcacgcagcagaggcctaatccgtgcaccctctgacggtgttggagggagctggggagcaacatcagattaatagcccctgggctatttgtatgacgtgcagatttcaccctctcattcttaaagggtgaaaggctgcaattcagaaaggcgaagatggggcccaggaatctgcaatctgcgtggggttttttttttttttatgaagtcttgttctgtcgctcaggttggggtgcagtg

SEQ ID NO: 35322 - DNA, 583 bp, Homo sapiens
gtgttcatattctccacaactacatagaacatctttgggcttaaaaactatatcttaaccttttctgactctccacagaatctatatacagggatagactcataattaagtactcaacaaatatgcgattaatagtattgatgcttttcaccctcagagccttttctaagaagaaataagtccatttcaaaacatgtgtcctctttattttcttcacccttttccctctctaatagaattctctatctctaaaataccacagcaattttttggttctgagtgctgataagcaatacccacgtgcttggttagcttaaaggtcagatggcatcctggccagaggccaaggaatacagctggtgaaaattcaagctgtcacacacttgttgctagcctgaatttctagttccttcatcatgaattattagattgtttatcataacgatttgctgcatgaacaatcatttttaaagccataatccccaaccgggagagatgtcatgacttgatgggctaaatttaggactatgagaatcctgctgcaggactggctgccatgcatcatctgtgggccttcatctgt

SEQ ID NO: 35323 - DNA, 1480 bp, Homo sapiens
catttttatttcaaaataaccccatatacatttatagcaattctaggaccttcacagctacccataatcaatcccctacagaaacatgcaccctgccaagaaactccaccccactcctacatgttagcaacctgtcactcctcagcaacatccagttctgttgaaagacacttcttcaaattcatcgtgagctgaagatgaaattacttaagcaaaaataccatatattataaaaatagttctttacaaaatagtcaccagttaaaaaaatcaaagcatcttataggattgactgccaagcaccactggaggcaagcgctattagaactggtttgacccgactcattgcctcctggtctatgccaggccagttgcagctgttaggcataagagtgattctttctggtggcacacagcttgccctcttcaaataaaccctctgggcatacctccccagccccctggagtgcttctggggccacattctggaacttccaggcagccccaatggccaatggtcagtgcaatccccttcaccaacctccagaaaggtaactttgggttcagaagtctatggcctgctggtgctcccaaatctctcatagtgcttgcgttctggcctgtatgattatggcttcctcaccctactggcagagggcacagaggaggccttggtacaaaggccaagctgggcacagggcacttagtgactatgtatcactcattgttgagtcatgttctttcactttacatagcctctgagttggccaccacctcggatcctctaccttcaacccactgctgtgactcagtcaaggaaaaagccctaccaaggaatccccggaagaatccactatggcaattcacaaatgctcctcgtataccctaagtggttcacggtagggcaatggaagcatgcagtgcagggacaaggaaccaaggctgtgaccaatcccatttaagtatcgtatctttaactaatttctgatgtttggaggtcccactggcctcaagaatgttgcagttcttgagtcctgtgtgccaggaaccactgatagatgtgcagttgtagctttaaccaacagcagccaccatccaggagccaccatccaggatgtttctttttttgactgaggcaaataaagccttggctctgtggggttgcataaggatcacctaggatgctttttcaaaatgcagactcctgggagtcacccttgcctcaatcttctaggttcaataggtccagggtaggacctgagaacaacaggttccacaagtgaatctgatgatggtggatttggggaaaaagccctagatagtaacctttgtcttcttgtcttttcactgtacacaatcccccttccaacttgttttaattacctggagctttaattatcacctatatgccaatgacttccaagtctctatacctatagtcctaacctctctcttgaatgctaggtttaaatttccatca

SEQ ID NO: 35324 - DNA, 1001 bp, Homo sapiens
cagctacttgggaggctgaggcaggagaattgcttgaacctgggagctggaggttacagtgacccaagatggtgccacagcactccagcctgggcgacagagtgagactctgtctcaaaaatatataaataaataaaaggtgtataagataaactgcaggcgaaataagcttaagcaacctctgaactgatgactaatagttaaaacaattgcaaacaggtgaaaccagtctcattgtgtgaataatgcaaattcaaggggcaatctgggtggagatctgtgacagtaaagcacaatttcttgttaacagaaaggagtttgcttaatgttatctcttgtgatctaaaggccttggatattcaacatgtgtctatttttcaactgaactggacttatttattttctttctttctttctttttaaatactcctatgacttcatttctttcaccccataagctcttgagaccatccacaaaggtcagcagagagtaatgtctgagctctctgggatatcccatacatcaaaaggccatatctttactcggctaaggagtgcagagctgagacgtgtcagagtaccacctcctctcagccagcaaggcaaactgccaccatggagtcatgcatactactgcattcgccataggattgatttatttcattattgtttatggatctctgtaggcaaatgtatccaatcatgaacacagggaaaaaaagacacattattccttttgacagtaggatgcaacaatgtcaataattgttaggtaattattgtcaacatattagacaatgccagccggtttaatgtgcaatcatatgctttacctcttgaaatgacaactgtgcagtaagttgttacctgtgtttaacaaaatactaccaagaataatctgaaactaatacatttacttaaacatggatacttagagatgttaaaaaaaatagtagagcaagtaaggttttcctgagcttcaaagaacaaacttgagatcc

SEQ ID NO: 35325 - DNA, 767 bp, Homo sapiens
atgccactgttttttgttttttttttttaattttttattttgagacagagtcttgctctgtcacccaggctggagtgcagtggtgtgatctcagctcactgtaacctcggcctcccgaattcaagcaattctcatgcctcagcctcccaagtagctgggattacagaattgtgccaccatgcccagctaattttggtatttttagtagagacagggtttcaccatgttggccaggctggtctcaaattcctgacctcaggtgatctgcttgcctcggcctctcaaagtgctgggattacaggcatgagccaccatgcctggccatatgccactttcaacaatggatagatcattcagacaaaaaatcaataaggaaacagtagacttgaataatgctataaaccaaatggacctaacagacacacatggaacattccactcaacagcagcagatttcacatttttctcaagagcaatggaatattctctaggatagatcatatattaggccatagcacaagtcttaacaaattaaagaagattgaaatcacatcaagtatctttcctgaaatcaataatatagaactataaattaataacaaggaaaattggaaaattcacaaatagtattaatagaaattaaacaacatgctcttgaacaaccagtgggtcaaagaagatttaaaaaactgtcttcaaaccaacagaaatagaaacataacataccaaacatgggatgcaacaaaagcagttctaacagaggaatt

SEQ ID NO: 35326 - DNA, 2778 bp, Homo sapiens
catgtcatcacattccatttcctattttaatggaaaaagctaactgtataaatgagggtcatactagagatagcagtaatatacattggctgaaggtcataaacacctatcatttaagcgtttcattatgaactttcctaaaaatcatatttaatctaaccttcgtgcttttatccaaaagctcatccctactcctgttcacctacccatatttgtattacttgggattctcagattcaacctaatcacttaagtttttgttttttagggaggttatttatgataagacacaagattcactcacagatttgaagctgaacagttaagccttgaaaaagtcctctggcccttggccattggggcttgcttaccatcccctgcctttgaatttctgcctgttggcatcatcctctcagaccagctttgaagacatagctgccttgggcacacatccttgcagctctctgactagagaaaaaaggaatatctttcttccgcttgagtctgaaaatgagtggtaaaaagacactgaatgacctgggcgggactttgtgcctatctagagaccagtcaatgtgcccagaagaaagaagaacactgattaactcaacttgagcatgtgccatacctctgaagtacttcatgattagtagcccccacatggttttaaggagcatttgccagaaaaaaaaaaatgcctgttctgtacagacaaaaggttgaatgcccctctataggccaccgcacctggcctcaggtgctttttgagtggactgaacttcacgatcattacctcacatcctcacatcacaggtcaaatcctgtctcctttcttgatgacttcattcattatgagaaaaggttcatggagcgcctaccatgtggtaggcattgctaggttctggagacatccatttactcattcagtcagtcagcaatttttattcagagctttctgtgccaagtactatgctaagttgctgggggacacagcagtgaggaagacagatgagatctctgccctctcagaacttgtgtcatgtcggccaggcgtgatggctcatgcctgtaatcccaacactttgggaggctgaggagagtagatcacctgaggctgggagcttgaaactagcctggccaacatggcgaaaccctatctctactaaaaatacaaaaaattagctgaatgtggttgcacatgcctgtaattccagctactcaggaggccgaggctggagaactgcttgaacctgggagacagaggttgcaggaagccaagatcacaccactgcacaccagcctgggcaacagagcgagactctgcatcaaaaaaaaaaaaaaaaaaaaaaaaaaagcaaaatttatgtggggacaacagttaataaacaagtagataaatgaaacaattacagattgtgagaagaaatgaagagatgaaaagcgtaccttattcagagaatgatgagggtgggcatgggggagggtgtctgcttgggtggtgaaggccaggctctctgaagagctgatactggaaaacttaaccaacccatgtgtcctccttttgaagccctcacaggccttggcatagaggctgagcacatgaagatctgctaaagtgaatgggaaactagggaaatgaaaataaatatctagcttagtgtaaaagtaaggaaatattttttgaaaattgaaacctgttgggtaaaggtcatgctctcttagagcttttgaaaaaaaacacatcatttaacagtcattaagaaaaaatgtgtgaccacaggaactgcagagttcataggtttcaatacatatttcaaaacaagcctcagaaataacaatccaatgtgtcattgctatacaactccttgaaaaataaatccacaacaaaaggaaaaaaataagactattttgcagtccagatatctaagtattaaagaacttataggagcctctgaaaatccagtaggcatgtttatgtctttatgatgatcttctcccctggataaatttgtttttagaaagaactaaaaacttctattttgagattgctctgtacacatgcatgatatttgaccatgtagagtcatgaacatgctctgtctatacattcacatacataaagacagggggatgtggaaaggatatggatttagtcagatagaattgggtcccaattctggttccagtacttttttttttttttgaaacgcagcttcactctgtcatccaggctgtattgcaatggtgtgatctcagctcactgcaacacccgcctcccaggttcaagcgattctcctgcctcagcctcctgagtagctggaattgcaggcacccactgccacacctggctaatttttgtatttttagcagagacggggttcaccatgttggccaggctggtcttgaactcctgacctcaggtgatccaccagccccagcctcccaaactgctgggattacaggcatgagccaccgcgcccggcctggttccaccacttattagctgtgtgattttgaacaagttatttgacttttccaggcctcatttctcatctgtgaaatagaggtaataataacttcacagggttttctgaagttttcattaaatcagatgtgttgaatgctaggtagatgtattgaatgtgaaacagaggcaaaccctaatgaatggtatttattcatttatttaagatttacttatttactaggcctggacaagacataatctcatttctattactcttacagtctatgaaagagaaaattcagaatatttcg

SEQ ID NO: 35327 - DNA, 3435 bp, Homo sapiens
gcctagagaaagaactgcagatcatcaaataattatccatttccaaatggtctaatgacagcagatacaaaggcggctcacttaaaaccttccgttaacagtcacactgcatcaaatggtgctagctttaagtaggccacccatttagtagactctgaaacaacacctttccgcccaatttctgtcatttgctccttaagtcaagggtagtaccctgcgtaacatcttacaaaggcctacttctaacacttcccgaatcttaatgtgtgaggatgttgatcaccataatttatgaccttatctaagacagtggggtgactctccacattgggagccccctcatttgtcctcagtgacttctaaaaacaccgctggcgtgggctggatatttgatcttggggccaagtgcttccagactttgttctctggccttaaaggtgaagagcccggcgctgaaggccacagacatcacggcggatttcacagagggccgcgttccgggagcgggtggccaggcggtggcggacgccccacctgtccatcctcctaccccttcccccccccgttgtttggccggtgggagcccctcctttcagcaggcgccgggcggtggggttgcggatggctgcgcgcgctgcgggcaccgatcaccggcggcagttgggctccgcggggccgaaaagctgcgggcgggaagcgcgaggttaagaccctgacggctgcagctctcagagcccccgcgagcgcgctccgttggtgcgcgcgcgcgcgcggctccgccccgcccgcttggcgcgcgcccccgccaggtccgctctcgtcccccacccctggcgcggacggggtggttccagctcactctcctcccccgagcggcagcggcggcggcggcggcggctgctgcgggcgctgaatgagagacggtgactgttcgggtcgacgagtgctactctaggcggcggcggccgtggcggtgaagcgtgaggccggcatcgtctttccgtcctctgaggcgacggccgcggctgcacaggtcggtgggctcaggccgcggggcggtgcgggggagggagggagggagggtgggtacgcggcgccccccgggcggcgcggggaatggcggcggcggcgctgcggagtgtggctctcccggccgcgggccccggggctgctcgccctgcgcgcagggagggggctgcggagctggggctgaggctgagggagaagggcgctgggcggcgcgcctccctcggccgcgggttctcagagtcggagcggccgtggggtccccgctcgggggcgccgtcctgaagccgggggcgctgcgaccccttgaacccgcctcgctctccctcttgggtggcggaagcccccagcctccgcccgctctgttctggcgcccagcggcgcctcagtcttccttcaggtgagcccgatcccggacctcggagccaggaccagcagaagccgggccacaccccctcccctggccctggcggctgcgcccagaagcctggccgcagagttggccgcccgcgaacccgcggagtcgcggtcagggtgacctgttgcagagcggcccgcagcccgagcggcccccgccagccccggccccggaggggctgcgtcctgtgctggcctcgggccgggcgcgcgggccgggtgtggggcaggggccgcagccccaggtcggcttgctctacggcctggaaccgggctctagaaaaaaaaggagattccgaacgtatctcatcaaacacttgcaaagccgggagatctgtctgcaaatatccggaattccattgcagtatcggattaggtaggctcataaacaccgtgcttttgaggtgatttggaagaaacgcgagccacgagcgaggaactagtttctggaaaatagccgtaaacctgtgcggagcgaattattaaccccccgccccagctcccccctcgaagctcttttcctgtagctgtgtgttgtgtagacgcaagccagtttcagtgtacgtgggcgtgtttgggaagaagctgcgagctgataggaggtacctagtacaaatgttaatttgtttgagttgggaggggtaagggaggaggaagaaagggcactgatgttagctgtggaggaggggcaattgaaatactaaatttctgttaaaaaaaaaaaaccccaaaagaaatatctaatgcctactgtgtatttaagaccataaagtggaatcacacaagcagcagttaattgagctttatcgtttatgctccctggattttttttccccaacactttagttgctatagagagccttttcttaccagtgttcatgagttgacttgggtatttttctgtgtccaccattagatcgattcctgttcaagtttctttgaagatgaccatcagaattttaggaaacttttcagcccgtgtttgcagagtatcgctgttagacagatcatagcttgctcattataaagcctgttccactcaagatcattatgcttgtacaagtgctatagaacaagtgctatagaatcatacacataagtgtattactcttacggctaaatatcttaatttagaattatgaggaaacttccaaaactgagcatccaaacagtattattttaacaaagataacctctaactcaagctttgtaggcatgaagtttatcatgtagcttcaaaggtcttttgaggcagatctaaatatcaaaatgtaagggcattaatgccatttgggataaacaatttcagtgtatttattttaagcgtagttcattttttctttttaaaattcagcataatttttgaacggtaagatgtgcgtttttcccattatattccacttttttttttttccttttaagataggttctccttatttggctcaggctggtctcagactcctgagctcaagcgatcctcccgtgtcaggctcccaagaagctgggactacaggcatgcgccactgtgcgttatttcacttttcattgaattaaggaatttgacttttagtaatactttggggcaggactctggaaatactgtttagtttgcctaaattttttcagattgcaacgtaagtttgaagataatgcttgcattggcagaacacaacgtgcttttctaatatttattagtaatactagaaagaatacaacaaattttcctgagagaaaacataactgaaaaactggctttgtgagtcagatacatatgtgagtaatatatttttgtgtgtgtttttaaatacctggtacgagtctttttattacgtcattagagttcagtgtagtgaatgatggatatataggtgaaattgtcctgttgcaacttaaaacacttaagctttttccagagactcagttcattctgcacatgtgtattgggtacctacttggtgccagttagttccctagaggttggggacacaacag

SEQ ID NO: 35328 - DNA, 492 bp, Homo sapiens
ggcatttttaaatgttttcttgtaagcacagtacttgagagtgttatcataaaagtattgttgttcatgtcttcttggtcagagacagtcttatatgtgaaaccacagtaaataacataaaacaatatgttgttttgtgtcagattgaagagcattagcaggtcacagaagaagaggctcagtgaggacaggagtggtccttaaggaatgtgtttcatttatgtggaaagaacatactgattgttgaaacagcatgactcaagatgtggcaaccagaactaggtgttgttggcacgatttggattgaagggtttgtttgggatgtggcgggaaatacagtacctttgatgaggtgggactaaatattcagcccttagaaatgaagcaggggaaattagaattgaaatgatagtacatattgttattcactaacttagcgtgtcactctgtttcctttcttcaagagatccaaaaggtgacagatagaactca

SEQ ID NO: 35329 - DNA, 2145 bp, Homo sapiens
cattttataaaggaggaaaatccttgagaagctaaatcactcaaatgggattcaaaccttctactcctaacttttctagacctatgatttttaccctagtcatgtcataaccacagaggagtcttaagtttatgtttcttgtttttcgctgccttttcctggtttatgtcccttttcattgaccggttacttaattatgcaaaagtatttatggataatttttggtagaatttgtgtccacgttctgccagatcatttttttacatctcagactcttctgcggcaatttctttccttctgtatgtattctgtcagctgatagttatatatctaacctatgattatggacccctcccgaaaacaaaggtcatgtcaatgaaatataactcttatgctgtcgtcatgaagactactgctactttcactttctaaaaccatgttccttttttggtatttttcaattgaatagtgtcttcaaaatgggtagataatgaaaataaggcaaatatagatggagtatggagaattattattattttactaacaagagagggaatgaaaacaaaagatagggaggacataacaatctgtatttctatcgaggccttcttttgctgactgatagccaaagcacacatgggtattttttttagctttttatgttttcataccttgctttctgacatatatagaaaatttagaaacagtcatctattttatttttaaaaatagacttttactatgtaggagttacctataccaaaaaccaataaaacatttattatatctccagattcgtggaatttagatatgggttattttaaaaactagggacaagaaataaaagccatcatcctcctgggcacatgcatatcatttttcctatatatttaatttaacttaccactgctaaagtccattcattttaatactagaatggaaactctgagatcataaaattattttacttaaataatatttactatgaaataaactaccaaaacaaggaaaatgcaggaagtaatataaaactctaaaacaaatagaattttatgagcaatattctgattgaacagcttgtattaataccagacacagatttttataaaacagctaaaagcgcatcatccaagactgctgttaggactttgcatcagtgttgtcattgaagaacaaaaaacaccaaaatgctaatctaaattaaaacaaaaacagcttccttgtgtgtattctgccttggctcattgtggttcctataagattaaatcataagataaatcactgtttaccataagagaaagtggtctaaattagcatttaaaggaggcaactaaaagtttagtttttaaataaatataatttttttttaataaatacaaaagtattggcttcactgtcacttaaagcagggcaaggagccacatttcttaagtagtagactagctacgtcaggagtaaagaactggttttaaaaatacatttactgttatgttttctgaaaacattctcttatttaatattttctcacatatgttcagttttgaagcaaaagatccataaatctatgttacctcataaaactttctgtatatgttaaaattttcctaggccccaagagaatgttataaattagttatagaatacttacgtttaaatttaagtctttacttagttgtttttagaagagaaaaaaaagtcttctatgcgttgggttaattttattagtagcttttctcttcatagttgctatattgccagctagtagagagaagaaacgaaagtcaggatttgcctcctttcagatggtaaactcacagaggcatttaactggctgtgtcatgcactgaaaacagcatgaggcaatgaagttaaatttatgaagcattcaggatatgttagataaagaatttctagattgtgaaatatgttctgggaagagacttgagaacaatctaatcccctggatatatttaagaaaaggataaatagttatctgtgtaatttggggttcagattaaatgcctgccttaagacagcgtcagtaagaactgaggcttaatgaagtcctgcacttcccatagcatgcaacaacaaaaaagagagatgacagtatttcagatccactgttgcttggaaattttgtta

SEQ ID NO: 35330 - DNA, 692 bp, Homo sapiens
caagaaacttgatgttgttgtagtatgttatgtcttactgtgtaatgtgtcttaagataaaacagcctttatatataattaccaaacataagtgaaattctttcagatgcttaagacttttaaatattacattctggtgttacataatgtcatatcctcctattctacaaaatgacctctcctctctgtaaaaggtcattcttgttattaattgatgtggtgtggtttaaaaacaaacataaccctgaactgagtaaaaaacaaggaagctctgactctatgccagctatgtgaacttagacaaatcactttacctgcctctggcaaggttcttctgctatgaaataaggtggtggaagaaatgaataagtgttgagtacaactatactattgtatttcattaattgaagaaatgttaaataactcagtagctgaagaaacacaaacttaggcttaagtaacttagcttagcacttaagtactaagtagtggaactgggatttgaatctaatgccaaagcattatgccacactctctgtcattgattacctagttgctgtaagctgcttctagataaaacttttgggctttctctacatacctgtgctttcccttccttattgctgtagcttgtgctgtgtttctctttctgttaggccacactgttgatccacatcctttatttaaagtct

SEQ ID NO: 35331 - DNA, 1004 bp, Homo sapiens
actttaaagatattaaatatataaaactcaaaaaaagtcatgattctgaactgtttaatacccttacagcaaagcctgttataaaagtgttaatacagtggatttcgctttgttttttatcctaagttccacaccttcctggggtgccaattttgacagcttcctaggatttcagtgatttttaccaagtactatttttaccttcctagggtttttaacaatcttaccagaccacaagaagaagaaaaagaaccacctcgaactgctgggattgcagagtctgggtggttgaacagttgattctgggtaaggatatgaggctgggctgcaaagtccaagacgattcaaataaggggagctcccttttcatcattaaaccttgttacttcactaagacttttaaagtccacaccttttggaaaggtgtctgggttttgcaacattgaattttccccctggaatgagatgagttcacatctcacttggcagcgttacacagtccattgccctgtcatcatgatatattggtgacctgggctgttagattattaaaaacgtgtgtgtcctcattggtgttgtataataatttgtaggggccatcgtgaagtttcatcagctaagggaggaggcatggagtccgtgaagtttgtgcttctctccaggcccattgggaacacatgagggacccttctttacccagttgtcatgtgtgacccccaggctgagaaaccctgtcctaggacagtgcctacttttcccccaaacaaatctgctgactcagagttccctgcatttcttctttcctgcttacacagcagagacaaacacagatctatctttatatacagataagcaattaacagaaaaaacaaaagacctgttcataggaaatgccctacttatgaaagtcaatacacagtcaggtgtggaggctcatgcctgtaatccagcactttgggaggccaaggtgggcggatcacctgaggtcaggagttcaagaccag

SEQ ID NO: 35332 - DNA, 1137 bp, Homo sapiens
tcatcccactgcactccagcctgggtgacagagcaataccccatctccaaaacaaaaacaaaaacaaaaacaaaaaacaggaccagcaggaatagtctgctgtggattgggacccctgaatgttccagagggatttaagtgtgcggaattcagacgtcttccctgttgtggctggccttcccgcctccccagccgtctgcccgaatgagtgcttactaatgagccagagagctctgagccggcctgtgtagggcatccatgcagggctccaggggcccctctcagtgaaacaacatgactgtgaaaacaatctgctgctcttcttcttcaccctgaccttgggtcattctggcgtaaaagattactttgctcccagcctcggggaagtttttgtacaattagctacaactcggcagaaagaccctgcagagagagccctggggtcaccaactcaagcatgaaaggacactgaccccgtgtggtcatgtttggaggtgcagcacggggagagaggaaaggccccggcacggtcctttggccaaacgacccctgcaggccctccctgaccgaccttgctctgtccctgctcacttcacaagaccctggggagaggacctggccctatcagggcctgctgactcgttctcccctggcgaaatgtccccaccaggtgctctcaactctggggtatgacttcacaggccatttgagttcagatgggtaaggcgtgtaggaaatgagctcaaagggtaggatggattttgatggggtaagaagagagtgtttctcactcacccaaagcactgagcacagtgtcccaaacataatgtggagtaaacacgcgcatgcacacgtgcacttcaggtgcaggagacagcctaagcaggggcaggcaggcaggcaggtatggaatgtgcatggagggctggagagtggagctgcttttctgcggagatttcaggttaggtggagcactgagctgaattttctagaagctggattcctaagccccagttctgggctctttctctgaccacacagctgtgtagaaggaaaggggcctgagttctgccatctgggctaggagtcggtatagagccagccagttgtagcatttctgattccatctgaattcct

SEQ ID NO: 35333 - DNA, 2508 bp, Homo sapiens
ccgcaactctccagtcctgctgcttggctgcctacctacctaagaaaagcaggaaagaaaaagagaagacggggtgggggatggaggacaaatacagaaaaagaaaaaagagcgaaggaagtgagaagtgagaggccagtttatgtaagcgggcagggcggcgcggccggcaggagaccggcgccggcgccgagggagttaagcggacgggcccggtatggaagaggttaaggggggcagtccggagcgggtccggtaggggccgcctactgggcgggggcggggccgcgccgagcgagcgctgggattggccgtcgggcaggcgctacgctaggacggtaccaacagccgggggcctcggaggcgggggggtgggtgtgggactgccgctctgcgcggcgagaggtggcctgggaatggccgggccgggggtgggccggagccgctgtggcggcggcggcggctgggggcggtgagcgcggcgtggggctgcccctccccggaggcggcgggggcggccggggccgcgccgcaccgcaccgcgcgggcggccatggagcgagcctagggcccgacaggtgagtggcgcgggggcgggggagggcgcgcgacccccgcccccggcgcggcgggcgggaaaatgcggaccggcacgcgggcggggcacggtacgtagcgcgcgccgggctggggccgcctgggggcggggcgcctccctgaggggccgggcaccgggtgccctgagccgtccccgagtggctgcgggcgggtcccgggcgagggcccgaggcttcctgggagacccgctcgggccgcgtgtccctgtgtgcggtcgcggctgaagggacgcggcctcggccgccacgtccctggcccacctgaggcgcgggcccacctggggccgcctcaggctgccagaggtccttctagtgaccgtctctcgtccccttgcgcggtccccagaggcgattggccccggtgcctctcttgtgttccccggagcgcccgttgaggcagcccagggagcgcgccctcgcggggtctttgctgggcccgcctcgtggccgggaagcgcgagtgacctgcaggccggaggcggaaggcggggcaaccgtgcccggggcccgcggtctcctggggtcctgcgccgggcgctcgcagaagggcacaacttaacgaatgctgtgttagccctcagtgggctgcgcttgagatttcatttccgggtgtgacggccccgcgattaagagcggaccgatacgtttcccttaatgatgaatgtgaatagttgtcgagctgcgtccttgattgtgggttctgataagagattcattctaatctgacttctgttaacctgccagtctccggataagaagagaaggggtagaaggatggattggagggaaagtaggggtaacagggcttggttagtcttaatggaattattagtccttttaaagaccataccatcattgggatggataaggagtttctaatttgggaaaatgagagttgcttgctattgcgacttgggtctagtgccagatatcagcatcttccccacccagccagcttccctctggaggtttgatttctcacttggaagggaagtaggaatgtggggttttttttagcctttagcctttaaactgtaggactttataaatctataatctggtacaaattactattgccatttattagccacgcctatgttttttgcgttgtaaattcttgcaaaaatttcactggcgttgatttctaaaaatctggttagagatctcagtgttcttatgtattacaaacattccttgagtttatgcaggatctttgagctaagcttagagcacttcctcaaatatgattcgttatcacgactgtctgagaaactgaggtacaaatggtaaagatgctaaattatttgcccagactcatagccaatctcagggagatttaaaatcaatgtattctattaataacttttctaaagtttgcaaagatgttggactttggcctctcgaaccgtacaatggaatcagtcagcaggagtccctttcccatttgaaattacttatcaaaggagaatacaaaggcacacacaagtataattcagactctcagcctcactcatgataaagtgcagtgataaatatggatacaggtaaaagatgatcaagacatcttggagttcacagcgtttcttttctgtgtggtgaaaatgtgacattggtatgctctattcgtttctctagaactggtaggacagtagctatgttttggtgaatgaatggaaactagaaaacacatacactgcttttctttttggttcttaagattagagaaaaaacacatcactgcttctatcatctttatttttataatcttttatatcatggaagtattttatgttaaattgataattccttgacttttagttcattcccttgatttccatttgtagattccagccctttcacacagccttaaagtttctgcttcttatctctt

SEQ ID NO: 35334 - DNA, 1141 bp, Homo sapiens
tactcatttccacgtagtgtcaagattactgcgtgtgttggttttttagaacagaactcgctagcagtatgagctaaagtttttttctttttcatttttcaaggaagagggttgccctaaatcaaggtttaaatgggacaggttgcagagattgattttttttcagttcacttattgaaattattcagttattgcctatttcatttttactttcacatccagcaagaaagactaccttaatgcttcattaatgcctggtaatggttttagttgccttccttcagagggaacttgttagagaatttcatataagtgattctgagtttacagatgtaaataaatgtttaaatggaagtgaaaacagtaaggaaaacctgacacttggaccaatttggattatgtaagaattagattttctacacctgtactcttaagttactcttaaggcttatcttaagggctttagcacatgaaaagctgtcatctttaaaacacagaactaattttccaaactgaaaacagttgtgaaaggcattctattttagcctttttttgtgaagtgggataagttcatgcttcccatctgtttcagttacattgagtgtggtagaattgaactttgtagagaagggaaacaggttggccaaattagtgacagcctcccagtcttctgctttgcatgacactcactctgaagatatctatttgcctagtcttatctacctctcaaatttaggcaagaatttggctcagaaatacaagactactaattactactaaactcttagtaatgcaatgtgtggatttggcccctcactatgtaactgagaagacaacattatggtatattgattccaatgagggttttctttgtcatttttctcctctctggaggtcatctgggtttttgatatggtgataatgactagcaagtgattactgtgggtcatccaggcactaatcttagcacaacacatgtagaggtctcattcttttttttttttttttttttttttttgagacaggatcttgctctgtcacccaggctggaatgcagtggcatgatcttgattcactgcagcctcagcctcccgagtagctggctcattcatttttaacaaccctgtgagttaggtaatag

SEQ ID NO: 35335 - DNA, 2044 bp, Homo sapiens
atgcattaagctcttctgaaatctaacagccttgttccatgctcctcgctatggagaagagagcgctgagggaaagaggccctgtagtcttttgccaatggtgtcggatgggctgctcagtcccagcacttgaaagttgcaaacctagtcaagaaagtgcacacagtacttcggatttttatgagatataattacattgacatgacgcctcatgatttacccatgactcggggggtttccaaactccaaacacctccagactggagcccgtcaatcagcttcctcttgcttttcgtggactcccactgtggaaacctgctggtgttttgctgcggtttcatttccctctgcggaggagccagggcaaccttggccagacaggcacctagctgtgcccttctttccagggcctcttctccactcagctgactcccctggcctgcctaacgctcctgactgagacggttttccggcttcctctaacaggttggcgggaagttgatctgcaaacgcgaggcaaagcaggagtgtccttattcggtaggcctctgatgggccaccagagccgtccgaaagtcctagcggagtgattgacagtggccatttcaaagcctgagttcaccttctttgcaaccacaatcacgacccagaataaactgcttcctggaagccggctagttgcacctggcctgaagtcagtctcgggactgcctctcaggaccccagacagggtttcgggttcccgcctgggtcacgtgtacggaggctgccagtgcgcactcagcccggcccgccggtcgccacagcaacaccaatcccgggttcaagcccgcctaggaagtgcggtccccgcctgaccgccccgggcttaagggagcctggctaggccggcagccggatggtcccgcagctcggggccggccatgcttcgcggtccgtggcgccagctttggctctttttcctgctgctgctcccgggcgcgcctgagccccgcggcgcctccaggccgtgggagggaaccgacgagccgggctcggcctgggcctggccgggcttccagcgcctgcaggagcagctcagggcggcgggtgccctctccaagcggtactggacgctcttcagctgccaggtgtggcccgacgactgtgacgaggacgaggaggcagccacggggcccctgggtaagaccccgtccccacggtccgccgttcgctgcggagcagagtgcgatccgggcgcggctgtggtcgcctcgctcctgtccggggcgacatctgggcccgcagtcctgctctgctcagccgccggtaccggctgtgggcgggggcagcctccgcggagcagggagccccatcaccgcccttgccccacccgcgtcccctgcgcacccccctggcgcccggcttcccgtcccccgcctcccctgatccctgcgctttccagattctctcgcaccgcctgtgccatctcccagcccaccctggcgttattcgaaggtgttgctcttgacagctctagggaacgtccgctgtggacatgcctggtgactgccgtctcccttgctgcttttggacgcagggcttgaggaccgacagtgggccgagtcggggctgggagttagaatctgagttctgggtgtccctctgtccctgacaagttgtgtggcaaggttgccgcatcactgtagagcaccggatggtctcctctcggtctcacagctcctccttttccaggctggcgccttcctctgttgggccagcggtacctggacctcctgaccacgtggtactgcagcttcaaagactgctgccctagaggggattgcagaatctccaacaactttacaggttggaccccgcatggcttcaaggggctagggatctgtggggaggggaggcagtccaggggaaatggttagatgcaagggacctttcgtcatcctgcccagcctcccgacaagcaggaactgccacagtctgactgaagttttgagggagtaccaaatgcttgagtcagggaagcccctttttagcctctagctta

SEQ ID NO: 35336 - DNA, 708 bp, Homo sapiens
tgaaccaccgatgcggaagccagtccttcccacggcacggagcaaagcatggtgacccagcctcgggcctccctttcgcttccacagggatctcccttgcgctgagtgtcttcctcctccctctccccgagacaggggtctcccggcttcaggtggtgccggccacacagactctcccacccacttctcagcttggaaaacctcacctgggccgtgattgcctaacgtgacccggtgaccctgcagtctccaggcaaatgttatagcctttgtagtattttggccgtcgacctgacagcaccaccctccagctgcctgtcctttcccccagtgacccagcctgggtggactgtccgaggccatgtggttgtgggcggggtgggggggggggcctgcgggaaagccgcctgccagactcctccatgccacagcagggtggggaggtcccccaggagcctttgacaaggatgtaaaggacacattaaaaagatgtggccttaggttctagtggctctggtgtgggcctgtgcccagcctttacgagccagaggttcccccctccagccgagggctgggctgacatagtctgtgcccaggctgtccagggcagcagcctctcaacctcaagttctcaggtagtccagcgatggctgggaggagacacactgttgatattggagtctctggacttgatttctataatgagct

SEQ ID NO: 35337 - DNA, 1380 bp, Homo sapiens
aacgctggtgccagagtggtggtcctgaagatgggaggggcggcgcgtagagaggggccccaggttatgggtcagtgggtgagattaaagcctctaaagtggtggaagaaaagggactttggctatgggacaaaacaggagagattgagaagggtggagatggtgcagacacatgtgcagagatgtccctttatttactaaaggctgagtgcctgatacgcacatagcactggggttacagaaataaacaggccaagcttcctgccctatgtgatgggacctctctttacccatgtaagcaccttacagaatggagaaggccctggagtccatgcccctaggatggggtgagggagtatcactctgtggggtttcacagcaccctggatcctgccttccagcccctgccaaggtaaacagtgctgcctgcctcctgtggggaatgcaggatggggcaatgccctggcagcagggtcttgcctcagctgatgcaactgtggctgctcctgtgtgcacagatcatgtgcctggaaggccttcctgcagcaggggcagtgtcagaaagtggaagagtggtgtgagcagcttccccggggaaagcctggctgagcaactgaccttgagcaagcactgcagatggcccttgttcctgccgggctcctccagctgggagctctcagcccctggtaaattctggcagtgaaagacacattagcacctccccctacaatgaggcacctagctagacaacttggctgtccgggcttaacctgcgtggcagggaaggacgcctgcccagccttagcctctacgcaatggtggaggcagggagggagagaaccacacagctcccctcatttcccagcagcccccatggagcctagtcaacagggtgtggtcacaggctaaatgagcaaagatgtgagctaatatactggtaggtgtcatgggggctttcagagctgggtaaggagggaaagagatggagatactggttccccactccttaacctgccacctgccttccctgtcctttaccctccctcattctgctggacctgaggaaaatgcaagggaggctaggcctagtggctcatgcctgtcatcccaacactttgggagactgaggtgggagaatcacttgagcctaggagtttgagaccagcctagggaacatagtgagacctcgtctctacaaaaaaattttaaaaatagggccgggcacacctgtcatcctagcactttgggaggcgggcagatcagctgaggtcaggagtttgagaccagcctggccaacatggtgaaaccctgtctctactaaaaaaattagctgggcattgtggcatgtgcctgtaatcccagctacttgggaggctgagg

SEQ ID NO: 35338 - DNA, 647 bp, Homo sapiens
tgtttttaaaaatttctattaccatatccttttcaagagtacaagctctaacatgccaaaaagcccaaactcacaaagctagtgaatattttatttcacgtcagacataaaatctattatttcacttcaatcacgttgaatattatttcacagagtagccagtccatgcttaaaggtggtgaccagggagtcttaccttgccatctgcagtggtattgatcctgtagtgatacacacgtccctcgtacctgagcgagatggacagctgcccagggctactctcactttctcgcaccaggaagctgccattgattagactgctgagcagatactcagctgcactgcgtgacacaggtccatggtaccaggagtgtttttccaggctgttcactggggtgatgtagttgcttggcacccagccctgcccattcttagagcgaacttcactccactcaccattctggttgtaaccaaggactcgtagcttttcacctagccataaggtcatcacaggatgaaagaaacgatgttaagactttatttcaactgaagcagtgtactgtcaaactttaaactcattaaaaaaaaaaaagaatctagaacttttatgccaaattttttttttaaataatgaaaacaaacttggc

SEQ ID NO: 35339 - DNA, 1694 bp, Homo sapiens
aatattagtactttgtatatatatctatatatacattttttaatattgttgcttccttgaaaagaattggtaataacaggctatcataattaagatacagtcaaagaccccaggattttttgtttgttgttctttttttgtcagttatcaggaaaatttttctaccctggaagttttgactaccatggaaactgatagggggatgactagtatggattcaaatattggccaaactggcagagcaaccctagggagaacttttttgtttgttttgaaacaggtctccctctgtcgccacgcggcagtgcagcggtgcaaacacagctcactgtaacctcaacttctcaggctcaagtgatcctcagacctcagccccccaagtacctgggtctacaggtgcatgccactgcccctggctaatttttaaattttttgtagagacaggggtctcactacattgcctaggctggttttgaactcctaggctcacgcaatcctcctgcctcaacctcccaaagtgctgagaatacagggatgagccactgcgcttggctggtagaactttaaaaaaaaaaaattcaagcaaaatatcattttcaatcaaaaactaaagtgttgctttattttttaaatatattttcttgtcttttaaaataataaaatagctttagtatgacatcattttaaattagtgagaacctgatataaaaatttggcattctgtggattttaagagaaaccactgttggtcataagataaaggccagtcataacccataagtgaggaatcaacagtctttctttatcaatgtttccttgatgactgggctatcttgaaaaaacaacaggaaaacatacctatgaaagaatttctgagtcatcacttcacaaatttctccagtgaagaatcaataaaggtaaaatcaagtatattgtagtccaaagagactactacacaatataaactttctggctgggcgtggtggctcacgcctgtaaccccagcactttgggaggctgaagcaggtggatcacaggtcaggagttcgaggccatcctgaccaacatgggtgaaaccctgtctctactaaaaatacaaaaattaacacggcgtggtggtgcgtgcctgtaatcccagctactcaggaggctgaggcagcagaatcgcttgaacccaggaggcacagcttgcagtgagccgagactgtgccactgcactccagcctgggtgacagagcgagactctgtctcaaaaaaaaaaaaaaaaaaattctttgatgtcttttgttctatcctcaaattttacgtaaaatgttcctacaactgcataaacacaacccccacatacataacatgtatcatcctgtccccaaaactatccaaaagcaggaagtaaaactgacactaggagatgatgcacttttactttcacttttaattctgtcctatgtacaattggccagcacatgcaactaccatgaaggttagactcactatacacctattcttttgtttttgtttttttaagagacggcatctcactctgtcgcccaggctggggtgcagtggcaccatctcagctcaatgcaacctccccgtcccaagttcaagcaattatcctgcctcagcctcctgagtagctaggactacaggcacatgccgctacacacggctaatgtcttttgtattttagt

SEQ ID NO: 35340 - DNA, 1051 bp, Homo sapiens
gtacagaatcaatgcttccaatgaagtcagcagagtgctttgctaataattgacaaaaaaaggattaactcattttaaaaatccagtacgtatgagacttcttgccacaaaaagtaaaagctgtaacagcatttttctctttttctacatcagtatttctcaacttttttttcataaccattactctatggaataaaattaaatttaagtaactataattcattgatttaatttaattcaatttctccctaacaagagaaattaaatgctgaaatgataaaattctttaccgtagcattgagctttggaggatcacaaaccattgtaactatctaagttgttatcacccctgttgaaaatgcatgctctatacctatctaaaccatatacttaaaggttcaaacaggatgcatttgctcctggtagagtaggagccttttctgattatgtaaccataggtatcaacctactggattcaaagtcttctattacagataaaggaagagcacatttttctaagcagaaaaaaacaatataaacaaagacatggcggggaaaggtagtccaaattcaaggccagatcaagatgtggaaacctgggtaggctaataattaacacttcttcaaaccagtaccaaatgtgtgttcaacatttactcagggagaagcctgaagtttacattatacctctgctctggtcctgaagaattcacctttgtccctaacttggagtcttgattcagctaaaagccctgcagttaatcagaattactgacctcaagtgtcagtttggcatgtcctttggtggtctcacacactagcccaaactgcttatgaaaatatttcccaaagctacataaaataccttctctgagagtatttttagtaaaccatttcttcatcttgttacatttcctgtgaaccttcagaaaccaactccctgaagaggagctcaggtggtactttccttaatccagctcactgagttttttgcatgatgaatttggcctgattagagagatgactgtgtgtgtgcatgtgcatgtgtgcg

SEQ ID NO: 35341 - DNA, 1450 bp, Homo sapiens
gctgatcacttgaggtcaggagtttgagacctcaaagtgttggcacgcacctgtaatcccaggtactcagaaggctgacgcaggagaatcacttgaacctgggaggtggaggttgcagtgaggccagatcgtgccactgcactccagcctgggtgacagagcagagactctgtctcaaaaaaaaaaaaataaaataaaaaaaataataataataataataataattctattggttctaagcaaaaaggagaaagtagagaaatataaaagggtgcttatcccctgatcttttagtgtctttcccccatggaattcttagtttttttaaaaaaatagtattttaaaatacagactaggtcttgctatgttgcccaggctgatcctgaactcctggcctcaagcaatccttttgcttcatcctcccaaagtactaggattacaggcatgagccactatgcccagctgaaatttcttagagcactttttatttcgaaaccaggagaaaagatgagttagttatgtttttagcagaaatgggtaaggtaccaaacatagccacaatagcaataggatgtcaatgccagagagagaaaataaagagaggcaagatgttagaccaggctgacagttgttcagctagctcctttacccttttccctggtccccttgaatgggtcctctgttccctgccctgcccagaacagaaaagccaccaccagtcacttggaactggcagagaccagacttccattgccaagaatgtttcacaataataaaagcttagttaacatctgaagacttaattagaatattacaacagacaagtctgaagttacctaaatgaaataaatgagctactttcggggtaggatagtgggggaaccactgtccttaaatggatgtccttaagggagaaaatatctagctcttaattttagtctcttagcagacagatatcctagggaggttttactactgtctggcatgtcactgtcttgtaagtctaacaaatgaggatgtgagctcatgccctaggcagtgagactaaaggctgatgaaagggaatgatgaagcaaattaacaaagaagactgcatgctagactgctagacaagtagacacattcttctttttttttttttttttgaggaggggtgtacgagggctccttctgtcggccaggctggaatacagtggtacgatcttggctcactacaacctctgtctcccgggctcaagcaattctcctgcctcagcctcccaagtagctgggattacaggtgtgtgccaccacgcccggctaatttttgtatttttagtagacacgggttttcaccatgttggccaggctagtctcaactcctgacctcaagtgacccgcctgcctcggcctcccaaagtgctgggattacaagtgtgagacaccatacctggccaagtagacacattct

SEQ ID NO: 35342 - DNA, 1524 bp, Homo sapiens
tgaaattcagttcccatttcccaatcccttaggatacaacccatttccccttcactaacgacgggtttatgctcccacctctgggactgagctaatactgcccttcatccttccctctcctgaagctgccattcactttctttctgcagccgcatagtcccgtcccagagtagaggacagaccatccagggtccccaaacccacttctctttccttctccgcccccgggatctgccagccaggctagagacgcgaggggggaggggtgtgactcgcctcccaggactggaccagatggcagcggattccgcccccactctcaggcaccttccaccctccgacccctcgggcagcccgtccgccacccaccccgccccgaccccacccccggcctcccccacgctctcatgccggctcccagacacactcaccatgctgggtgaagatattgaagccggtctctgtggtgcgccccgccgggtcccgcctgcggccggagggcctggctgcactgctgccccggatcccgcggggctgaggctgctggagccccggagcttccccgacgcggcccacctgctgccccatccctgctctcgcgtactcccgcgcccccgccgacccctggtcacattcctcctcggctccggcctcgggctcctggcgctgctccggtctctccctcccagcccaggccctggccctgagtggctgggccaccggcggctccgcacccggcctcctcacggcagccgccgcgctgcctccaggcgactcacagattctgcttttccctcctcctgtcgcggctccgcgcccccaacgccgccgccgccgccgccgccaccgccgccgccatctttaaaccaccgagcgctgggaaagcgtgggacagagcgtctcccgccccccgccccccgccccccgcccgccagtcacctccgccgcggggaaggagggcttcccggctgccgccccgccctgccgcgccgcgccccccgtccccgcccccgcctcctcgcagggtgggtcccccagtgcccacctcatttgccggccaccgctgcttgaggtctttcgtcctccgcgtcctgtcgccgcacctcggcgtcccccccctcaatccgcctcagccgaccccctcccgcgttcggctccacacgctaccgcctttggggttggtcggtctccggccttccccatcccacctccacctgtcaaatgagtgagtcgagggctcagtgccaccgcgtgcgcagctcaggtgcaggcacaggtggggcagaaaagcacaaggcatttatttggtccttgccatccagttaaggagctctaaaatacccagggggatctcttttaaacacccttgtcagcagcaggcctccagtaaaaattaaaatggtataaaatttacaagaagagagtaaaatgctaccttatttgattttaatttttggagattatttcatgatgttaaatcgcactggcctggattgtgtgccttctatagtctcattggggacg

SEQ ID NO: 35343 - DNA, 1547 bp, Homo sapiens
tggctagttctacgttgttcctggatggtcagttcaaactgcaatgatccacagctccagaagcggcttcttccagtcggcctaggagccaaacgcccctgcagctccatgctaccacgcagggtgccgtttcgggcttgcagggagttgtcgcagtcccgttttggctgcacattctactgctggggtggaagtgtcaagcaagatgttgtcgccggtatcatgatgtccgggtgagaagcttccttggcaggttgccagggccagcctgcgagcactggcgccggggacccgcgcgcccgggaaggggcggggaggtgggcggagcctggcaacctggggaccaccaataggatgctcagccggaggtggccctgcgcgtgacgcagcggtgctcggaggcagggggcgtaggggccgggctgtccggcgctttagcttagcaggcgacgttgcgggccctgggcgccaggagagcttcccggagtcgaccttcctgctggctgctctgtgaccgcttcccggctctgccctcttggccgaagtgcccgctgccgggcgcgggcctcaggtaacggtggtgctcccgcgcctctcctcgcttcccgcttgggtccaccggcctcagcccgcggggaagggagaagcggtggcggcagcagctccggcccggccttgtcctgggctgtgctgcggagaaggcgaggctcggcgactgcaggggagttggggaggggagggcgggaaagttaccgtcaggcgcccgggtcacgggcagccttttaaaccctgcacgctggtttggtgttccgcaaatctcgtggcatctctcaagtcagtagtaaagaaagttaggaattagaagacgttttattctttaaaaagcgaaaccaaaaatgcactcaggaagtcagctttttaatgatttagagaaaatgtgtgaagggaaggatggtattagcaagacatgaaaatctgtaggggcaccagaacctttaatcaagctcatgttttattgtaaaatattaggatgtaggtaagtttctgttttccctaagtgttaatggtcatgtaatttaaataatatgtatattgaaaggttatttctaagtgagaaacaactatataaactttattctccgtatatatatttaggttaagttcgttggtcacttttgtttgtttgagacggagtctcgctgtgtcgcaaggctggagtgcagtggcgcaatctcggctcactgcaacctctgcctcccgggttcaagcgattcttgtgcctcagcctcctgagtagctgggattacaggcgtgcgccaccacgcccaggtaatttttgtagttttagtagagacggggtttcaccatgttggaccaggttggtctcaaactcctgacctcaagtgatccgcccgcttcggcctcccaaagtgctgggattacaggcgtgagccaccgcgcctggcctgttggtcactttttaatatttaagtggctgccacctgtttaaaccacttttttctttttttcagcctgcttgatttcct

SEQ ID NO: 35344 - DNA, 1564 bp, Homo sapiens
gcggtcaggagtttgagaccagcctggccaatatggtgaaaccccgtctctactaaaaatacaaaaattagccgggcatggtggcccccgcctgtagtccctcgggaggctgaggcaggagaatcgcttgaacctgggaggcggaggtggcagtgagctgagatcgcaccattgcactccagccagcgcgacagaacgagactccgtctcaaacaaaacaaaacaaaaaacaaactacaaaattagccgggcatggtggcgtctgcctgtagtcccagctgcttgggaggctgaggcaggagaattgcttgaacccaggaggtggaggttgcagtgagccgagatcgcaccattaaactccagcctgggcgacaagagggaaattccgtctcaggggaaaaaaagagaaagaaagaaaaagaggaagaaagagaaagaaaaatatgcaaagcaacaaaaaagagagctagaaagatggaaacaactcagaagacccttgcttaacccgcgtgcgtcacgggctacaggggtcggcccctcgagctaacccccaccggcgcctgcgcactggcctggcccgcggcaggaagccccggcgtgagacactttcggattccgtgacaacggcgggattaaacgtttttcttctcctttgctactgaacctatgctgtgacttagaacataagaaactccaagagggtgtagggattgtcttagctgtctccctcctccgccggcaccgctgaaggcagcccctatggagggcgctaaacctcggggccctgggtttctatgacgacaaacaggcgttccagcaaaggaggaagtgagcggatgctgggcgggtacgcaatgtgtgggtaggatcgcgggtgtccctttcccgtcattttaaaccaagaagcagtgcgaggcctgcccaactcgcgagtttgtggaactggcgcgcgagagcgctgcctgtggggaaggtatggtccccagccgagccgcctgcagcgagtgtcccccaccaggggtgccggcggtctgcggggtccgccgagcgggtccttcctgccctgctccttgaccccgacctgacggtccactaaggcttcttagtcgctacacataaccccagaacatagaggtcgccccgaagaaggagaaccatgctagatgaattctaaactgcgatctgaacctaagtactcaatagttgtcatctttttttttttttttaaatcttttttcctctgcctgcaggactatgtggcagcctgcaagtcccagtgcggcgctgatttgtgtctaaattagctttccggaggactatttcaaattactaaagagataggaggcattgtttattatgtctctcccgaaaacgccctccaccccgctaaactctacatcaacatctgagagcaaaaagttaaaagtgtctgtagccaaggaagggacaagaggtaaacttcgttgattctgaagtcataaacagtcatggccgtaagacagaaatcaccttccattcaccggttttttaaatctgatattcagaataccttgattggctacat

SEQ ID NO: 35345 - DNA, 827 bp, Homo sapiens
cagttattttgtagaatgttcctcagtttagagttttacaatattttatcatgattagaaagataaaaagattatgcatttttggcaagaataacaaacgtcacagaaatgccgctgtgtccttctcactgcctctttgggttcatgatgtccttgtctcattactggtgatgttaaccttgatcactttgttaacatagtacctccactgtcggattactattttttctttgtagttaataattatcctgggagagatactttgagactatgtaaatattctgattttcctctaactggattttgtctgcaacaactactatggtactgtttccctaatggtggttttgtatttccttctttccttctatgtttattaaatggaattcttctgttagagttgtcccttctcccctacttatttattcactcagcaatatcagtatgaactcattttattttatgggttaaagtccaatactatcattattcattttattgctcaaattgttccaacctggataccaggaactccttcaagttggctcttgggtcctttcgacaaggtccctaactttttgtagcatttccttactttcaagcaccataagatttttcaggctcatcttgtattttctctgctcccgcactaaatcagccacttctctaaaaagtcctagttcctttaaaaaccaagatctgaatgctcagtgctactggggtataactatcaagtcaacaatatggacaacaagtgtttgtttccttactatattaaactcactagctgggaatcactagcattacctgggagcttgctaaaagta

SEQ ID NO: 35346 - DNA, 2949 bp, Homo sapiens
cgtaaataattattatttgaactattaaaggcaaaaccagacagcttcatttatataattaaaaccccagaagacaccaatgtttcaaaatttgactttttccaaaaatgtcattacatttacatgatagatactcatggtcaagggctgaaggaaaatctctaaaaatcaaacaatttgatttgttgaggtagtggagttataggtgaattttcttcccagaaatttcgattaccaaaattatgtgcacagttcataccagagccatggcaccaaaaaaaaaaaaatcatgtgccagctcctttaaatattagtaaagaggaaaacagcccacacagtaacaaaataggaattcaaacccagctatgactccagtctatgctcattaccaatgttagggacacgcttccttattcccaagtgcttgatttctgtgcaaaatttatggtaatatatgatcgccctatgaattccttcttgtaggacacagtttaatccagtagttcatatgatgtagaaatattaatgaaattttaacacaatcaaaattctaaatggtaaataaaacagccaattcttcattctttaaatttttttggaagttgtcgaatctccaagtttatgggccttcacagttgacttagtgaacaacctcaaagtgataaagcagacaaggctttttgaagcaaacattccttcaggaaattcaagtggcacttcaaagaagtgtggactttcctggaatagaattttgacttctgtgttccatggaaatgaatggaatacagaaattacttcttaggcaaaaataagttatatacaagatacaatacattattaaaacacccaataatcctcaaataattagctacattctgaagttaatttatttataaattattgaagctctcaagctagcattacctctacattaggaaagaaactagataaaatagttcttaaatgagtcacgcaaggttgcgtaacaaaccagcagaaaaacaggtaatcaagttgtggactgcacgttcagcataataaacattactgaagacaggcactcagttttcataacaaatgttagtttttcaaactattctaatccacacaaagtcttccaaaaacatctgtagttactctaccatgaagttcctttttttattaaatgtttccactggccttttatatcctcatcttgtgctcaaaaaaaaaagctcaaaaaacatggataactgccacagcttaaaacaaagaaaggatctctcatacagatccaaaataaaatgtgttaaaacctaaagacaggtaaaacaaagccagtatgtttaatctatgtaactcatttctggatctgtgtaacagtataaagtctgataattaagcattactcataaagtagagagtactatgaaatttgttaaaagaaggaaaaggcacaaactttttcatcaggtattaaatacaattgggagaatggtacatatataatatgtaagcaaaatggtaggaggtcttactaaaacttcaactttgccctttttagcaccaattttttttttttttaagtattatcttttcaggattaagattatgaatgtcgagaacctaggcatgttgggaatggagtaatcgccgcctacactagtaggcaaatttcccactcacatttcgaaccctaaaataattcggcttctcaccttaaagtctaaacccaaaaatttactcacatcttaacccatttaatatttataagattcagtttctttttatcccaaaacaaaaatatacccccaacctacctcgtttactgtttgagtgaggccaggcgtggtggctcacgcctgtaatcccagcactttgggaggctgaggtgggagaatcgcttgaagccaggagttcgagaccaacctgggcaatacagtgagaccctgtcgctataaaaataaaaaataaagtaattagtagggcatggtggtgcgggcctgtagttccagctacttgggaggctgaggcgggaggatcccttgagcccagaagtatgaggctgtggtgagctatgatcacgccactgtactctagcctcggtgacagggcaagtacctgtctcaaaaacaataaaaataaaaataccatttgtgcggtacgaaggtgggggtggggagggaccgtttctgaaagtccttttcaaaaattcaagatatcagtttcaatactaaaacatggaaaagctgcatagtcattttgtttacttacaaattctggcgaagttttaaatcgtaaaactgttagtatcaggagagcccttcgagtattctctccgctccacaccgctcggctgcacccagcggccgccgcggcccgaatgtcgtccagggtccccgcccatatgacaaacactttccgccggaaggcgcccgtggaatcctgggactagtagtctccgtgccctgccttctgccttctccatccttcaccctctactgccaggtcgtctgacccagcgacaggcgcggtaaatgcgcgaccaaaccgcagaggtcccatgcaatctcatgctgacaggattacaggcatctctgtaagacgtcgaccaccctgacctgaaattcatagactgaagaaactcataggaccaacacagtgagcagcagtaccaaatgataatggcaagcaccatgtcctggaacacaccctctgtgccattaagaggagcatgtaatccaatgagttgcctaatctaaacctcagtttgctcgtgtgtcaaatggggacaacgttacttacctcataagtttgttattagtagattagatgacgtatgcagcatttctgttaaatgacagtagtgacaaaaaatagctgttttgatctactaattttataaatgtgaaaattaagagatggcgagcaatttacccaagaacatacaatttgttgggggaaaaatga

SEQ ID NO: 35347 - DNA, 2930 bp, Homo sapiens
ggcagaggttgcagtgagccgagatcgcgccactggactccagcctgggtgacagagcaagactccgtctcaaaaaaaataaaataaaaataaaaataaaataaaaacatagtacacattacgacttaagtagttgaaatttgtgccaagtttgagcaacaaatgagttgctcaaaaacattttaaggtgattacttggaagaataaacaaacaccttcaaacttttcagaatcgctcattgtaactggtatccaaattacaattttttaaatctattcactccaatcatacaaagccctacaagcagttgtatatttgaaggcaatttaagctttctttcaataattattcagactttacacgaacttaatcgaccttctctgaatgtgtctaaatttggttaggtatttgcagattagccacatctgtaaacatttgtataaggaggtgaaacaaatagattttaccatgctttcttattccataaagtccataaagcattctaaatcaaatgtagagtatcacgtcacatccagaataaaagtaaaaataatggatcacaacttaaaattacagtgctgtctttaattaaaaaacttgttcatttctcactgtgcacaatgtagcactaacatggtcttccgaacactgctgcttggtataaaaccgagaaatattaaagaccaggaataaggttatgtgtcctatgggtacatttcggaaaagaaaatacatccaacgagtatgactctagataggattttgtacaccctcaacaagtgacaaaattcaaaactaggtaaccgccctcataaggtacttgaaactaaaatttttgccacgaaaacatggcatgtgcaaaagttctctctctggccatcactcctgctaaggacactgggaaggacatggtcaacgtagcagtcgatcaaaaagattccagggaaactgcgcaacagcctggggccgagaagcgaaacttgggtcttctccaccctcgtcgcactccttttccccgagacttggtactgggagataggacgggagtctcctacacgcagtcaacacttgccacgagcggctagacttaggacaggcaagttgccctgccatccttctatcgcccccacccctcctttacttaagggcgatggcagagacgtcctcctcccccttctcctcctctttggtgcctccagccaggaggcgggagcgatccacagcagctgacccagctcaggcactgcctctctcacagccctcaagacacaccatgggcccagaggcaggtttgctacacagcagcgacgacgcaggcggcggccccagcgactcgcaactgcctccctgaccacagcggccaccgcccaacacccccgagaagccatcgccaccaccggcaggagaacctagggtccataaagccatcttcgcgatcgactaaagctacgtcaacaactatggcgggcgacgggcggcgggcagaggcggtgcgggaaggatggggtgtgtacgtcacccccagggcccccatccgagagggaaggggccggctcgcccctcaaaatggcggcagcagcgatgcgcctgcgtacagaactcctccgtcgcgccagggccggcgggaagtgaggttctcggacgagccgccagaagtgtacggcgacttcgagcccctggtggccaaagaaaggtccccggtgggaaaacgaacccggctagaagagttccggtccgattctgcgaaagaggaagtgagagaaagcgcgtactaccttcggtctaggcagcggaggcagccgcgaccccaggaaaccgaggaaatgaagacgcgaaggactacccgccttcagcagcagcactcagagcagcctccgctacagccgtctcctgttatgaccaggagagggctgcgggactctcattcctctgaaggtgaggaccgcggaggtaacagtcccagccgcgagccagggaacgcgcgggggcgggcgcgcgcctcggtggagctcatgcccgcctgggtactaagtactgggattggctaaagggtattcctcagccccctctggacttgtgccgccgtgcaagggccaccctgacccgcagcggggaaggaagcgccgaccggaggagtggaaagatggtcgtgtggagcgacccgggcagggctggggcgctctgcccaacatcgggcatcaatttaggggagtcagagctgcctttttctgcaggccttcacgaggggacagcgaattactgcagggtcggtttcatttcggttccctctaccctgcggatgtttctacagaaaccacttccatttccttctttaacgctcgcgggccagagtccccagctgaggatctaacctttcagtctttttccctcctcacccaggtgggcagagaggaaggagaaattttgtgagtgggcatttcgagggattgctgagtttagtgaattgatttgagacctcacccaatactttcaccgaaatggggtaactcatttttcctgaactgatgttccccagtgtttgataacttgagctgattgctgtttctccagtgtggtggtccctgccaaaaatctgccactttggtggccgtcactgtaacctcaagtagtctggcaaatcagactgacaaagtaacctgaaaaacaagactattaattagagttttcgtctaaatggacaaaagggatgctgacaaagtgagtgtatagtgttaggtaagtcataggtgaatcagtttccttaatctatcctctcccaccctgccccccccattttaggacctaacactgagtcacagatgaagtttcatgttaatcccatgtaaggcacctgtgaggtaaaaatcagcggacctgagtcacaatgggatgacatagtttgtggtagactattgataggcggaggagt

SEQ ID NO: 35348 - DNA, 1947 bp, Homo sapiens
taggccctacaaagagggaccatttactgcctcctgctgtcattgatattcgacaaacatttattgagcacctacaatgtcctagttactgtgctaggccattttggggtatagagagataaaacagatcttaaagtcttcacgacacttaaagatgagaaacagtctctgggtaaataactatcggagttcagaaggtggacagaagtggtgggcggcgagtctgtgtgcagtgagcacctagcggaagatggcattatttgcagaagagaggtcctttaagccaagtcttgatagatgatttcaccacgcggagattgggaaacgaggacaaagatatgagaagatatgttggccacagagagcctctcaaagcactgttaaagcaaagccaatacttaatgggaggaaactccgttttacttgcgtggagtcttaagtcattagatgcatgctaaacagaactgtaaccctcgcgaataaaacggccacagtgacagcagtgggtaacggcagagctgcaactactctgacaggggtgacgacttatttggacgacagttggtgaaacattgtaaactctcagaagctgccgtttccagactttgagttcattcttgtcgaatccccagcttgttttctcagcccggggtgaaatgcgcagccaaaaggcccaatgagcgtcaaagcgaaagggcaggggtggtctcttctgcggatataccttggctcctcccaagtcctacgagtttaaacttcgacgcaccaaacatggcttcttcgcggttctgctccttgttttatttcgctcccacctttcggccacactcaacatggccctaaccgaaggttggcatgcctgtggcactgtctcgggacagttctcgcgaggtttgcctgggcccgactgctcccgccctgcctcgcgccgccgccacagccgctgccgctggcgccgctcctcctccgtgtcagttgttgggctgtaatggcgactgggccgcccctgacgaagtgactcccgggccggggagcggggccagacctgcgccagagagaactgcagggagccgcagctcggggggtggcttgccctgagggaggggaggcagcctttccgccttgtcttccttcccagcggaccggcggatccccggagccggtgcgaggagggcacccggtgcgtccccggagcggggaggccaggccgggcagccctggggccggtcggggcggcgtcactgcaccctccgccaggctccgcgggatgcaccgtggtagccgagggcggaggcgacactctcaggtgagctcctgtaggacctggctgggaccgcggagtctcgctcagcctcaactgtctctgtccgcggtcccgggtccccggtggcggcaagagaggcggggccgggcgcggagagtcttggccctgcttggcgtccccctcggggaacctccctgggttctgaggcttttcggggacctaggtttcgggtcccaccagtgcctgctgaagacggaatttccttccttacgtgccagtgtcctcccgcctcctccacccctcctctagcctgcagaggtaagatacctctagcctttgctgcccggagaagtgtcccttcttcatctggcgatcaggcgtatttggggagattccggggactggctccagtggcagggatgatcagtttctgttccttttcagtggggatcacattctcaagtatagggaaaactttgatctactctagtctagcggctgctgaaggtagtttattcacagataatttggggaaagatttaaaaggctttatgttttggaagttgtcagtattttcctctgccttttaaatgcagctcaacatgctaagtaatatttagctaatgtcacaagatatgaattggaatttgcctggattttaaatattcagatagaaagttgca

SEQ ID NO: 35349 - DNA, 766 bp, Homo sapiens
ctagagataagataatggggcaaataatatgccatgtttaaaatgtggtacattttgtcaaatagcctttcagaaagttagtgccagtttatacgtccaatgagaatgctaggagaaattatttttaaatcattaacctaatataaacagtttagaagtgttctgaaagtctttgtaggacatttagacatcattttaccagcacttccgaaactgtattttcttgtgaaatacaagtttagtggtatagactgtttcataagtgttctgagaataaaagagctccatggttccagaaatttgggaaattcttttagagtgaaacaagattctttcctgtaagactcatcaacactgtaatatgctagtgcattacttattttaggataaggatgaggctgtagtatgaagcattttccaagtgtattttgactactgaatcatcaatcatcattttatggcattagaattcagctgaacacagtttgggaaatgctgatcttgctcaattcttattttgcaattgttagcgtttgctaagttagtgtctcacctaaggtcactaacttgttattggcaaagcccagattctgacttctgactcccaaatccagtctatcttctggtatgatatactgcacaattttgaaatatcatgatataggttgggcatggtagctcactcctataatctcagcattttgtgaggctgaggtgggtggatcgtttgatgcaggagttcaaactcctggagttcgagaccagc

SEQ ID NO: 35350 - DNA, 1064 bp, Homo sapiens
gaggagcaccttctccccttaaaataactcactcaaaacagtggagctgcaaaggtgaccagagaaaatccattaacaccttagtgcccatgacaccaggtgagttgatcgggctacttgcgagagggacatgtgagtgagcgtggagagctctgagtaggctgaagagctggatgtgggggatctgggctgctgggaaccccgaatgttggaatcgccctgacaaccttatgagggtggtcagatatgggtcctgaggaaactgattccacggcaactgcccgccaacccagcacaccccacagtgaagaggggcttctgatccatgagtagggcccctcaaatgatgttcccctttagatggtcatggtcatcagcaggggtgggtgcatcgatcctgtggggtcttggtggtcgcagaccaagcgtccctcttctcacatctaattcacaacgtctcatcgctccgcgggagcccaggaactgccctacaacagccgaaatccgggtcgtctattccaacggactcctcttccgttggatacgggggccgtgagaggccaaacaacctccgcgaggctacccccgcagcgaccgctcggcgggcgctccattcctttaccggactgtacacctcgcctcctggggcctgaggcgggaacccgggtcgcgctgctccgaggcctcggcggaccgcgaaaggatggctcaccacccggccagggccagcccctgcaacaagctcagccccgcccgctcccgcgcccaggagcggccggcggggcggggtggctgggccggcctcgggggcgggggctcgggggcgggggctcaggggcggggccacgtggctcctccttgcgggcggaggcaggcggtgccgcggcgccgggacccgactcatccggtgcttgcgtgtggtggtgagcgcagcgccgaggatgaggaggtgcaacagcggctccgggccgccgccgtcgctgctgctgctgctgctgtggctgctcgcggttcccggcgctaacgcggccccgcggtcggcgctctattcgccttccgacccg

SEQ ID NO: 35351 - DNA, 1359 bp, Homo sapiens
taaggtaatctcaggggacattgtgggcatgaacatcataaaaattcccagatcgctttccactttgaggttataagaggtgttcagtggctgcagatggacttattctagaatttcttccttcttgagagtgctggggggaaagattagcttccagctgactcacatgtttggcctcttgcaatgcagagtttttagttttcctatgagttgcatgtctagatactgacccattctgctcctggatgagggttaccacttccaaacaggattccccagtgcatggagcctttctctaaaataagaaagcgaaatcagaatttaacctctgaaaaggaaatggaaggatcaaagtctgtgggggtgagccagggtaaatgggaggtgggagatttcagtggaaactggaggtctcctgtgagccattggtgtgagtcagtccttgagccagatcgtgttgggagggcactggcagaatctgctgtcagcctgcaatgaagaatgtcctccactctaacccaaaggggtgttccctggtgaggccctgctgagaagctagggttggtctcgcttcatctctgtgtcctgaggtttcttgagaaaggttggttgtgggcccgcagagggctgtgctcatcccaccctgggctgtgtgagtactgcccatgctctctgctgaggacacctgtatcttgaggcaggaacagagacagagtgaaggtcacagggagagagaagaattttgcagccatatttggctggcttcaggcatttaatctgactgaatagggttcatttcttcagtgactagggcagtagattctctaggcacctgctgccccggggcagagcatgtgtttctgagaacctggtttatcccctttctattccagagcagctccggttgtctcactgtatgttttggaaactggttgtatccaatttagaccttcattgctattcactggctaatcaatcagcaaatatttgttgagtgataagcattgtttgcattgcagttggggaaatgagctactcatagaaggaaaattggcaactgttacaaagctgtgtttgaaaaaggccaaaggagtggttcagccatttcttatgggaacccaggggaggggaaagtcacagagggctaatctgatcaccagaggccttcatgccagtagttatttattacacgcttgccttatgccagcactttgctaagggccttcacaggccattattatgacaatccttacccgggaaaatatctgtactatggatattgtcttcctctttttttaaaacaggtaagtaactttccaggtttacacagatgctggagaaggtcattgactccagctc

SEQ ID NO: 35352 - DNA, 961 bp, Homo sapiens
cttgtgagagggacagcaggtgccacatacttgaatttgcccatcagacctctgatgctcttagctgtggagtttggaagacagctggtcagagctagggagagtcccttttccacgctccttgaagaaaaagaaaaaagaaaaagcatgtccttttctggtacctcctcctagccctgttcagaggtgggggcagggctcattggttccctgattagcactgtggtcctaagttcctggatcaatactttaatctctttgcccataacaaggaagagggccactgctttgcacaactccagggggcatcctcctgtcatattctatgtgaagttctgcagatcaatacggagatacggagagtacccactggaggtgggtagtaccttgtaatatctcaaaagtggaaggaggccgggaggtcaggacttccccagccttccacaggggcatgtggcgatcctggtaactggcagcagggggcgatgttggtgtggacacagaggaggcaagaaggattgttgggaaattgtactctgtggttgttgcatttttctttgggggctgttgagctctgtcttgctcagtaacactgactgatttttgctgttgtttgttgtttttgctgcttgtgtccttggctctccttttttccaaacgaaataaaattctgagacccaagaagaaaggcactgagttgactaagggagcacagtggggaccatgatttgttctgagttcagtggcggcttcaaacatcaggagagcccacccctggtgcagagggtgtcccgagccctgttataatttgaatcccaagctgcggggcaatgactcctcgtgtcgcatttgctaagcaggtcctatccagaccatgtgtccagcatgtcatggatccttctcatgtctcctcaaaaagggaccagggcccagagagagtagggatccaggagtggggttt

SEQ ID NO: 35353 - DNA, 1151 bp, Homo sapiens
gatctgatttctgtccctatagttttgtctttttccagaaatagaaatcatatagcatagtcttttgtatctggtctctttcacttagcatgttgcttttgtgatccatccacattgcttcaagtatcagttctttccttttgattgctgagtagtattctactgtatgcatgtatgcagtcatctgggctgcttccaatttttggcattatgaacagggatcttacgaacagttgggtaaaggtctttgtgttgtcctgttttatgttttcacagcttgtgggtaaatatctagaagtagaattgctgagtcatatggcaagtgaatgtttaactttccaggaaactaccaaacttttctaaagttttcactcacaccaataagtataaattccagttcctttgcacccttaccagcactttactattattaaaaatattttttagccattctagttaggtctatggtggcttttcattgtgatttctaatctgtacttccctaatgtctaacaatgaacatttctcatgtgcttatctgccaactatctatctttggtgatttatctgttcaaatcttttgttcatttgttaataaggttgtcattttcttataagaggtctttatatgttgtggacacaaaatttttttttccaaatatatgttttataaatattttctcccagtatatgacttctcattttttttaagagtatcttgaagagtggaatttttaaattttgataaagtgcaatttattttttcttttatagtttgtgcttgtgttccatctaaaaaaaactttgcctacaccaagatcacaaagatattcttctagttctttatcattattcctcttacatatacatctaagatcttaccttcccagttaatttttgagtaggcttcaggctcacctttttgttttgttttgcattttgatgtccaattgttacagctctatacgttgaaaaggctagtcttccctccactgaattttatgttggcatttttgtcaaaaatcagctgaccatttgtgattggatctatttctaggttatctatcatgttcctttgatctatatacctattcttataccaatacaacattggcttgatttctgtactttatagtaagtcctgaaaccag

SEQ ID NO: 35354 - DNA, 1388 bp, Homo sapiens
tttttctgtaccagtacataaagaaaacagagcttatttgaatccagtcagaaatgctttttgaaaaatccctaccctgttgctatctataaatgcattttaaatatatcaaacttaaatggacacattcctacatccataaaggcattcactcctaatggttaactagggatgacagagtgactcatctaaattctcaagagcacattcaatctggtttagctgttgctacagtttctggaagggagaaataaaaggaaaacacagcacatgccacagagaaggcactgaaaaacacctgaatgagggaatgaaagaaggaataaggggatggaaataagagctgattcagcagggcatgtgggtgcactggcagtggttgtctttataagcagagcagtgaactctagaccgtagggcaaatattgtggagtaaaagaaggctggcatcttgaagcaaggcatcaggaaaaatgagtagccttgaattttgtgctgaaggcctcacaaccactgtgaagagtttatttttcctcttttttgactctccggttatttgacttaagcctggttatcccagattgccatcatagctgtgggggtggctgagacaaatttttttctgggtggaaaattagggtttagaacagccagctcttgataatacaagaggaatcatatgacagaaatactatataaacatgtttgaggagtaagtgatgtgaatgctgtggaaggaggtatgggaaagcattaatttttctgtcttttcctagtaaatatagacacatgggtttgaatttccaattcccttaggcaagcttgttaatctctttgagttttggtttcctcatttataaaaaaaaataactactacatatgctttgggagactgatgtgggaaaattgctggaggccaagaatttgagaccagcctgggctagatcctgtctcaacaaaaacaaaataacttagccaggtgtagtggtgcgtgcctgtagtcccagctgcttgggaggctgaggcagaaggattgctcaagcacaggagttcaaggctgcagtgagccatgattgcgccactacactctagcctgggcgacaagagtgaaacactgactcacaaacaaacaaacaaaaaaaccctactagaggcctatttatagacaggggcttacagattaaatagtttattattttactattttatatgctcattttaatggttctttcaaaggcatttgataccataaaatatgtatttgtatgtgcatatatgtatatatgtgcaattttaattaacaaatattacaagcatggcatgcagaggaatagagaggctaataaaacaagttgttgactactacaaatatgcttcaataaatgttc

SEQ ID NO: 35355 - DNA, 2144 bp, Homo sapiens
gccctgcatcacattattacaatcctattatctttttggatctctatatagttttattaactttaccgtatttacttccatgtggccctctgggaaagagtaaatgaatgatatatcttattttatcctcattttgtaaaggttcttgggctggtaaaatgcaagatcactgaataagtcagagaaaaaaacacaaaaacaatgtccagtgtccagctaaataaacatcactcctaagaaagcaaacatcttttccacgttcaggatgatgctcatccccagcagatggtcaaaaaaaaaaaaacaaaacaaaatacacatacacaagcttcattacacctagctattaaccatacatgcttgctatcagttgttgaggaagaaggctccgtgtctttctcccccatccaccctctccctgctactttacctgtttgtacctggcatacaggtacaagagctgctccctgctggccacctgaatcaggccttgcaggtgcgcggcagccttctcaaacagctcggccaggcaactggtctcctcgatctcagggctatgggggaactccacctccccggagtcgtcccctgagctcagctctccaccgctgtcgccggtgatggcccccgcgggcaggaatgatgaagccatgtctccttgctcgctccgtccctctgtgtccggtctgtcctccttggattgggtgtaaggccggcttggaggcctggcccaccagtctgggtcgcgagcctgagctccagtcggacccaagctcagtcgcggcgcgctccctcacgtgaccctgctccctgcccacttctactccctgggcgtgcagagcaggctcctcgaccctctgccgctctgcccagtcgacccggtctcctccggcttccctccggccaacagcgcgctcaggctcgcctcaggcccctccaacggaacaggagtcgaggggcagtgaggccgggatgcgtgcgagcgcggggcgcggctggcgctgggccgtgggggcggggcggcgtgcgtgccagcggcgtgcgattctgtgaggcctgctctgcgccggcggggaagcgcgggcgacgctacgctggacgtccttccctgccggaggagagaaagtgccgtcagctgtaggggcgtcttttaatcgtttcgctgaaattagcagtcccgagctccggagcccgccaccgggatgggcccccgggggtgggggaaggaggccgtttgtgtggtagtgtagcggtgagagcggagtcgcgggaaacgcgaggctgaggactaaggttccgcctgccccagattgtgcgccccaagcgcctccaaacagccctgcgcgcggatctgttgcgtgcgcgttgggctctgtgttgaataatgaaaaactgcgagatggggctgtcccgtcttactgtgtgactgatgagtggaatcactgctctgcgtgtttcgctctccacaccttcggagcccgcacctctccgggccctgaataatagggtttggggagttcggggcgcgccttagcccagttctcatcccgagctctgtctttgacactgtgctttgtagacactgtacagtgaaaccagaagtacggcacagttcggccctagaggaatgcacaaaactatttttttaactgtaacattatgagtggttatgtcctaaatgttaaacacaacgacgcactatatattcatttagtattcaaaacaatgtaataagcactataagaagggtacaaagaaagtgttgtaaacagtggttattgactggggttaggcttgcgacgggtggacggacggctggacaggatgaggaagcaatgagagaacacaggaaggtgagaaagcttgcatcaggattcaacagacattccttaagtctccagaaagttccactgttagtccctgctgtcaaggtgctcgcaatccagtcaaagggatgtttaatgaccaaattcttgcaattaaaaagtgattaagaataatgtattgaggacttgatcattacaacataaggtaggtactcttattttactacacataggaaatcagcacagagtggttaagtaacttgtcaaaggctacacagctagcaaatggaggagcaaggaaaaagaagttagctttca

SEQ ID NO: 35356 - DNA, 1130 bp, Homo sapiens
ctggcctgaagtaaagatctttaaggaaagtctccctgaacttgaagctaagaaactgaaatttttttatccatttctgcaatatttttctggtttcagttactggtttgaagaacaaagggcctcagtaagacagaatatataattttatattgtgccttcataaaatataatttctttgcatgaaaaatgagtcccgtgagtttgaattccactctgggtggttcaggattccggatatccaccgtcttctgggcactgctggagtgcaagtggaatatacatattgaccagatgatggcggcatggagctaggtttgggttctgcccgtgtaacgggctggctggattatctttgttctttgggtccttaggcttaggaaagagaggccttgcacgttgtatggcacagtaaatggaacaaattgtttatgtaattatatctttattttaaacagcagccaaaccctaattgtgtttcttctttagacttagaacccaggaactgagaataaagacgaaaacaggctttgttaagatgtgcttggttttaaaaaacatgctctgacaagtccacttactattctgaatgttgtaacaatgagaaataagggtcatacagtgtaggctgagatcaacttagctctgaacctacatcattactccctttggattgttgcttttgcttttgtttggattttctttccttatgtatatattaacatttttaccattccccagttcctgtgcctcaccctcttctcccaaatattttggggaactttaaatttaaaattgacattctaaaatatgcacaagaagatgaaatgtttagcatgtatatgttaacatatgtttactaaagtttaaaaactgcaaatgaaaatatactaaaaactaaaattttgtatatgctaaattttctttaagtttgtattcatcaaaatatcccttctttgttgatactaatgtccacagctgagtatcatcctgggaaaaaaccacagctttgattaattttgtggcatttatgtttgaaagagttaatcagacatcagtcttcaaaagctgggaatggtttttatcatcaagaaaatctggtcaggcatacacaatcagatataaacaat

SEQ ID NO: 35357 - DNA, 1664 bp, Homo sapiens
atttgggattacaggtgtgagccaccgcacccagcaaatcttttatttttgcttgcactctgttgctctgctcgtcagcatcactgggggaagcatgctgacaagacccatcttgacatctgctcacacaatctcgaaggcagcagtaaaggagaatgtagcatattgtggctcttaaagctttcactcaggtaggacttaggtcacttctgcacacatttcatcagtcaaagtgagtcacatggtcaaacctaacttcaaaggggacagtgacgtgcagtcttactacattcctggaaagagaggaaagccagagtatttgtgaatgtcattagggacgttctttttcttttctcttccttcttccctcctttttgtataaacatatattatttaatggaaaactccctgccgggataggatcacttgctgaataataagaggtgagatacctcatgcacattattactttgaaaggtaattccatgcggtgttttcaaggactacagcacaatttctgcaaatgtagcccaattcagagaccatctatagtttatggaaaatattaactttagtgactataattacacggagccacatgtcagtagtgccctgttttccacagaaacatgagatattttgcaatttatcaacaagtgtgctgaccagattccagtcgaaggctttcttccaatccatggtgcttgtccaggcatgatcacttaactttaatgcatgggagaagaagctatgtacttcctactgtgccccttgatcttcagctactggttgaggactgggcaatgtgttacactgtcaccttctggcagggttacgtgagggttttctatttgcattacgggaatgacgggaatgacgagcatgccttagcaatttggaggagttagttatctgataccgtaaaggacactggctttgacatagaaagaactttgcacaggcttgtcgttcgcctggggatatgtctacttattttctgcttttaaaatgatttcctgttttgtttcacaactttgccacccatctatttttaattaatctaccttggaattccttctagacattgttacatgttgataaggaaggtcatgactgaagacaagtgaaaccatactttgagctgtttctctaggagaacagaagtcatgtctgtctggtttgccactgaatcccattgcttggcatggttcctggcacatggtgctcaataaatattattgaataaatacatgaatgaatgacagatagagaagacattattgactcacctgcatggtagttctctatctttctcttgaccaatggcaaaaaattgcaagctattggactggaatgagagatgcagagaccttcaccacagtaaactaagctaataagtccacagctttgctttcccattattttagttgctagattgttttcctctcccaccacactctagtcatgcccaactttccagccaaatggaactactggccattctcagaataggcatgtttcttgttatgggttggattttgtccccacccccccacaaaaatatatgttgaagtcctgatccctgtacctgagaatgtgacctgatgtggaaataaggtcactgcaaatgtaattaattaagatgaggtcatactggattatgg

SEQ ID NO: 35358 - DNA, 613 bp, Homo sapiens
gaaagaaaggctgaaagataagctgcactgatggaatttacagcctgtttccaaagataggatagaaaagaataattatccgttccggagatgatatgccaagttataaatgtgttaggtagacagcaagggctccgggagttcagagaggggaggcagcactgacctgggaaaggacaaggagactttcactgagaagagataaggcttgtgcatagacttcttcagtaggccagagggggaaggacatacagagtctggtgtggagaatggcatgagcaaaggtgcggggacaggaatgtgaatggtgtattcaagggacaatgactcattcacttggctttctttacagctgccacataatagtggacacataactgattattattattttctgtttttaaagacctcaagaataaagcaagagactcagactctcaatttagtgctcagtgaccccagtgctcagtgaccctgaggaggtcaaggtgaatccgagccctgtcaaaattctcaccctcatttgctggaaactccattgatttaatgctgtggttcaggagtctaatctttggaaaacctaaaaaataacctggtcaaatcttaattacta

SEQ ID NO: 35359 - DNA, 1007 bp, Homo sapiens
gcaaccatactgagtatcttcagaattgtagtcgggtacacaaggaccctcccaggtgaatacagcattttgccaagtctccatcatcctgtgaaggtgtctgggcttcggccggcccagaggactgagggagactggcccgacctctccctactgctatgctcttttttgaaggctaatcaataaaatgtcacggagcacttttctaagaaggccatgatctgatattcaggcaaagagagaacccttcaaggcaaagtcgatatgacaatctcccaataactggctttgctgcctaaagcatgaagcaccctaaatcccaatcgctcagtccctacttagagcttatcctcaaagagctggatttctaactcattttcattaaggcaaaatcattaacaatagttgatcttaatacgttggcaactgtgacctcaatcttactaaatggaatattatttcttagctactattcaatattacttaacaaatgcctttgtccatttgcaggaaactcaggtttcctgaccgccagtcctgaccactccctaccagcaagcctcctcttcacatagttgtgggaccgcatttgctgcactcctaacaagccaagagacaaagcaatcccggaaattcccttttgactctgtactgtaaggaaatgccatgtagcaatagcaggagggcagagtttaatcaaagcaccactttctctactcattgcccacgtttagctgctggaatctcatatcaaccaaaagcctaaagtcttgattctttctgtgtgtgtgtgtgtgtgtgtgtttttgagatggagtctcgctctgttgcccaggctggagtgcagtggcacgatcttggctcactgcaacctccaccttcctggttcaagcaattcccctgcctcagcctcccgagtagctgggattacaggcttgtgtcaccacacctggctaatttttgtgtttttagtagagaaagggtttcaccatgttggccaggctggt

SEQ ID NO: 35360 - DNA, 711 bp, Homo sapiens
gaaatactggcagggcttggccagcttccttggttctttatggacagtccaagccctgagataccagacatatggccttctgtgagtgtggtctaccaaacatgtcacttcccatttccaagacagctgggaaaaaaaaaattattttgctgccaggcaggatcaatctatggtaaaaatctgtgtaagttcagagacaactggttgttccagatggaaaaggagagtccatctcgtgtcttgtctgtgtgtgttcccatccctccagcagtgccctttattgctcgttaaggattacattcctttttctgtctgttatcccaggctcaggaaaaaaagcccttgacgggttaatgaattacccagcacactgaatcatctgtcttgtgtttcttactaaatgagaggctttaacagatcagcgctgaggtgttgggaagtgtgtttctagtaaacggcaagctgatgaaaatgcctcaaagccttacaattcacgacctgaaggcaactccaggagaggatagtttccaaaacatacctcctttcagctcttgtccattggctgcgaattcaaaaagtggatgtaattgtcaagttttttttcaagggctgagttagttacaacaatgtactgtttagtagtagcaactgttaacctactttttttttcaggagtgacaatgggtacaatacatagcagcattcccactt

SEQ ID NO: 35361 - DNA, 1388 bp, Homo sapiens
tcccagacaggcggtagaaagcagctgtaggccaacaggagccagactgaagagatccagggaggtgcctccagcacgtacggcccacaaggggcggagtcttaagaagcgtacccaagccccaccccttacagcacccccttcgtcagggcggtgtaggcggttaccatggcgatgacgtccagagggcggggaggggcggggctatggagaggaggaggaagatggcgggcgggctgctctgaagagacctcggcggcggcggaggaggagagaagcgcagcgccgcgccgcgccggggcccatgtggggaggagtcggagtcgctgttgccgccgccgcctgtagctgctggacccgagtgggagtgagggggaaacggcaggatgaagttcgccgagcacctctccgcgcacatcactcccgagtggaggaagcaatacatccagtatgaggtaccggcacggctggggtgtgggaggactcggaggggccaccatctcgccagtcctgacgtccaccgccgccttccgcttcagctggctccctgtgcccgggcagactttgacccgctgccgcggggagccactgcggcatccccgccgcggccggccgcctcccggctccgctgtccttcccctcccccgcagccccgctgccgccggggtaacggatatgcaggcggagggccgggaggaaaggcgctgcccgggccggggccggggccggggaacggtgggagggtgagctgcaggtgggggagtcacggtgcgagggcagccccgggtcgcggctgttccgcgctaatccccttctccccactcgccctgacctctcgtccccaccctgggcgagcgccccctcgccaaggttaggtcttgtttctctctctacacctctcaccaaggaatccttgtcttccaagagaagcccctccagtgatttccttcattccaaagagcccttcggctttttcccacttgcccactgttgacaaaggctttgtaacggggttgaaacttgacttaagtgtgtatcacatatgtagtggttatagtttttgtaaacacgttgtaatcaactattctgctttgataataagactctttttactgattgcatgaagtctacagagtaataacatctttgtttttgcctcttgttttggaatggagggaagagaaaggagagaagagaattattaacatttttttattttctgctaagtttttgctagctggggagaaaattagtatattgtaaacaatataccttacctgtgtattacagaaatcatgctccccattccctcccaatttctgtgctaacactgctggaaggtatttaatagataataaggaaccttacattaataaagggaaaaataa

SEQ ID NO: 35362 - DNA, 562 bp, Homo sapiens
caattggcctctcataagctgatgagaactgatgttcacacaacactgaagctccaaggcaactattttttttttaactaattgattgcaagtaatttgccaaccagttgtttttctaaaatacagatctgatcctaaagcccacgaaggcgttccacagtcagacccagatgagtctttttcagcctcattttaaatcataccatttctctcacatcttctatatgtcacctacactagatgtaggtaacttgtagcttctcaaacacacctgtacttccccccaccttctcattatctgccttctcagtatcttccttcagcctcgaatgacctcaccttatctgcctgacttttgcaatactatttatttatccttctagaactaactcaaatgctgctttctcttacttcctactgttggaaacattcccatttgccttggtgctctcatagccctttgtttatacttcattttgagctcaaatttatcaatttataatgaatgaatgtttcactctctagattataaacttctaaggggtgcctttaaatcatactg

SEQ ID NO: 35363 - DNA, 2012 bp, Homo sapiens
agaggagctgcagccggtgtagcctgtgggtagcctgtggacagcctggggccgtgattcgtggttggccgggtagttggcaagggcgccaaccgggcaggtgagcacaagcagggctttgtaaaacgagtaggaagctacagcaagggccaagtggctcaggcacagaaacgaagcagccacatgcaaaggtgtgggtattcccggtgtctaacttatgtccctcccgcggttcacagaaggcccctgacactgggactacacggagcagaaagtggcacccctttgcctcaggcacctcagtctcctcggggcttgggggcattttcagaagccacccgcagaaccagcgtcccgggcggcggctggttttcccctctttcccgggggcccccctctgtcgctgcggggtgcagcggcggcgagagatatccgcagctggcacccggtgtcccgggagggagaatcggggtctgtcgcgggccctgcgaccaggaggcgactgtgccctcagcagctgccccgcgcccgccccgccctcaggccactagaggcaacctcgcagcgactccggtgcccccccaagtctccctggcagggcgggctgtccccaccggccagggcaggcagcgggcggccgcttgctctgcacccgcagactccgcgccagccgcgccttcccggccacgcggccgcccgcggagtgttcccgccgcgcagacaggaggcgtggggccaggcagcacagccaacagcctctgtccgcgtcctcccgcggggcctcgcgcgggcgggggtgagaggggagcggcccgttgcgctgcctgggggtcgccagggccttcgtgccaaggccgcttccgcgaggcggggtgtgtccagcagggcaccggctgttagagccgcgggggcctgcagcctgagggtggagggagggcgggctcgcgggagttttgcaaaccccgcccccagcacacgcgcgcacgcgtacacgcacacacactgctgggctcaccctgcctttgagaaacgcacggctggggaggcggacggggcctactggtgcaccgcacggtcccgggccttgctgaaaggtgatgtggaggcggcgcgccgagccagactgggaggatgagctggagctggccggagggatggggaggaagtggggcgacctatggaccctcatgtccgtggggcgggggcggggtgtgcaggaatgagtacctggtgcatgagtgtccccagctttcaggcgtgctggaaaaaccgcaggccggctcgaattttggaaaccagtgttaaccaggacttcaaggacctgccttcgttgggctgtccctcgccttgccctgccagctacgcaaatgttccagagctctgttgaggtcattaaatcaccctgaatccatacggcaacactgcgagagagagactattataccaggctaacgcacgaggagtccgaggctcaaaggttaattcacagatagatccaaggtctgggagccaatcaaaagcggaggcaggatttgaacctggccctctgtgacttccagccagcatccttccaccctcctgggtccctctgcagctcacctcccttggaggccctcgagcagctctggaggccctgcttggcctgcccgccactgaccttcaccaggacgcaggggctctcattttggtttttcttctgggaagtggggctggagaagagcaggcagatccctttccagggcagtgtttccaaactgcaggcacaattcactcatgggttataaaagcaattttgtgggttgagaccaacattaaattaaaataaaaattagagtgctttatacaagccaagggtaggttaggttttgagaaatgcttctgcaagtgtgtaccgagttgtaatttaaagtgggttatggctctgttctgcggggaggcagaagaaaccctcagggctatggcctggcccctggggtagtggggaagaggcctccatcctagatgcccaggtg

SEQ ID NO: 35364 - DNA, 1483 bp, Homo sapiens
gcaatcaaagatgagctaggatagcttgtaagggaacagaaggcagtcctttctattctgaaaggcagaagaaataggagaaacctgtcaaacaacctggatgaaatcaaggagttaacaagcaacactcatttcctttagcactgtgagaaaattccggttgctaatagaaagctgaggaaagtttggtttggcttgtttcattttgttttccttccaaatcatcactgagtatgaacgactgctttcctctcctcacattactcagtaaaaactcccccattgaattgtcttccggtgccctgctccccagcctcccagaacggcccccgcccccgcctccctcccagcaaacgtgctcagacgcctctgggcttgttgtggtctcgccagtctgcggacaagcgctccaaactcaatggacaatggagctcacccccgtcaacgcgaactacaaagctcaggagggccatttcccttttcctgcccagatgctgttttcgctccttcgaagcaagatcccatgctcgactagacggccagtgtgcgccaggacccgcgtgtctccttccccacctgcagagctgctgagcccctcggcccccaaataaattgtaccgcagcacacaggccaaaaagggccccccaccaccaggggcttggctggggacagtggcttcacggtccaggtagggatggagggaacgtctcttgacgcttggtcatggccctcaagactaagccgtctccactgttccccctccccagctccaacttgcctcccctccccccactgcgagaagacctaggaggtgcgggcaggcagcaccgccacctcttcctccggtggagcgctcggccgacactcaccctttcaccacaaagaaggggtcctccatggacatggcgtcccggccccggccgccttcacctcctccgcgcacagggcgcccgtgcctcccggtctccctccgcccaccccgcctgttcccgcagctgcccgcgccttagtctgggtgaagccgagcagcgggcacgcgcacaggccaggtgcacaggacggccgctggtccagcactcgctcagcaccactggccgaatcccggactcgggcgccggccccctcggcagcctccagtcccggctcctcccgaagcgtcggagggcctgaccccacccccgggaccctcggccgcggccaatcacgaacgccgcctgaaacacgacttccgcaccccgctcacgtgaccagggcatatatctctctctctctctctctctcctctctctcctctctctcctctctctcctctctctcctctctctcctctctctcctctctctctctctctctctctctctctctctctctctctccccccccccccagtgggcggggcttacgcctgcgtccctcggccctggaggcggagccctcggggcggtggaggtgggcgggcttctacagccctctcctcaagct

SEQ ID NO: 35365 - DNA, 885 bp, Homo sapiens
ggaaggaatgaatatcattaagtggtattcacccttgcaagattctctatagtggcaagggccaggttagaagatctgaatgtaggggaggtcctaaaggtgatggcagcagcagggtgggcaatctggaaagactggggaagtgttgtgtagtacagctcttagacacaggcaagagaagcccctggatatggccccacattcagagagccccactctggccctctgctacccacatcctttcccacagagcgaggagtgcgtgaggctgaggggaggtggtaaccctgtgtctgggcccctccactctagaccagactccaggcacccaggaacctggagttccccactcagctgactcagagctgctgaggtttacacaacaaactcgcactttggcccatcctcctaaaggtggactggctgcccttgagggccttgctaggcctgaggggtggccaagaggtgggaggatcacttaagcccaggacaagctcagacaagaggcagtttgtggctgagcctgaataaaaaagtagaggtgtttaattgtgggaggcccttggcagtgctggaaggagcaagaaacaggaagaaaaagaggtgagtctcaggctgagggccggggactggagggagacaccagctttctctgtgccgccccattcaggcccagaacttcacacagtgtgagattttttaatttgaacttggtcttcgaagccatacaaagggcaatctctcaaggtggggggatagaacatatttcaagtttgttagattgatttattccttttaaatatctggatctctggtatgtgagcctccatctgtcatctcaatttagccatgaaattttagggatgatcctgttttagggatgaa

SEQ ID NO: 35366 - DNA, 2999 bp, Homo sapiens
tgattgccaaatactttgcagtaatactatttgttatccaggggtgtcctccgccgcgtatggccaccatctctatttttgccagggttgaggggggtcgcttacaggtgtggccggcctggaaacggtggtgtggctggtgagggcggagtcgatcagggaaggatcaggactttatggcagaacagagtccaccaccgtgttcggaagaaagttcgaatattttgttcgctttggttccggcaagccatcgcacaagccagaatctgtaactccaaacagtagcgctctcgagcaccgtcccgaacattcactccccacgggcctggtctgcggccgcaagccgtcgccccctttaagagcctgctccgcgggactaacgttcgaacgggccctggcgcccctcctcgggctccgattggccgtgcgcggcgcacgagggcgcgccggccagccccggaacggttggcggcccttcgtgattggcggtcgagaagcctatataaggcgcggggcagccaggctgccctgtttagcgaccggacccgaaacggggaagttgtcttgtttggagaggttagtagagcagcgcgcgcgtcaccagagtcgtttctcttcggagtcttaggtgatcgagggtgtgcccagggggcggacttgtttgcgcctcccgttccctcccaatttccaaacgtgtcaccccggcgccgacggccctgtgcaggggaagcagatggagttcaagctggaggctcatcgcatcgtcagcatctctctgggcaagatctacaactcgcgggtccagcgcggcggcatcaagctgcataagaacctcctggtctcgctggtgctgcgcagcgcccgccaagtctacctgagcgacccgtgccccggcctctacctggccggtcccgctgggaccccggcgccgccaccgcagcagcagcccggggagccggcggccgggccacccgccggctggggagagccgcccccgcccgccgctcgtgcctcttggccggagaccgagccgcagccggagcgctcctccgtctcagacgcgccgcgggtaggggacgaggtgccggtggccacggtgactggagtcggggacgtttttcagggcggagaggcggacgcgacggaagctgcctggagccgcgtggaggggccgcgccaggcggcggccagagaagccgagggtaccgccggaggctggggcgtcttccccgaggtatctcgtgccgcgcgccgcccctgcggctgccccctaggcggggaggacccgccgggtacaccggccgcgaccccccgcgctgcctgctgctgcgcgccgcaaccagcggaggacgagccccccgcgccgcccgcggtgtgccccaggaagcgctgcgcggcgggggtgggcggcggcccagcgggctgcccggcgcccggctcgaccccgctcaagaagccccgccggaacttagagcagccgccgagtggaggagaggacgacgacgcggaggagatggagaccgggaacgtggctaacctcatcagcatcttcggttccagtttctcgggactcctacggaaaagccccgggggcggcagagaggaagaggagggagaggagagcggtccggaagccgccgagcccgggcagatctgctgcgataagccggtgctgagagacatgaacccctggagcacagccatcgtggccttctgagcccttggcccccctgcggggaggaggtggagcagcgggcgtccccgaagtgagggccaggcccttcccggctgcgaggacgcccagagaccgcgggcgctgagcgcgttgggcagactggttgcctctgggcatcgcaaactgcccccgggcgcatctggcttatctggagacctgggagcttgaggctcattggaagaggacgatcgttaacttttgtgtttgtgtatgtctgtgtatgtaagtttgtcttgtggcattaagactattttgctcttctggaatgcaccactccttccccagggtttaagagattgggggcagacagggactttcctctgccggctgcgtggagaaggaagcggctaaaaggtttgggccggggagttccccattcgttctccggggagggagggactttacacctacccctcaccggaaagctagacccgcttcagggccaggagtggcgtttccgcacaggatttcctaagacgagagggatttagccaagagcacagacttggattccttctgtccctccccacctttctctcccaatgaagaaacgtttatatcctgtgattactctaggaaaggggcgtattaacggtcctttgcttccccgcaggggagaaaaagcttgacgaacttcacagaagagttcaagcttggaaataatggagtttatagagaaaagatatatttttaaaagctctaggtcagaagtactacacagtgcttttaaaaagtgtttaatgagagtttacagacagaagcccgaagtggaaagaccttatggttttgtagatatggtgactccagtctttgttgtataaaggttgggggagctgataaggtttttgtacagtattttctccttcgttgtattgatttttgtataaaaatgtaacttctacgtgtctaacacgtattaaatattttgaagcaacgtaactgcctgcttgtctgtaataacctgcctgggttgggagggaagtgggaggagggaaaccagggcctgagctagaaaattgaaggtgtggttcttagtatcagtcattcgcagactgaggacattgtttactgactccactaagtatcaagagagacacgtttaatttttcctcctagatcagaggactgctattagatactaatatcggcgacctgtcaggttctagaaacctgccactacaactgccttttctaaggtcagtttagaccaatttgtcacccaatatgtgggtgtctaatactaagtaatttaaccaacttttga

SEQ ID NO: 35367 - DNA, 692 bp, Homo sapiens
tgtaataagcacgcaactgttaattattgttaatgtagaagttaattctgtgtataaatcagatacactgtggtcaaagatttgtgtgtatttgtaagaaaagaggagaatggagaatctatttttaagtggtcctatgtgtgaatgctgggttcttttattcctctttttctctggacacttggcagtcaggaagctttgttctaccaacatagttttgttgctgtgaatgtctcacaccaaccggatgatttttccaattgtatcaaacaactctattttcagggaggagtaagctgaagtgaaaacaggcaaggagcaaagttcttgttgacatacaaatgctttctgtggatgagtaaagaaaaaagtagcccataaagttatttttgcttgaattattgcgcatggaatgtttaaaacatgcttattgataggttctggacaagagccttcccaatgccaacctagggctatcacacaaccaaatcagatgcagtgtgactagaaacgatgccatggttttagtacctaaccacttcttcaccactctgggagggacctagtctcttgatcaaattaaccttagctctggggtgtaaaaaaaccttctgactgctgcgtaaaagccagatgtttaaagtgctttccaacaagtactccaagaagatcacattaatagggaataaagt

SEQ ID NO: 35368 - DNA, 1173 bp, Homo sapiens
tgcagcaattcaccagacagtttagaactttctacgtgccagggcctctgtcccctgcaaaagctcacattccaaacaagtcaggtgtaggctccgctcctagagagggacggtgtgaacagagctaactgggtcggcctctctccttccgacctcctactcccctcccaacacctcctcgcccagaacgtctcaattctgacccagacaccctgggaggccgagaggctccttttggatctgcaatacaccctcctcaccacaaccaacagacaaaacgcgcgagtgccgtgcaaggtggaaacccttccctccggggggcgatcgccccagtagggtgaagcaggcctctttgttcacgggatgcctcgctagcaagccggcggcgggggcgttccctggaccgtgagaccccggctcccgaggacgcctcccgtgccgccgcttccctcaagcccagtgccgccagcggccagagctccggattcctgccgcccccagcccaccggcaagagctggcttcattttcccagtccccctttcatctggccgcacaggcagagcaccgtccgctaaggtctcctcccatcccagcaggaagggcggggagacccgcggaggatttaaaggggcgcggaggtcaggagggctgggggcggctccgcggagaaaatggggcgcgctcgtcctctcccgcagcctcggccgccgcgaagcttcctcccagctcccgcctttccgggcccggcgggccgagggggaagggaggcttcctgcgccggcgcccgcggctgccccagtgaggtcccgcccgagagcaggcccaggcgggggctgggcgcgcggcgcggcgctgcgggctggagggcgggggcggggcccgccgcttttagagtcacctcccgcgcgccgcggccgccgttgccagggtgaccgggggagctccgttgtggggaggcggccgcggcgggtaccggtgggcggagctcagcgggcggggcggggcggggcgggggcggggggagcttcctcgtcgtcatgggaacggcgcagttatttccagcccccgggccgtgccagtggcgcggtgccaggatgcgagagtattgcaggacagcggcaatctgctgcgacctgggacataacaatgcgccccttctgcagcgctgggcc

SEQ ID NO: 35369 - DNA, 1262 bp, Homo sapiens
agcacatagtgggcctgccataaatatttgttgaatgaatgcatggaagtcatgagctgtgattcacatttggatcctcccctgagtgccccagtgacctcgtgtaagttcctcagtatacttaggatggtgtgcgtgtgtgtggggagttgtggtgggacctgtgtttagtgcacagccttatggaccacttcaagtcttctctgtctgaaatcttccagcctctgctcctgtggccagttctgtgcaggattcccagctttgtgcatgtacaactcagaagtatggaggagttcgtaccttgtggatgaatgcttccccccattcttttcccggtggatcatcttaagatgagtttcagtttcctcagacggtcttgcagggttgcagggttggttaccagttgatccttagccatagacagcttcataatgaatcctattgactctctgtcccctgtttctgcctcctgggattatattcccaaacgcactacttgcacgtaagcctttgtctcaggttctgcttttcgggggaactcaggtgaagacaatcaggttccactcttggctctgctactaactagttctatttttgggtaaaaccatttcacctgtctgcttctgtttcttcagctgaaaaatgaatatcattgcctaccacacaaggttttttgtaatatttgataattcaatatatgtgagaatgtccgattcagtccctgcatatagcaggcattcactaaaggtttctttcttttcttccctcgcattgctctaaaaaggcaggtctgggaagcctgcttggcctgttggcctcctggctggtgaggccttgtgaacaaatgctgctgaacatgatatctgctctggtgggaaagccaagccagaggagcaaagggtgactaggccagatgactcaggggtttggcaactggatcattctcttcagagcattctgtaaacattggtcaatggaatcttgcaacatgcctgacaggtgggaggcgggcaggagcaagggtgtggaggatgtggaggcagggaggaggccaaacatgttgctcacaggggccgagggcagcatgtttaagatgctcctgcagcatgctggtaggaaatgttttcaatgggggagaggatggggtggtgacttctcaagttctatttctgtcccctgcttctttcctgtcaaccccatggcctttcccgggtggcgtcttgttgctgcagagaaaaaatcttcatgcaccccatgtccaa

SEQ ID NO: 35370 - DNA, 1177 bp, Homo sapiens
catgtataaaataaagataccggcacctacctcccagtttctcaagaaggggagctgaggaaggcagatgtgcccagcatggtgcctgtgaaacagggcctccgccaagttgcttagcgagaatgagtgtgggtttgagtgtactccagagaggtagctaggcactccaggcatttcctggaactcacttgtcctctgttaaaaaggtggaaaggaaagattgtcacccaggctattgggagtgggcgcatcttccaggtaactcaaagtcaactctgagtaaacaggtaagggtgtatttggaagccactcattgccttttaaattgggacatgggttttaggtgagggttgggaaatgcctagggctggcaggagagaatggcctgaggggctcatggcggctgggccaggcaggagggcttgaacctgggggcgggcctgttgcatccagaggggcagctggtagaggtggctctggaaatacgggctctggcagatgatggaaggaagactggggaacagtttgatggactgataggtttccagagactctcagccagcctggatagtgaccttttgcaggtggagctggtcagttttgaggcctttccgtggaagttctgaaagcagaggtcccgcccctggaaatcccccagcctacgccggcttgttgttgtcctgcagccctgtgggagctgcctgaccctggggcagggtgcacggacttagattaaggccagaaccaaaggtcagcttaactggagtagtatccatgggctatgcccctttctttttagctctctgaagtgtggatgctgcagcatcaggtttctgaagggcaggaaaggggagctgacgtcagcagagcacctatggagcacctggcactgtgccaagcagcctagactcctcatgacacatgggtaaagcaaacattattatctccatttttttttttaatagtaggaaactgaggctccaagggttggaagtagcttttcccatgtcacgtgactggtactgggaactcgagtctgccctgcttcacagctcttgttcctgcacaagtgtctccggagaggctggggtacatcagaacctccagaggaggggacttgggagcttgatgtttaaaaaagcaacacaggcatgtgcaatggagaactgaattggaa

SEQ ID NO: 35371 - DNA, 2893 bp, Homo sapiens
ccctgaactgactgagccagtggcactctctacagagagccagcttctccccatttcccctcctctccatctctttgttcccactgccaccaccttgtgctggccccttgcctctccagggatcgcccaaccaggcccctgctgctcaggcagtcagcatgaccttgacccaaggcacagacaggttcctgcggctcctggcctggatgggatacgcccacctcccacaggctcctgagagagcacatggccgtaatcctccagcctcacacctgctacccctcgcttcacaacttcttctaccctgagaaaccccacacttgtcattccctccccaccttcatttcccttcctggaatgtcctctctgccttctctacctgaattccctgtgttccttcaagaggctcaggcgacagaccctgtaggtgaattcagtgcattctctgcacacccagcccgcactgcctgcccacatgcctgcgtgggaatggttaagaccagatttctccagcagccttcagcctttgcttcccaggcctagtggcccccagcacagagcaggcgctcagggaaggtgaattaatgagtgcagctgaggtaagggcagcggccagggcctgcctgcagatattcatgccatttgggctgctctcctgttttgaaatgaggaaattgtgggccgggcgtggtggctcacgcctgtaatctcagcactttgggaggccaaggcgggcagatcacctgaggtcgggagttcgagaacagcctgaccaacatggagaaaccccgtctccactaaaaatacaaaattagctggcgtggtggcgcatgcctgtaatcccagctacttgggaggctgaggcaggagaattgcttgaacccaggaggcagaggttgcagtgagccgagatcgtgccattgcactccagcctgggtgacaagagtgaaactccgtctcaaaaaaaaaaaaaaaaaaaagaggaaattgtggttcccccagaagaagagagacttgtcaaaggtcattctgtaaatgacagagttggcatttattaagtctcaggtttgagattgttgcctccagggtttttccggctttgtgttgacaatgccagattttcaaggcggggtggaggagcgtgggaattaggggaagctgctatgtgacccgcatctttcctctgtcttccacccaagtgtccttgtgcccccagctactttctccaatttgcctgatttcatcctgggtgttttgtgtttggctttcactactgacttctcctgtgggccccctgacagtgaccgtgactcttaaacagccttgtggtttcacagtgccatccctgccaggcgctagtttcttcagagccttggtcccccagcttgggagcctggggatgggtgtgccccatgggaggggcaggcaaggacagagagcagcgagactgtagtggggtgtttctgcctgtgtgtccctgggtgtctgcatctgcgtggcagcagcccagcatgaggctgagggtgagggaggcatgcccgggcatgtctgctggggcaggctggccaggttcctgagaagaccaaggagatccttgggagaggtgactggatctgaggcatggagagaacgcccgagtcgggagggaggcgagccggagcagggatgggtattgatgaggaggctgtaatgggggtggctggtagtagtggtgggtagcatttattgactacttaccagatgcctggcactgggcttaggtcttttacatatattggatcgtttagtccttagaacaacaccatgaagtgagatttatctccgcttttcagattttacattttgcagtttacagataaggaaactgaggctcacgtcaccagtcatcattggagtccctgcctgtctgagcctctgactactgtcctctctggagaacttgagagcccttgtggggacatctggaactgctgggtggggttctaggggtgggggagctgcagcggtgtggttcagagccaggcaaatatggatttctattgtttttgtgtctcagactggcagggtctaagaagccttgggtaacttttatagatctttaaaaaactgaattgttttcaccctggattccaagataataaactttctttagcctttgttcataaggaggtgcagctttctctaaaagactccttcagaatgctgcctgtgatggctcctctgggccatactactacgaaccggcataaaaactacagctcaaaccctcctgggtcaaattacagaagaaaacaattcctggagtgtcatagttggccacaagctgaacatgagtaagcagcagagatgctgatttataagaaaaagctgatttgtgacagtgtgatctgcaaaagagggaactgtcctccgcctgcaatttgtgtaaggccgagtgacttcctctgagttgttcccaaggctttatttctagaccgcttgttaggaacgcagaaccccttgccttgcagaattactgtgggaatggaggcacagttctgaagctagcttggaaatgcccacctatagctcagaacctcatatttatgagaaaacaataggagaaagcaattcagctgtgatgtgcagctgattttcaccattcctttgctatgaccaggaaatgccccattggacactttgtgaagggagcgatgatgtcatggccagaggcacagcttcttttaatattcaggttgttagtatttggcgaagcctgcctctttccacccccaacccctactggatttttctggaaggcttttagctcttccctcaattgtgcgcacgtgtgcacacacacacagagacacacacacggacataccccccacagacagacacaaacatatca

SEQ ID NO: 35372 - DNA, 2427 bp, Homo sapiens
ctggcttctgagactggctttgtcactcactagttgtgtgccctggagaacttcctttccctttctgaattgcagtgttctcagctggaagatggagatatttacctggcagggtgttgttggcattaagtgaatcaatgtagtaaacatggccaattgtgtgtgtgcacacgtgtgtgtgtgtatgtgtgtgtgtgtgttagtgggggtaggaggagtataggatgtttgccatgctagaaaatcgtattattgcctactggttaattttctttttcctaagaccagcttacagagcaatggaacactgagtttaatgaaaagatgaaacagatgctgatgtggtgtggacagatactggtttgaatcctcttagcagagaagggaaagttctgatatggggaagatgggggaggcacctgtgactatgctggaggaaagggcaagaggaagtcaccccctgagggccacaggtggataccctctggtgctgtacctgggcttctggccatgggatgagttgagctgtgtggtgctcactgtctttccggaaaggaatgggcctggaccgatctgcctccccccatgactatctgcaggtgacaccagatctgcagtgaccttcagctatgaagtgggcacaggtttccttttagccctccccacctcggctttctgcacttgttcctgccagcccccactccctcttacttcattcctaattccttcctccatcacattttttcccttagaagctcatgtacataaggaggtatgaaggactggtaaagctacaagcccgacctctaccagggatgcttgcatttcaactctcagccactgccattctccactgggggcctctctcccacagtgtgagagtgtgggtgggcgtggtgcagctggcaccatgctgatgtctgtctctttgcaaagctgacctaccctgggtcaggtcctggctgccttgagtactgggagagggtggtgaaaaacaggcccaaagctctgtggggagcagccccttctcccctggcctttggctaggaggaagtgagtgggtcctgccttggggcctccacttccggggcctcgagggctgaggctgactcgatgattcctggaaggtgatgatgtcatggtgacatagcagttcccctccccagccaaagtcaataggagagtgggtgatgagtgtctctcattggcacagaggcccgaggctctcaggaatgaccaagtccactggcttgtccaggccacttaacaccacattcatcaatagctcccttcctcaaattcctacagctctgatcatctgtcccttcggcgatcccatattctggacttccagggcaggcttgattgattttaaacgttctgcccctttgtttttccacgtcaacaaattcacaaatcatagaaattcatcccaggttggcctgtgcatcctggggctttggggacacggagccaccaggctttctcagaaacagagcatgatcatgtgtacccttgcatcccagcttcacatctgcatgtcttttcaacaatattaatagcttctttagaatcagcatctgtgtctgtttcttttgttttctccaggactcctcgaaggggctgagtgtgtgggaaaatctaaaaatgcttatggggagggggaggttaagctccccttcttgtccttgtcaagggctctctcccactacttcactgggggtgaaaggcgcatccgcaacaagggccccgtgagttcataaggagatgtcttctgcttctctcacccgtgcttattaaaaggtaacctagtcccggtgtgggtttgggaaaaacgctgctggacttgcgcgggtcggggttgcttttggatagccactccctgcactcttgtttaccaaagacctgactctctgacagactgcgtcagacccgcatggagtaaaatggatcctttgtcagctggagtctgaattgaaacgccttctctgcggccctccccagaccgaccccagcgttttacaagggagccctggcgttgccttacgctgcccgatgctgccccctgcaggcggctcgcagacacagcccgctccgctgggtgtggaggctcagcctgtcccacacaaatgggttttcatcacctagagttgtcagagcagctaatagcgcatgaacaggaagaaaattaggcttctctaagtgaattgggtgttgaaagacactgagataaatggtggaggcagtgagaatgactgatggtgtttcaagtctgaagtaataagttggggaggtgagggttgggggtgggaggagaaggaactagtgtttacagtgaccatgtgatttaaatctgggctcacaacagcctcagaggcaaatgctctgaactcctgtttaatggatggtgaagtcgagtcttagaga

SEQ ID NO: 35373 - DNA, 699 bp, Homo sapiens
ttaacaagtctgaaagtttatcaggtggtgataagtctgatgaagaaaacaaggcatgttaagatgatagaggaagtgcatcagtcaggagaagctagatgaaactgcagtaacaaacaacccccaaatctcaggggctgattttttttgttcatgctccatgttaattgtggggtgggcaggtgggctctattctgcatctttctcactctgtgatccaggctcactgagtcctcatcctttggactatcaccagtcattacagcaggcagaaggaggaatgtgatgactcatgttggaagaggggaaaccagggatattgatgtgctgagtaatctctgcttgctccagatctgttcttatagctctgctctgctccactctgtgctcttgagcctgaactccatggattgcatcatcagggctctctgccctctgatttccagttgtatttggaggcatcatcaggagactcgagggtgggaagagagccaggtgcttgctctgttgctctctgcttggccacagttttgcaatgattgttttcctcaggccacagcgccatcaagcactctcacttccatggctctggctctcagaggggctctggtaacaccagtttctcctcttgcaggactaaccgtggtattggcttcctagtgtggctagttttgaggggccttaaaatctcttcttggt

SEQ ID NO: 35374 - DNA, 794 bp, Homo sapiens
gtgcggttaggccctttctggccaggaggtcatcttgggctccagagccacttgttcagctctgatatctaaacagccaaagtgaattattcacttaggagggtgaaaaacactcaactccctgggattgtcaaatggagttttccatcataaaatatcttagtcatttggaatctaaccaaagtaaacgcctggtcctgacccatccatacctctgtgctggatgggaaaggagagagggaaatcccaaaacaaatggaaaagccactttgccagccacagagcatgcatggccctccctgggcaggtctactccaggtgagacacggtttgagccaggctacaggtgaggagcgggtcacgggagggctctaaatggcatctctgtttgattccaggcctgagtggggctgcggcttacataacagtttggcagggagatgcagccaggcggaagcacgcgggtttccagcagcgtataatcatctttgatttctctgtttgctcagcagctttcatgtggtgggggaggcagtagtgcaggaggaggggcagaattccgatacactgcggccttctgttttcttctgcaaaacaaacagccccaaacagatccccatggccagggaattagccactgccacagaagtcccgtggcagtctaggggaggagctgccctggagcctgggtcaggcctaagaaggtcagagattgacttaaagttacggtctcgctaggtgcacaggagcccaaagggctaccgaggagcaggggtcttggatgctggcagcac

SEQ ID NO: 35375 - DNA, 3949 bp, Homo sapiens
agatggtgatcattgtcataataaaggatgagattgcccggggagaatgaatacactgagaacagaagatgcccaaatcccaaggagcaccagccttaggatgggaagagtaagggaaaatacagggaactcctagaatggaccctagtctctgaataagcaagccaaggtgtgagtttctgattgtttcttttcctcttgagtattgaacatgggttacaatgatatgtagctaatgcttgaagtgataaaaggaatgaagtgggaggatttaagggagggtgaaggcatttaaggtcaatcctggagaagttggtgggactgtttctggatttcctgtggagaaatgggctcccacccactctgcccccatcctagcacagttgccaccaggatgggcctcaggagaacctgttgaagacaggtgtttccagaaagggtcagtaggaggccacccactcttctgctaagtgaacttagtccagatcagaacatgtactgctcagagctatgtggtataaaggttgggcaaatatgcactttcacagtgctgagggcaaagaccaagaagactgggacatgaccagaaagaaaggttatcacatgctaaaagcaaagagaaaaggcaacaacagtcacctttcatctcattaagtgtattttctaaaaaaatgtcactttggaagaaattccaagtaggaaagtagttggtcggcccagggaaggtgttggttgattgttagcttttgattggtccaagatccaggaggttttatgagcaaagagctcacaatctcaacccccatgtcctgattacactaggctctccctggaggttctctctggctgggattttagacttgagaggtgtagagagagctaggaaccatggcagtagggtagaaaaagcccaggctttggagcaagcagcctaagttggaaccatgacttcaatccttatcatcagggtgaccttgttaagattacgtaaactccatgagtctcagtgttgtcatctataaattggagatgatacttacctcaaaggattgaatgaaagcgtatttacaaaaaactaccaatagctactcagcaagtgctccgtcacctcctgcttcctcctgcccaccttacttttgagagccacccttgagtaggcaagataacccattatcatggcttcctccaactccttccaaattagaaacattgtccagactgacaatgatctcagcattttctctgtgatccatcagtaggtaggattctaccattatgtcaccaagctattgtaccctgggtattgcatgctccaatcattgggtataagctggcctgcctttgtaactctcagctgtttacgtagttctctgggaaaatactacctttctaggagccatcagaggtagtgcaagcttgatgtggttcctgatcttctgtccaccctaaatccctagtataaaggtcctcagtttaaagacatacacccataccaacacacacacacacacacacacacacacacacacacacacacacacacacagagtgatatggctaggcagctgctgctggtcaacattagtgagatttccctcttgtgctgttgtaaaccaccagccatagctattgtcctgtcttttctggtctctctctctctctctctggcatatgagtaattcctcatttgctcttttttccctgaagttcatgccctcaggcaccgcaggcaacctggataaatttagctcttctcagggccttttcctgactttgttccatgactgttgaaggtttggctgctccccagagagagctttggcctggcttccctcccttggaggtctcatttggttctggtgtctgctatgccacttgcataattggtcatgaatcacttcaggttacggtatgtactttgagaatcaatcagtttgtgctcttggaagctgaaatccttcattccagcttcgcatcccttggatctccttccctgtgttttcccttgccctaaacagcctgtggctactgctcatagctgtcatgcttactccccattagggctaagcgggaaatgattggttggtgactaataaagcctcttccactctcttctccaggagcagggcctcagatcccatgagcaggatccagtacagtgaggatgttcatttaaagtttactagtttgaatggttgtagctgaatataagagaggctggagtcaaactccctctttaagcaattaaatgaaagagaactgcatgaaaaggccattatgtgtttagacatgatcatcttcaaggatccaaagtaagaatcatggatcatgctcaagcttttatcattttagttactattttctctcttcaatataggccattgataaattatccaatcagcaagcatttattgatcaccagctttgtgctagtagctatgggcatttcagaagtgaacagcatcattcccagtcacttatggggggaaaaaaggtatttttttaaacagtgaattacaaaggagagataagtgatacaggaaatgagagctattttaggggatgtgggtgacacctttaaaggacctgacatggactctgctttcctggggcttgcaaactacatggggagattgaactgacccacatgaaatgagacaagaaccagggccaaacaggaacattctgaggaggctttacggaggcagtaggtttatacgagaccttgaaaggtgggaaggatttgaatggatacagaaaggaaagaacttaccaggatgaaagaacagcatgaacaaaggccagaagagaagactggcacaagtttcacatatgtgtatgttttggggagtgcctgtaaaaagctggtcttactccagcaggaaatacatatggaggggggcagaaaaacaggctgaggatggtcagcatccagggccttgagggctaggcatgacccagtcaacttactagcaacagacccccaactgcaggagcaggctcctgttgggaaggggagacactgaccttgttccttgtaggaaccactatgaatggcctcttcccagtccccatattcacctccaccccagttagctgcccttgctatggaaaaccacattaaaaagagtcgtgaaaccaaagtgatctactccaggccagtgaggcagtctctgcacatgccccactgggagggtctctctcagtgcctggggctgcagacacttgtgtgtggagtccactacttgttggtagtcggggccaccacaggctatggcttcaagaggcagtgagataaacagctgtgccctggatagaaaagtacccagacactactgcttgattattttcctggcatgcaactgggaccagtggcccaggtgtcactgctgccaccctggctgatccacagaaagaagggtcagatctattttaaggatctgtttgcccagtcacatggagaaactgctactttaaaaacagctatttaccaggaaagtaaaggcccctgcaaaataaaaggttagtatactatccctagtaactctttaaaccaaagcaaacatccaggcaggccatgtttgcactgcaccgttcttgctttctgcccttggtcacttgattcccaaggttcttggttgatttcttcctcggagttaagctgagaaagagcaactggtaatatcaaagcacaggggtctctagagagcaagggagttataaacacacagcagttgtattgttacttgaagagtttgttactattgctctattgttactttggttggtttgttttaggagagtgaaggagtctgatcaggcaaaatctgaaagaatctggaagatctaagacccttcagcagaaatgcgccttctaccttgtattagtccgttttcacgctgctgataaagacatacctgagactgggaagaaaaagaggtttaatgg

SEQ ID NO: 35376 - DNA, 828 bp, Homo sapiens
ggacctatcctgtggaatttatagttttgcttagggcacagtatgacacatatttctaatagagaaaatagtacaatatatgaatactacagaataagtggcattaaaaaaatgcagggtgtaggtgacaggtggacctgtgtgccctagagcacacaatgaaaaacacattgcctatcatggaaattgaagtccttagcctgacctccaaagctttccataatctgacaccaatctccttctcagccctatctcccaggactcctcctatacagtcaaaccagacttcccctaagctcacctcgctccatggctgggtttttgccacttaacacaatcattcctttcctctcttcttccttcagtcacttcacacacgtccagtgattctgctctccaaatgctaactaggttccaggtctggctcacatttctcctgttccttgaaacctttccagcccatcccagtgacctcaccgtactctgaactcacagcactctttgtccaccatgcacaccactctttgtacatcacgcacagcactcactgcctggatgctcctttgttcatgaatggggcgcagccttgtgagggctctgatgggttgctatcttggacattgacttctcctttgatctctcctcatatcatctcacaaccatattatcctttctttgatggcttgcatttttgaatacccttcaagcttctagcacagggcccaatgcagagaagttggtcaataactgtttgtgaaatgaatgacaatatagaaaatcatctgatgctcaattatgtttccgcctgaagaggtaaaaagaaagggc

SEQ ID NO: 35377 - DNA, 3448 bp, Homo sapiens
aaacaaggttacaatatatttttttagaaggctagcagtttcctacacaaaagctgattcaagccagattctaaggggaatgctgccataatttccataggtctcatgcaaagtctcacttaagatagtgggcaagaatcacaacattatggaattctacaagacttgtcaagtaattaggaaatttccacttctaaatcaaaaagatctggaaatttaaaagccatgaggcatactaataactgccagccactaccacaaaacctccgaaagaagagaaactctcaagccacaacagccgaagaggaaacattctctctctccctcctccctccgtggaccagggtggctagaaagggaacacattgttctcctccaacgactagggcaacgttctgaagtacagtggcaaagtttctacgggcaaccgtccatgtttgcccagctgaaaacataactgcttctccctcagcctcaccacccttccccttggggaagaccaacaccccaatattgcctctagaagactcagccggccaaatcctacttcccacctccatcccagaaccctttagctcccgctaaaagctacaacccaccgaagcgggcagatcacctgaggtacaaagttcgagaccagcctggccaacacgatgaaactcccgtctctactaaaaatacaaaaattagccgggcgtggttgtgcacgcctgtaatcccagctactcgggaggctgacacaggagaatcgcctgaaccccagaggcagaggttgcagtgagccgggagattgcaccactgcactccaacctgggtaacagatagagactctgtcggaaaacaaaaaaaaaaaacctacaacccaatttctcggctgtcctctccaacatgttacaccaccaatatcatgcacactttgtcctaagcctcagtttcggatctcttgctcttttccgtgagccgagttgcatgccagcagcctagtgccactctatcaactgctgctgctgcggtgccaagtttacgtgggggaaatggattctgaagttttcagcagtttctgcagctcccaccaactccggggtcgtcctccctgccccctcactcaccccagccacagaaagtcaagcgtatcgttagggttgccctctttaacccttctctttttggagtggcgttcgcgcctctcctctttctcagactctagctggtccaagcaccggagctttctgggagagggcgatggagaaggggacagacagcggccggcccggggggtgtccgaacaggcaggttggtgggttaaggtcttaatcttgactcgagatctctccccggagttcacagagtaggcgacgaagccgaagcagctggagcgcgacccggaggagtctgacttctcgttgtcttcataattttcattcgttgctttcttcgtggacttgcggctgggggaggatccccgcttcccgcccccgagggagttataattatccactttgagagcagccccttcccactgaaatgtccctaaagtgggcgccctgcccctcgggcccccgtccgaatctcagggcctcacggaggtggccataccctgccgccgaggggttggggggtccgggggagggtgggggcgcaggccgtagggactgcgcgctgctgctgcctccgcccggaccggcttctccactgactgcgccgaggcccgggctctccattgttcggtcacattggaaggcccccgggaccccgaggcgggagccggccgcccaaacaacgctcaccgttacacgccgcaatcgaggcgtctcaaccatcgccagaaccaggacgattgctccgaaggccccaccacgaggaaggcagccaggcgcccgcgccaaccaagcgccttgtttgcgctccacaggggaccgcaccgccactccatccacagcgcaaacaaaccactgcgagccccagggcgcaggccggcccaacggcctccaggggcggcgcttcggccgcaagtagtgaaaagaagatcaaaacaactcaccccgcccttcccagagcctggccaagggcgcgccccaccagcgccagccccgacgggtccaagccaccagcggcggaagcacgcgggaggagcactcatgccggatctcaggcatgggccggagaggccgcagcgtagggctgggactggaggggcaggcagccgaaaaaagaggctgggcggcgcgcctcgcggggtagcaggggcggcgcgcctcgcttgcgtgacaccgggccgtccgggggcttacctggtcgccgagcaggcgggcgggtaaagctaggccgcgagagcgaggttaggagaggagaggaggccgcagtactgctcacacgctccgctcttctcccactctcgactctgcagagccgccagcagccccgcaccctttatccgcggcccggggccgcccccggtgccctgattggctcccagcggccaggagcccgggccgatcagctgatgcggtcccgggccccgcggccattgggcgaggagcccggcgggcgccgctggggtgggggcaagcgaactgggaaagaaagaaagaaagagaaaggggcgtgggggaggggcagggcggcgtgggggaagggagcggagccgggagggctgagggcagaggggcgagttgccgccaggccgggaagcctcggctcgccgcccacccgccagctcgccaggtgccgccccacggcccccaacccggggtcccgaggctcccagcaaagcccgccctggacctctgccctgccgccttcacggggaatagttttacgaggagagctccctggggaaatgcggaaccagggaaaccgaatttagccttttgttgcgagggagcctccgagccccgcttcctgcgggcaggggttagcttgagagggagcgcggggcgcgggacccgagggaactttgggcgggcctgggctagggcgggtgccgcgcgggcctggggacaggccggggttcccaaggcctggaagagccgcccgctccggctctcttgggtctggggaaataaacagaactctgccatttcacatttgaaatcaacgtgctgtttctctaattttacagagaggattctggagggcggtagaaactaagtctggagacctgtctcatactgctggccagaccctaggcaggtctttcagggcccaagtttcctcatctgcaaaataaagtggtcatcgaaaatgacctgtggagccgcccactagatttgaaattctgtgtgcaaactgcccccggagcagctgaaaggaaatcgaggtgttcacttgccccctttgaagtccagggattgtcaagaaattcctttaacgaattctccctgattttgctttatcaagtgcggcttcttgttaatctggaaaatgggaatacatacctctcctctca

SEQ ID NO: 35378 - DNA, 373 bp, Homo sapiens
tgctgggattataggcgtgagccacagtgcccagccgtctttcttctttctttcacaatttcatttttttcattttgagataacttgtttctccattgccattagcaaagtcactgtggcccagaggacacagtcacacttgcgtcagacacacctgcacttaaattcctgtgttgcctcataccaactgtgagacttgggcaagtcaacctgctggagtctcagttttctagagactccttatagaaacatttgtgaggattaaaaacaataacagagtcaacttcagaaacaagttactggattttattataccccaaaacaaggaagagagtgggtgcattactaaggcagtgactcagtgttcaggact

SEQ ID NO: 35379 - DNA, 722 bp, Homo sapiens
aactcctcttcccaccagagagggcacctttctctgtatgggcacgtttctctgtataaacacctttcaatcactgcacctgggagaatgccatccccgtgggatgctgacctctgtaggattcactcccacttctctaagtacctccaggaccataacaagagtaggtccaaggtaaggatgtacaagacctggtctgaggtgggagaggaaactgatacactacaataattatgagactttaccaatcagttttggccagagtttggggagcatggctatgaatgaatcctaaagctatttgaccatctaaagtaaaattgaagagctgacttaaccacattccttgatatgagtttacttccctgagattctgaatttaatatgttggcttgagcaaatagaagtagtacatacagtctgctaggttggccagttgaaacctggactcagtggtggcctacagtcagtggaattgacattttggaatgtccctggcaaacattagagaagcactgccaaacagaactttctatttctacgatggaatgttctgtagcttgtgctgtccagcacaataacttccagccacctgtggctattgagtacttaaaatgtggccagaacaactaaaacactgaattttaaattttattgttactttagttaatttaaatttagcacttggggctagcagctactgtattggatagtgccactct

SEQ ID NO: 35380 - DNA, 489 bp, Homo sapiens
ttaagtccaggttccaggtttatagaaattgtttttaatcaacacacctatccttctggccagacactgcaagtgtgaggtgattagttgccacttactaagttgtatttttttagcagttcggtttcacttagcatttttgtttctattttgctttgactctagattgccaaatacaaagggttattgacctggttggaaaaatgccgattacctttcttctgtaaaacaaacttgtgtttccattacattctctgtcaggagttcatcagtttcattaagtccccagaaggaggtaagcattggtgtgcatgcgtgtgtctgtgtgtgtgtgtgtgtgtgtgtgtagaaatataggaagtcacacttcataataatcttatgcctgtatgtgtgtgtgtgtgtgtgtagaaatataggaagtcacacttcataatgatcttatgcctgtcagtactatagtaaggtacaaatactggctgaatttat

SEQ ID NO: 35381 - DNA, 891 bp, Homo sapiens
cacaagcaacctggtgagttaaaaggcccagaatgttgtgatttgccaaggactctacagctaataagtagttccctgaactccagcaaatcagtccatcagcacccagggctggccaacccactggccccaccagctccatcacactgaggcttgtttggactgtgggtttgggggaaatgctttctatattctgtgttctgtagttttgtgtagacatagatcaccagatctggaaatgtcttctgaaaatacagggaagggtctccaatttttaatttcatcctgaaataaaacacaaattgttcagcatgcttgccccaaattattcttccccgcttcacagcatatggccctgaagatctctttgctcgcttgatttctattgcagaatgaataaggactttggaatctgacagagcaagactcctcccctgactcttcaactaattgtgcaacctttggccacaatctttctgaactttagattgttctttcataaaatggaaatagtgcaatgccacaatcctctacctacaattccaaaatccagaagagccctgaactgcaaggcttttttgtgagtttgcaactaacatctttgtcagcaaaagctgatctaactaatgtgggctatttttagacgtatataactctaccttcactttatctagctgtccagtctcctgtgttacttcacagaagggagtcactagctcctgttcaatttgttttaccatttatccaacaaaaaaatgacaaggaagatgaaagcctgctggacatgtccctcattaattgtaaggcaacagtgatagcccttttacacacagagggaaggaattacttttctttcatcaaaataaattttcttttttccatcgtagatat

SEQ ID NO: 35382 - DNA, 1358 bp, Homo sapiens
actattacttcctgtaaccttggattgttgaatctcaattttctatttcctgaaatggagacaaaaataaatacagtcatgtgtgtaaagtacattaaagtatggagtgttgcaaatattagccactcaatgaatgttagagctaattatatcccgttatgaaaaaataaattgcttagtgaattctattctccctacacatgtgcatatagctactacacgaataggcaactggcagctatcaatttcgtccaactgtcaatcagatctgagaattacagatccagttcaatcatcagacagcccgaaactgttacctgaatatttaaataactgcatctgctatagaattcacgaagcaaccctttttcagcaatctcaccactctgacagtttcaaagcctcagaggttaattgattagcctcttagaagtttaattaattgtgcaacacatacacgatcaccaggcaatgaaatctttgaaccaaagtgtttgtgtagaccgtccccattacaatcagatgtgaggtgggctggtataaacaaaggagccgggaaggagaggaaatatcaaggaagccctgagtgacgcatcagagtagagaagagacgagcctgcggaagtactccaacagacaatcctgctttcaatttcactttctctgtgcgacctgagtaagtcgcaaagagatgcctgagaaactgaggacatggataaatgacgtgtggactctgacagaactctggaagggcactggaggaagatccttccgggcagccaagggctgggagctcccctcccacttcccaagtcctccagcccctggcctctccagtctccaaagcccaagaattcttcaggatcgacttatcgaggttttctagctttcctccttctgcctgccttacctgctcaactcagacgtctcaattattcctttggcagccgcaaagcctggaagactgcttgcagcccgagcagtttcctcctgctgcgtcactgagtcagcagggcggagccaagaaaggagtgaggagtgtgggagggaaagcagccacaggctcactctggcaccaggagcaaagcttctacttgcacaccttctggaggaaagcaatagccactttctgtctgctgatgaggaatgtgatgcccggggtcatgtcactcacctctcagtcttgcagcctttcaggtggcagcagccaactgcatccatcactcttgcatcctttctttgtcattgcaaattctggtcttcttggaagaaaggaatggaaagtaaacacatattgagcacctattgtgttccagacacaatgctttacatgcagcatggtcccagttaacccctga

SEQ ID NO: 35383 - DNA, 711 bp, Homo sapiens
cgtggcatcaagtgcgcttctacctctctactcaagcctctagcgccccatccccgcgcccacccaggtccccaggcctgccgctccactccctaagagttggtgggacttcccccaagcagttggacaacctccccttacctctccaggcaggtggtggggaaggcggccagggtgcggcacatggctgcgggcgcagggcagcacgtagtaggcaggatggtggcaggctccaggaggctccgcgtgcgccaggaagcaaaggcgcggtagcaggtgctagtcaactgcggttgggtttagcagcctgcaagcgcccagactgagcggccgctgctttaaatcccctcggaggagcggggcggggctgggcactgctgaccaatcggagggtggggctgggcgctgagaaggcggaggcggggcccgcagccagactgggccgggtgcaactttcgcggcagctggagcacgcggagctgcaccctccgcccagaggacgccgcgtgtggaaggaaaagcggcaagagaattggcacggggatgagacgtgcacacccagtttcctagggaaaagtacctgccgacctctagtaacagcaggaaagtcacgcagcggtgtcgtgttgagagagtttgcacgggggtggtgggtctgggaggcacacagggctttctttgatcgcaggcaagtctgagcctgctgggtcc

SEQ ID NO: 35384 - DNA, 1155 bp, Homo sapiens
acagagcggaggctccgtctccaaaaaaaaaataaaataaaataaaaggaaagtgtttgaaaagtgcttaagtgctctgaaaagtctgagatgctgtgcaaatagtgcggcattatccttatttttgttattaaaatgagcgagacttgccctgaccagcgacgaattgactcactcagttttgggggagggggcggaggagtgggaggagcgggaggagaggggccacgcttgtcttctccgagggatgggaatttccacccagctggaagtaataagcgcccgaggctcgggcctcactgtctccacccccgctttccctttcctctgaccaagtgacaactgctcggaaacagacaggacagagaatcttaaaatagagcagcaaatatccgcggctcgccgccccgggctctgtggcaccatcagcagcttgcgcaggacacagacgtcggctcacgcgccgcagccctcggccccggaagagccgcggccgcggagcagcgaacgcgtgcctgccagggaaaagcagtcaccaggaacgcggcgttttggtcggctgcccatcgccagccctgtccgcgcgagatgccctgctccgaagctcttgtgagctccgcggcctgcggctccggaaggcgaagctcttccaggaagcagcggcggccccactggccctctcaggctgcggagaaagggcgggaggccgcggggctctccaggactcagtggtttcggagaaactcgacttcccaggctcggagggccagtttgggattgttatagaacaaaacgtgggcggcataaagtgctccgaagtggagatcaccttgaagactgggcccttggctctgtgacccagcagacccgaaattccaatctggcaaactttcagcctgacccttgggaaaggatcgctcccagagtgtgggggtggaggtgatgggacaaagatcttaaaatcctgaaaaacaaccgttattctcaactgaatttctgctaagtgcatccattcataaacagtacgtgcctggcgctctttacgtgtattaactggtttaattcccacaaccttaagtaggggctgttaatctcacaattgtagagccaccattcaaagccaggcagtctggccccagcctctgtgggcttaac

SEQ ID NO: 35385 - DNA, 1510 bp, Homo sapiens
ccatcgccttttatggaaaattgaggtggaatcacatcagcaagagaaaactgaggacttgtctctggctctgttcctgatttattcacacagtacatgatcctagaataagactcctgatactcctgaaagtagaggcggttgggttaaaaataattttccctttcaaaactctttcaaatgttctccaaaagaagccaggaaagctcccgtatgagtagataattcactttaaaattcgctcatctctctttaacacgagagtctgcagggctggtgcagcggcgtcaacccgaagagacctgaacgccgatgggcagttgggattctccgtacgcctcggaaacagcagcccaaacctcacaacgcagaaccacgagatagtggggattgcagagccctgcgcaagagaaggaaaattaagacgcagcggagcccaggaggtgcccgcacgcgggaaggactggcgtgcagacgaggcagggggaggtttgcactcggcgtggcgcgggtgagccgcgtgctctcgggcacccggccgccagttcggatgcttccgatcctcggggagccggggcgctgcgccggagtcacttcagcccatgttgttcaggtgacacccggggaagagcagactccagtgtgcaaaacgtttcggggtttccgggccagcggttccgggcgcgcctcgcgggcggcggcgcagaactacaacccccaggctccctggcgtggcggcacgtgggcccgagccgggcggccgcggatataaagcgcggcggcggctgccgggcggagcggctgcacggacaagagcggaggcctgggtgagcgcggcccgcgacggcacgggctaggacagacggacgcagacggcccgacgacctgggcgttcgggcggaggggcgctggggcctgactcgcgggtgggtgagacgttgacggacccggaggaaagagggaaggcagatacgctgggaaacggatctggggaaggtgtgaatgcgaaaagtgtagggacagacgggggcagaagaacttactcccccggattgtttgcagacagcatatctgccgggtctccaaaggtcctttcctcaaaatagagttagcaattgagcagaagagagcttaaagttaaacctgatacatccccccttcacttgaggagaaattggtggttttctgcttttttaaaaatccctatttgtatctcctcttctccgagtacctgtccctcaagatattctctgcccagaggtacattctgccctcactttctgtctcttaaaaaaacaactttgccatttaaaaaagaatttgacttaggcagctttaattctttgcactgagtgttcttatctgtggatggaggtataagatttcaagagtaataccccctcccaatgtttcagtaataatctaaattcacattaagccttaggctggagaacatttgagctattcgctttagctacgagctctgaaaacttcaaagcataacattccc

SEQ ID NO: 35386 - DNA, 1402 bp, Homo sapiens
atcagaatgctacaggccgtcaactccctaacatgcgcaaaagcgggcagccgattatccagggtagtggattatccaggagagtggattatccagagtagcaggtctggcgcgatgcccgcccggctcagcccatctccctagcaacgaaacccttccgcgccgcgaggttgctgagccccgccccctccattggcgcgccctcgccatcccccgccctggcacgcgctctgcgcatgcgtacgctcgctggccccgccccctagcgccgcggtcggagccatttcgccgattcctccatgcgagttgctgtgcgtttctctgttgtctcggtagaaggccagagtcacacacggtcctaagagctgggcaccaggaagcgaaggctggtaagggagagacgttccggctaccatgcggggcggcggggtcgcgggcgggcgccgtggaccatggctccgcagccggctttgttgcgaagcgcgggcggcggcggcggctgggggtgggggaagggacgagccgcccgcgggtccccggattgcgggttgcgtgcgcgcctcgccgcgatgcgcttgcgccgtccgggcagcctgtggccccctcccctctcctccgcccagcgtttcccgctgctgcctctagcaggcaaagcgcgcttcctcctctggcctgcgtacgccggggcaccgcggcggctgagggaagggggtgcttcgcctgtggtggttgccgccggggcgccactggcctagggctcttcattcattcaagccacgaataactggcgccgtcgtgcaggccttgtgggtagaggaaaaaaaattgaagaatgtaaagggagagcgcctttggctagtatagcgaggtaaggcgtctcgaaggagggaggctttgagctgataacctcggccaacgcgaaggaaaagcagagcctgcagaagcggaagggattagttatcgcttaagggcagaaactgggcgggagctgaaagcaggccatgtgactggagtgtggcgagaaggccttcaaaggagaatgggttttagggtggcaagagtggaaacaaaaaccgtgtaggacaatatttcactagcccgggtgtgcagtagtggtggcaggagagatggggagaaacgaatggataggggacgtattttgaagcagaaatgcgtagtggtggaaggtagtagatctggagtcaggctacgttttctggaattcttgcgcctttttttttttttttttttttgcaagagtctcgctctgtcgccagactggagtgcagtggcgcgatggcggctcacagcaacgtcggtctcccgggttcaagtgattctcctgcctcagcctccggagtagctgggactacaggcgcgcgccaccacgcccagctaattt

SEQ ID NO: 35387 - DNA, 1350 bp, Homo sapiens
agggtacagttcagttataaagaacatagataaattagtagtaacacagttttaggaagtctttaatactaacacattattttcatatttccctatgtaagaataaataaggctcacatcagtcagaaaacactaaataagtacactggggatttaggtattttggaagttttgtatggtggagatttggtttgtattattttggaggtgcacaccaggatgctgtgaaatgtaattgtatttctttttccttttgttttcctcaattgaaaaaataagtattaatgaacacttcattcggccatttattcacaaataatttttctctcttagaacactaatttttttcctcctcaactctttgacattaactttgtaaaccacaaaaaaactaaacaaacaaacaaacaaacactttggaaacaaatactcaatggcagtaagaaacacaacagttctttgaagcctgtacctccttattttgaccagaggagagcactagagagctttcgggctattgaagggcccccccgcaatcccaaagggctgggtggagcctgaagcattcagccaggcatagctttaagtcctgactcagaagacaacagcacagcactttgctaaagggcaagctcggacacatttccgtaacatataacacttctttcacctcagacgtgatgttctgctaaatcttcaacatttcataatgtgtactaaccccttgatacttgttttgtgttctgcttttgttttcagctctttgggaggtaaacaatgattttaatttcattttacataaaccacacaaaaaagaaagaatcaccatacatgtttaagggcacatgaactccactaaggagaggcagtactgggtatggacaagacacaacctaaaacttccgactaaagctaccctggtgaaaagccaatggcccaaacttgtcttaactatcagaagtcttaggtttcaattttgataggaaaagacactaagaataacatcagctaattagcctacaatttgaacagtgtataaatatctaataatggagcagacacttaaaatgtataataactggggtatcaacggcagaagacaacagacactctcaaccactgttgatggaaatagaaatagttaaaatcttattggaaggcatcttgttaaaaaaaaaaaactttcaaaattttaagtgtgcataatttcaacccagcaattccatctctagatataagttcccccgaaatgctgcacatgcacacaaaaattttatttatagtagttttaataataatgataatagcatttagcacttactgtggtaggtgcagttcaagaactttaca

SEQ ID NO: 35388 - DNA, 1247 bp, Homo sapiens
ctgtacgtatcaaaacatcattatgtactccataaatatgtatgattattattagaaaagtaaatcttttttcaaaacaaaggagttttggcaattctgttaaaaaaaaaaagaattgggtgcatggggctgggtgggaaggaagggttttacctcatacaagaggaatcctgtctttacctgagctcgccacgaaagataccttatcttgttttgcttggatttgtaccaaggacctaggcaggatctataaacctaacacaaagcatcatgtgtagtcattgtaactttgaagagggatattgtcattctcttccagtatcacattaatttttacctaattttaaattcttatttgataacctaaaaaccctggaaatgtgagaatgctcttcccttatcctctttcctatcatgacgttgacataacagaaaaggaaacagcattggtcagggagccagaaagagcaggttcctggcctgactttcctcctacttgtctacagaggttacttaatctctttgagccttaatttcttcagctctgcataggtgataacattctttgcttcagtgtaattttgaaaagtgtaacatagaatgtaaatataggctaacattgtcaatcattattaataattattatgtttaggttgcatttctaaatataaaaagataaagcatatagtatagtgatgcttaggcttgggaagaatacaaggaaatgaggtcagaaagaataaggactggaaaaataaacgcattggtaattataaaaatataaaaaatgacaaagttgcaatggaaaggtcaatgcaaacttttaaattatttttctaattatatcacacattctaaatcctgctgtagtagacatccgttgttttttctgccttataacctgccctcttctggtaacagcaagctttcctttcaattgcttttcccacattccatggttttctgttgggctgccaaacaccacacacatggtattctatttacctagctttgggggtatgccaggtgaccaaagccaagccaatcaacatccttccttgaaattatttatatagattatgaagggagaaatctcttttctctggagtttcacattttttttctttaattggagctctcttgcccatacaataaacaataaacaattacatttcctcatcctgcctttgttgctgcatagagacactgatgattgggcactaagatcatcttttgagggacctgaa
